United States Patent Application Publication US 2008/0229439 A1 - sequence listing, part 6

SEQ ID NO: 13468 - DNA, 2988 bp, Oryza sativa
  Clone ID: TFbOSC900289j.C1.o1.fg
atggcgaccccgttggccgacgagggctcgatcgccgccgcggtgatgccgcgctcgccttctccaccggccgccgccgcggggtcggcggccgaggcgccgatgctgatattcgtctacttccacaaggcgatccgcgcggagctggagaggctgcacgccgcggccgtgcgcctcgccacggagcggtccggcgacgtgggggagctcgagaggcggtgccgcttcctcttctccgtctacaggcaccactgcgacgccgaggacgcggttatctttccagcacttgatattcgagtgaaaaatgtagcaggcacgtattcccttgaacataagggggaaaatgatctgtttgcacacctgttctctctgttaaagcttgatgtgcggaatgatgatggtcttcggagggaactcgcgtcctgtacaggtgcaattcaaacgtttataacccaacatatgtccaaggaagaagagcaggtcttcccactgctcattaagaagttttcacatgaagagcaagctgatttagtctggcaattcttatgcagcatccctgtcaatatgatggcagagttccttccatggcttgctacttctgtttcatctgatgagcaccaagatattcttaactgcttacataaaatagttccggacgagaaacttctccaacaggttgtatttgcgtggattggaggggaagcagtgaaaacaatatcacatgatttttgtagtccttgttcaaaaagcaatgttagatgcaaggatgctattgatcaaacagacaagtatggatgctcacatgagcactttaaaactggaaagagaaagcgtgcagaatctagttatagtcagcttgttatgcatccaatagatgagattttgtgttggcacaatgctatccgaaaagaattgagcgatatagtagaagaaacaagaaggatccaacaatctggggacttctcggatatatcagactttaatgtgaaacttcaatttattgcggatgtgtgcatcttccacagtattgcagaggatcaggttatatttccagcagtcaacgatcaagtgtcctttgagcaggagcacgctgaagaagaacggcggtttaataaatttagatgtttaattgaacaaatccaaataacaggagccagatcaacagcagtggatttttactctgagctatgttcacaagctgatcagataatggagaaaatcgagaggcacttcaaaaatgaggaaacaaaggtacttcctcaagctaggattcatttttcatcagagaaacaaagggaacttttatataagagtctctgtgtcataccgttgaagttattggagcgtgttttaccgtggtttgtatcgaagctgaatgatcaggatgcagaagcttttcttcagaatatgtttttggcagagtccttccgatcgctgtctctcaattattctgctccttcattgtattcaagtcttttttcatgggagacagatgcagccttttctggcccagataacatttcaaggccaattgacacaatattcaaatttcataaggcaattcgcaaagatttggagttcttagatgtggaatctagaaagctcatagatggggatgaatcttcccttcgccaattcatcggaaggtttcgtttactgtggggtctttatagagcacacagcaatgctgaagatgaaattgtatttcctgctcttgaatcgaaagagacactgcacaatgtcagccactcatatactcttgaccacaagcaggaagaagaattatttaaagatatatccactattctttttgagctttcacaattgcatgctgatttgaagcatcctcttggtggtgctgatgcagttggagcgaaccacattcatccatataataggatcgattggtccaaaaagaataatgaacttttgacaaagcttcaaggaatgtgcaagtctatccgggttactctgtctaatcatgtccatagagaagaacttgaattgtggccactatttgataaacatttttctgtagaggagcaggataagattgtaggccgtataattggaagtacaggagctgaggttctgcagtcaatgttaccctgggttacatcagcgcttagtctagatgaacagaacaatatgctggacacatggaggcaagtaactaagaatacaatgtttgatgaatggctaaatgaatggtggaagagatcacctacttcttctggcccttcaagcgatgcctcccatccagaagaagatcatttccaggaaaagttcgatcagagtgaacagatgtttaagcctggttggaaggacatcttccgaatgaaccagagtgagcttgaggctgagatacgaaaggtttctcgtgattctactcttgacccaaggaggaaggcttatctaatccaaaatctcatgaccagccgctggatagctgctcagcagaaatcgccccaacctcagtcagaagatcgcaatggatgtacagtattacctggatgttgtccttcataccgagatccagagaatcagatttttggctgttttgtcatgataaagttagtgaccatacaatggaaagagcataaatgtcgagaaaagatgctagagatgaattgcccaatctgctgcgacttcctatttacatcgagtgcagcagttaaaggtctaccttgtggccatttcatgcattcagcttgctttcaggcgtacacctgtagtcactacacctgcccaatctgctctaaatccttgggagatatgacagtatactttggcatgcttgatggcttgctggccgcagaagagcttcctgaggaataccgggaccggtgccagagctttcagcttccggggccaaattctttagagaatcaagagaagcccaaccaaatgggcacaaagggtgttagttcccaggggattggtggcatgtggggcaacaaaattgttggtacccaaatatggaagtga

SEQ ID NO: 13469 - DNA, 291 bp, Oryza sativa
  Clone ID: TFbOSC410095j.C1.o1.fg
gaattgttggatttgggtgaggcagttggaacccaaagccgtggtctctcccaagaacgcatttcattacttccagtcaccaagtacaaatgtggtttcttttcaaggaagaaaacacgccgtgaaaggtgtgtaatttgccaaatggagtacaggagagggaatctgcagatgacgcttccctgcaagcatgtgtaccatgccagctgtgtaacaagatggcttagcataaacaaggtttgccctgtttgctttgctgaggttcctggtgacgaacccaagaggcaatga

SEQ ID NO: 13470 - DNA, 1773 bp, Oryza sativa
  Clone ID: TFbOSC401506j.C1.o8.fg
atgaagtttgccaagaagtacgagaagtacatgaaggggatggatgaggagctcccgggcgtggggctgaagcggctcaagaaattgctcaagaaatgccgctctgacctccaatcccacgagaacgacggctcctccgccggccgctgccccggccattgctctgtatgtgatgggagttttttcccatctcttctcaatgagatgtcagccgttattggctgcttcaatgaaaaggccaagaagcttctcgagttgcacctggcatcagtgactatttttgttagaattaacgtatctatcattgttcttgtctttggatttaagacggtcctcaatggttatattaataattatatacattactcgaagcaagggcaggaattcaaagctcaagcccagagtctgcatattgaaatacttcaatccccatggctctgtgagctgatggctttctacatgaacttgagaagaagcaagaagaacaacggtgctatggagctctttggggattgttctctcgtattcgatgatgacaaaccaacaatttcatgcaacctctttgactctatgcgtgtcgacattagcttgacatgttcgatttgcttggataccgtgtttgatccagttgctctttcctgtggtcacatatattgctacttgtgcagctgttctgctgcatccgttacgatcgttgatgggctgaagtctgccgagcgcaaatcaaagtgcccactgtgccgacaggcaggagtctttcctaatgctgtacacttggatgagctgaacatgctactaagctatagttgtccagagtactgggagaagagaatacagatggagcgggttgaacgtgttcgtctggctaaggaacactgggagtcacagtgcagggcattcttgggcatattcttagaaactggaccaaaggctagaatgtttgaggagattctgattccgagagaagctgctgcagttagaagctctcccaaacagccgcagggagatcacatagagcttcaccagaagcgccatggccggcgcctggactacgaggagcgcaagcgcaagcgggcggcgcgcgaggtgcacaagcgatccagggatgcccggcagttgcttggtgctaagggtaagaggttcgccaagaagcggtatgccgagaaggcacagatgaagaagaccctgaaaatgcacgacgagtcaacttctcggcagaaggttgatgatgttcaagagggtgctcttcctccatatctgctggaccgtgatcagacacaacgtgccaaggttctcagcaacacaattaagcaaaagaggatggaaaaggctggcaaatgggaggttcctttgccaaaggtcagacctgtggctgaagaagaaatgttcaaagttttacgaactggcaagagaaaaaccaaacagtggaagagaatggtcactaaggccacctttgttggacctgggtttacaaggaaaccaccaaagtatgaacggtttattaggccaactggccttcgtttcacaaaggcccatgttactcaccctgagctgaaatgtactttcaaccttgacataatttctgtgaagaaaaacccaaatggtcaaatgtactctactcttggtgttttgacaaggggaactatcattgaggtgaacgttagtgaacttggtctggtaacccctgctggaaaagttgtttggggtaaatatgcacaagttacaaacaacccagagaatgatggctgtatcaatgctgtcttactcgtgtaa

SEQ ID NO: 13471 - DNA, 453 bp, Oryza sativa
  Clone ID: TFbOSC406125j.C1.o5.fg
atgcgcctcgagatgtcacccgacaacctcctcttcttctgctccgtcgcggcgtcggcggccgctggattctgcctcttctcgctgtaccggcggctcgcgcggcggtgccaccaccaccacgcggcgcctgccggaggatcggaagaggaggaggaggagcgccggcggctgaccgcggtggcctccggcctcccggcgttcatgtacgaccggctggtccggcacagcggcaagggcgcgagctggacggagtgcgccgtctgcctcggcgtcatccatgtcggcgccatggtgaagctgctgccggcgtgcgcccacatctaccacgtcgactgcatcgacctgtggctgtcttcccacccgacgtgccccctctgccggtgcagggttgatcatcctgggcaggggcaggagacggccaggcagcttgcccagctttccccagcatag

SEQ ID NO: 13472 - DNA, 594 bp, Oryza sativa
  Clone ID: TFbOSC401779j.C1.o7.fg
atgacgcgccgggccaaccacaccgcctcgccctccgtgaacgccacgacggcggcggcggcggcggccatgatcaccgccaccccgtccccgccgccgaggctgccgcttcccaaccccggcaatgccgacgccggcgccggggcgtggggcccctacgccagctcgcgcgcgttcttctccaacgtggccaccatcctcatcatcctcgcctgcgtctccctcctcgccttctgcctccacgccgccgcgcggtgcctcatccgctgcctcgcccgccgccgcgactccggggcgccggcgctggcgccggcgctggcgcaggcgcagccgcccaagccgtcttccgacgacggcgccaacacgggtagctcgggggcggccagcgcggcgtcgggggtcgcgatggtcggcgggtgggccgaggcggagtgcgccatctgcctgtcggagctggcggacggcggcggcgagcgcgtccgcgtgctcccggcgtgcgggcacggcttccacggcgcctgcgtggacgggtggctcgcggcgcgcgcttcctgccccacctgccgcgcgccgtcgcgcgccggcgagccctag

SEQ ID NO: 13473 - DNA, 702 bp, Oryza sativa
  Clone ID: TFbOSC900008j.C1.o12.fg
atggggtcggtgctgtgctgcttggccgacgacggccgccccgtctgctgcttccgcctcccatggccgatcttcaacgccgctcacaaccacaaccacaactcgggttccattgctcgtccaagagcggatacacgagttgcgcctgatcaaggaagaattagtctcactgctccatcacagcatgattcgatggatactttccgctgcccgccaaggcccttgccttgggatgatcctcgattcagccatcatacagagcatcacccactagtaggaggacatgacaaagcttcaacaacgttccacaaatctggtagccttggagaaagcaagaatgctgatagcatatctaattccaaagctgtcaaggatgatgggccttccacagctgtgaaggatgatggatcatcagtaaaacaccattcagatggtctgcacattggcaaagagcaagtacatgatcttttcgactttgaggacgactgtccaatatgcctagaagagtatgattatgagaatccaaagatgacattacaatgcaaccacaatttccatctttgttgtatttatgagtggatggagagaagtcaagcttgcccagtctgctcaaagaaaaaattggtagcttgtgtcaatccacatatcacatttcgattggatgttacagatgcgcgtttgagtgattgcatttgcttctga

SEQ ID NO: 13474 - DNA, 1158 bp, Oryza sativa
  unsure (1)..(1158): unsure at all n locations
  Clone ID: TFbOSC17452j.C1.o2.gm
atgggtgcggtgtccatgtcgacaacgacacgcctccccctcgtcgccgccctcctctccgccgctgcttgcgtcgcagcagcgcagccggccaccgccgaggccgccccggagacgcccggcgtaggcatcaaggtgtcgttccgccccagnnnnnnnnnnnnnnnnnnnntcttcaccatgatcttctcgctcaccttccttctcctcatgtacgccaaattctgccatccatcctcccccgtcgccgcccccgcccccacggtcgtcccggcggcggcggcggacgacggcgtcgccaagccggtgatcgagtctctgcctttcttccgattcgcggctctccgcggggccaggcaggggctggagtgcgcggtgtgcctggcgcgcttcgacgacgcggacctgctccgcctcctcccgcgctgccgccacgccttccacctcgactgcgtcgaccgctggctcgagtccaaggccagctgccctctctgccgcgcgcgcgtcgacgccgaagatgccgcgctcggcctcaagtacgcctccagcgcacgcttcgtcccggccgggggggcgtccgagtccgagcgctttgacggcgaccaagacctcctgggcatcttcgtcgagcgcgttccgtcgtcgcggatggagccagcggcagcggcacactgccctgatctggaccgctacaagcaccgcatcgtggtgtcggacgcggtgttcaagagccgatggagcgagatcaactcctccgacctcatcgcgctcgacacggagctgcttcggtccatggagacgatggaggtggagatggagatggagctgtacaaggagacggaggaggaggagacagatcatgatcatcagcggaagacactgctggcggcaagcggcggcaggtcatcagtcgacgcggcggcgagggcgaggatgatatcatcgtcgtcgtcgtcgggatcagtgcggtccatgtcggagatggtgagcctgccgaggctgcgggcggcgatgagggagcgcctggcgcacgaggaccgctgggtccccatcgctcgtcgtacagcgcgctggttcgccggccgcgagagccgccacgacgaggctgccccggtggttgactcgccgccggcgtcccattccaattcccttgtctag

SEQ ID NO: 13475 - DNA, 1122 bp, Oryza sativa
  Clone ID: TFbOSC416024j.C1.o1.fg
atggcgaaacccttccccgatccgccgaaaccgccggtccccgagccgccgaaaccgggctccgatggcgcctgctacgactgtccctctcctcctcctcctcctcctccccactcgcgtgaccaccgccgcgtggtgatcgcgctcgccaccaccgcgtccctgctcttcgccatcctcctcgccttctccgtctactgcttcatccgccgcaggcgccagcagcgggcgcggcgtgaggcgcttctagcacctcccccttctgatgcggctggaggaggcggcgcaccgggtgcgccggtcgccgccggcgacggggcggtgggcggcgccggggagggggagggggagggggaggtgctgcaccacgcgtggcacatccgcaccgtcgggctcgacgaggcggcgatcgagtccatcgccctcgcgcggtaccgcgccggcgccggcatgctcggcgccaccgactgccccgtctgcctcggcgagttccgcgacggcgagctcctccgcctcctccccaagtgcggccacgcgttccacgtcccctgcatcgacgcctggctccgcgcccacgtcaactgcccgctctgccgcgcccacgtcctgcaccccgccgacgccgacgccgacgccggggacggggaacgcgtcccgccacccgccggcgctaacggcggcggcggcggcggcggcggcgcagccaccgaccaagcctcgagccccaccgatcaaaccgcggaccaagaaaaccctggtcaacagcagcagggggagcagcacgagctccgggtacaaatcgatcggcgcgaccagcccagctcgccggagccgccgcgccggagtcccgacccgcgcagcgcgcagagtttccggcgagtagcctccatgggctcgcgctcgccaccggcgccatccgaggatgctcctgaagacgagcagacgacgacgcagagcagcaaagagaaacaggggagcggcggtgactctgcctgctgcggcaaggcgccgtcgggctccggccgcttgcaccacatgaggaggtctttctccggcggcggaggccggcgatctctcccctcgcggcatggccgcacttctagctcgatgctgccgttgtga

SEQ ID NO: 13476 - DNA, 1047 bp, Oryza sativa
  Clone ID: TFbOSC900112j.C1.o8.fg
atgtcctcgccgccgtctgatccgagctccggtggtggcgatggcggctcggccgtgccggggacggcgagctccaacttcacgctgctgtacatcatcatcgccgtcctcgtcggcgtgatcctgtacatggcgatccggtacggccggtcggtgatgtcggagtggcgccagctgcaggccggcggcggcggcggcgagccgcgcgccgcgctgctcgggctgagctcggacgacatcgacgcgctccccacgttcacgtaccgggcgcgcggggcggcggcgtcgccgctggtcggcggcggcgggaggaggggcggcggcagcggcaaggggaagggggcgacgacggtggtggtggagtgcgtggtgtgcctgcaggagctcgccgacggcgacgtggtgcgcgtgctgccggcgtgcaggcacttcttccacggcggctgcatcgacctctggctgcgcgcccactccacgtgcccggtgtgccgcgcgcacccggagcccgacggcgtgcggcttagcgacgtcgtggccgtgtcgccgccgctgccgcagctgctccggtgcggcctgttctcttattggcccacggcggcgtcgcgcgccctggcggacatcctggcacgttctccattgaggggcaacaccacctcgacgacgacgaccaccaccaccggcggaccgatcacgtcgacgtcgtcgaagtcgccgtcgtcaccggttcaagcggcgatcatcaactacgtgcaggcctcacgttcgccgtctccgacggcgtaccacagcctgaacgagcggtggccgagctcgccgacgccggttgtggttgtgcggtcgaagtcgccgtcgccgtcgtcgccaccgataggtggtctgagtctgcagacgacgacggcggcggcggcgagaggcgtcggcgtggtggaaggggtggatgcaggtgcaaccacgtcggcgtcggcgtcggcgccaacgcaggtggtggcgctgtcaagggaaggtggtggttcgcggtccaagtcgccgtcgccggtgccacattaa

SEQ ID NO: 13477 - DNA, 963 bp, Oryza sativa
  Clone ID: TFbOSC900058j.C1.o15.fg
atggcggcgggggcgacgctgtcggtgctcctcctcgtcgccggcgtggtgctcatgctcgtgctgcacgtcgtcgtcgtcttctgggcgctgcgccggggcgtgttcctgcgcggcgcgttccgggtggaggagcgccgggaccagcgggccgccggcctgacgcccgacgagatcgccgtgcttccctgccacgagcgcaaggaagacggcggtggcggcggcggcggcgagtgcgcggtgtgcctggaggcgttccaggcgggcgaccggtgccgcgtgctgccgaggtgcgagcacgggttccacgcccggtgcgtcgactcgtggctgcgccagagccgcgtgtgccccatctgccgcgccgaggtggaagtgtccggctacgccggcaagccggccgcggcggtggccgaggcaagtcaggcgaccacgctggagatcgttactgaaagattgggaggcacagaacgcctcgaggtctcaaatgtgtgtgaagtccatccgcttgattcggttgatcgcatgaaaggagacaactccaacgtcttcctcgtcgccggcctctcgctggtggtcgtcgtccatgtcctcgtgctcctatgggcgctgtggtggggatacggccgctcgcgcctcgccctcgcccgcgcccgcgtcgtcgggcagcacgacgtggcgcgcggcggcctctcggcggaacaggtcggcgagctgccgtgccacgtggtcaaggagggtgccggcgagtgcgcggtgtgcctggaggcgttccgggcgggcgaccggcgccgggtgctgccgaggtgcgagcgcggcttccacgcgcagtgcgtcgactcgtggctgcgcgtgagccgcctgtgccccatctgccgcgccgaggtggccgccagccgcggcaaggaaggtgacgcgccggtggccgaggccgcctccttggagatcgtcgccgaacgatag

SEQ ID NO: 13478 - DNA, 728 bp, Oryza sativa
  Clone ID: TFbOSC401250j.C1.o3.np
ggttgtccccggggtcgcatgtgggtcctcgacgcggcgtgttggggtgggaaatggcaatgcgtccgcacacgccggggagaattgtggcatggaagaggggaagtgggtgaaaagctcagatatggcagggtccctgaagagtaaggccatcagctggccaagctctttacaggtttccagtagagacttctgctggtgaaacttgcatgctactttccagtcaggtttactcatttaaaagcgtttcaatggctgatctctctcctgcaccattgcaactggatagtggtagagctgcaggtggacagcagggcttctcacccatcaacacaggaactgaagctgcagatgatgtggctactggccttgaatatgggaaggtatcttcaaccgagctggtacaggcagtccacgatatgctttcagctgcaggggtaaggatggatgctacaaaggaaacgcttctacagactactctttccttgcaagaccagcttaaagaatctcaagtggctctactcgtggagcaggagaaagcggaggcagcagttagagaagctgatgttgccaagtcagcatggtcatgtcgtgtctgcctgaatgcggaggtcaacatgactataataccatgcggtcatgttctttgtaatcgatgctcaagttcggtttcacgatgcccattttgtcggacgcaagtatctaggatgatgaaaatattcaggcct

SEQ ID NO: 13479 - DNA, 14214 bp, Oryza sativa
  Clone ID: TFbOSC900265j.C1.o8.fg
atggatcccggcgggatgctgctcgaggacttcgggcagcgggtggacctcacgcggcgcatccgcgaggtgctcgccaactacccggagggcaccaccgcgctgcgggagctcatccagaacgccgacgacgcgggggcgtcccgcgtccgcctctgcctcgaccgccgcgcgcacggcgcaggctcgctgctcgcgcccgccctcgcgcaatggcagggcccggcgttgctcgcctacaacgacgccgtcttcaccgacgaggacttcgccagtatctcccgcatcggggacagcaggaaggtgtcccaggtctggaagaccggccgcttcggggttggttttaactcggtgtaccacttgactgacttgccatcatttgtgagtggcaagtacattgtcctgtttgatccccagggtgcttatcttccgaatgtgtcagctgcaaatcctggaaaacgtatagattttgtcagttcttcagcaattacactgtacaacgaccagctttcaccctatcgtgcatttggttgtgacatgaaagcaccatttcagggaactttgtttcgctttcctttaaggactgctgagcaagcatctcttagtcggttatcgagacaagtgtacacagaagatgatatcttatctctgtttgctcaactttacgaagaagctgtatataatttacttttccttaaaaatgtgctgtcacttgaaatgtatgtatgggaatctggtatgagtgaaccaaagatagtgtactcttgctccatagggtcacagcatgacaatttgcgctggcatcgacaagcccttgtcaggttttctggcactgctgctgagtcctctgagcaaaagatagattccttttcaatggattttgtatcaaagtcatttttgggtgagaagtttgagaagaagagctatacctattttattgtacagggaatggcatctgcattaagtaaaattggtatttttgcaacaactgctgccaaggattatgatcttcacctactaccttgggcttctgttgctgcttgcatctccaacgtgggacctgaggaagttattctcagacaaggccgcgcattctgttttcttcctttgccagtaaagacaggattatctgtgcatgtgaatggttactttgaagtatcatccaaccgacgtgacatttggtatggagctgatatggacaggggtggtaagcttcgctctgactggaatatgttattgttagaagatgttgttgctcctttgttcagagaactgctgctacagttgcgtacagttttggactccaaaatatcatattattccttatggccaactggtttgtacgaggagccctggagtattctcgtggaacaaatctgtaaatttatttacacctctccagtatttcactcggagatcaaaggtgggacttggataacaccagctgagagtttgcttcatgacgagggattttcaagaagtgatgatctcagtgaggctcttgtgatgttaggcatgcctgtcgttcgtctaccaggtgcgattgctgatatgtttcctaagttccattcgaagtatatgctcaaaatagtaactcctgctacagtgcgacatttcctcaaggattttgaaaatcttggtacattagaaaaatctcagaagctaatattattggaatattgccttgctgatctggacagtggtaatatcggcaaatgcatgaatggcctcccattgattccattagcaaataaacagtttgggattttttctggtatttcacaggagaatcaatattatgtctgtgatagcatagagtatgagcttctttctgctgttagcgatagaataattgaccgaagcattccccctgtaatactagacaagttgtatcagatagccagtagttctcaggttaacatttcacttattgaaggccgaacatttcttcagttctttccctggctatttcctcctggatggaaatgccgaaaccaagttccctgggatccagaatcgggtggatcatctcctacagcagcctggtttaaacttttctggcaatacattggggattgttcatatgaccttgatttgtttagtgattggcctatattaccttctacctcagggcacctttatagagcatctacagtctcaaaattaattaatacaggctcactgtctaatttgatgaaggaactcctgaccaaattaggttgcaagatactagacacaaagtatttgagtacgtgccagcatttgtctaattatgtgtatgatggtgatgcatctggagtactccattcaatctttggggttgcctcattggagggtgttgatttgcaagctttgtttcagcgcatcactcctgctgaaaaaaatgaactatatcagtttgttcttgatgcaaaatggtacttaggaccccacctttctgatatgagcataaatctatgcaaaaagttacccatttttagggtatttgatggagggtctcccagttcttatggtttctcggatttatccacttcaagaaagtatctgccacctcttggtgttgcagagcaattactgaatgatgactttgtcttctgcatatccccaagtgatgaagatataataatgagatattatggtattgagcgcatgccaaaatcaaacttctaccagaggtacgttctgaataggttagatgagttgcaaacagagtttcgtgattcagttctactaaccatcttgcaagatctgcctcagctgtccttggaaaatccaaggtttaaggaagccttgaaggtccttagatttgttcctacgaccaatggggtcttgaaaagtcctcaatctctttatgatcctcgggtggaagagctctatgctcttctccaggaatcagattgttttccccatggcttatttcaaaaccccgaagttcttgatatgttgctctgcttggggctaagaacatctgtatctattgataccataatacaaagtgctcggcacatcgactcactcgtgcacaaagatcaccacaaggcccattcaaggggtaaagtgctcctttcttatctcgaagttcatgctcacaaatggtatgtacataagccatttgatggccgtaagaaggtaaatatgctagctaaagttaccaccgtgctcagatctcgcgatacatcttgggaagctgatcttgaaaaattctggagtgatttgagaatgatttgttggtgtcctgtgttggttactgccccaagtccagctttgccatggccttcagtatcatcaatggttgctccacctaagcaagtaaggatgcaggacgacatgtggattgtttctgctagctcacgcatacttgatggtgaatgcacttcgtcagccttgtcatatagcttaggttggttgtctcctccatctggaagtgtaattgcagctcaattgcttgagctgggtaaaaacaatgaaattgtgactgatcaagtactccggcaagagttagcgttggtgatgcctaagatttattcgctactgagtaatttgattggatctgatgaaatggatatagtgaaggtggtacttgaaggctgtagatggatatgggtgggggatggatttgcaaaaactgatgaagtagttttaactggacaccttcatctggcaccttacattcgcgtgattccaattgatttagcagtattcaaggacctgttcttagagcttggcataaaggagcaacttgaccctgtagattatgctagtattttgaccagaatggccacaaggaaagcttcgacttcactacaagctgaggaacttagaacagctgtcttggttgtgcagcatctagctgagtttcggtttcaggaccaccaaacacaaatatatcttcctgattcttcagctaggctctgtctgtcttctgaacttgtatttaatgatgccccttggcttcttgattttgatgaggacatcactgggaatgcaccaagcattgctttcaattcgaagaagtatgttcacaattttgtccatggcaacatttctaatgatgtggcggaaaggctaggtgtccgctctctccgccgtctcttgcttgctgagagttcggactcaatgaatttgagtttgtcaggggttgctgaggcttttggacagcatgaagatttgactacacgacttaagcacatcgttgagatgtatgcagatggaccagggattctgtttgagttggtacagaatgcagaagatgctaaggcttctgaggttgtgtttttactggataagacccattatggtacttcatctattctatcacctgaaatggctgaatggcaggggcctgctctctactgcttcaatgactcaatttttagtccccaggatctttatgccatctcacgaattggtcaagacagcaaacttgagaaaccttttgcaataggcaggtttggtcttggcttcaattgtgtatatcacttcacagacattcctgggtttgtttctggtgagaatattgttatgtttgatccgcatgcctcttatctgccaggaatatctccatctcatccaggtctaaggataaaatttgtaggaaggaggatcttagaacagttccctgatcaattcaccccattcttacactttggttgcaacttgcaacagccatttccaggcacactcttccgcttccctcttaggaacgaggctgctgcttctagaagccaaataaagcgagaacaatatacaccccaagatgtggaaatgcttttctcttccttctctgaagttgtatctgaggctctactttttctccgcaacgtaaagaatataactctgtatgtcaaggagagtgacagccaggagatgaaacttgtacatcgtgtctcgaagcataatagttatgagatggccaaagaacctcatgcgcttaatacgatgcttgcatttataaatggaaatcaaccatcaggaatggataggaatcaatttttcaataagttgaataagactaaagatagtgatttaccttggagttctcaaaaggtctctatctttgagcaaagccctgctgcttgcttggtgcattcatggatcttaacagagagtataggtgggggccatgctagaaagttgtcaactgcctctggtagtaagtcccacttctttgttccctgggcatctgttgctgcttatctgcattctgtgactgtggacaatacaaaagaactgtctggtgaagctgaagtcaaccttgatgatttggttctcaagcaactgtctcttggatcctctaaggacaggaaattttttgagggtcgagccttctgctttcttcctttaccaatcaacactagcatgccagtgcatgtgaatgcttattttgaactatcttcaaatcgaagggatatctggataggaaatgacatggctgggggaggaagagtacgatcagaatggaatcttgcactgcttgaagatgttgctgctcctgcttatggtcacctgcttgcagccattgcacaagagcttggtccctccgatctgtttctctcattttggcctactgctgtaggtgtggagccatggtcttccatggtgaggaagctttatgtatctatcgcagaacttggacttcatgttctgtatacaaaagcacgagggggacattgggtgtcaacaaggcaagctatctttcctgatttcagtttttcaaaggccattgaactggcagaagttctttctgaagctggtttgcctgtggtatctgtatccaaacaaatagttgacagtttcttgaacgtatatccttcagttcatctcttgaatcctcatctgctgaggaatttgttgatccgacggaagcgtggcttcagaaatagagaagaagcaatacttgttctggagtactgcttgagtgacatgggagatccttcctttcctgataaattgcaagggttagctcttcttcctttggcaaatggatcattcacaacatttaccaaccggggggagggtgaaagagtattcttttcttcacaaatggaatttgagcttctgaaggactctataccacatcttgttgttgataactctttaccggatgccattttgaagaagttatatgacatagcttgttctgcacggtcaaacatttacttattcacatgcaattttctccttgagttgttgcctaggatcttgccacctgaatggcagcatgctaagcagttattttggtctcctggacatcaaggtcagccaagtgtggaatggatggtgtcactctggaatttcttgcgacattcatgtgaagatctttcaatttttgcaaaatggcctatattaccactggtagatggcaagcttatgcaacttggcaatgcttcaaatgtaataatagatgatgggtggagtgaaaatatgtactcgttgcttcagaaactgggatgtttctttctgagatctgatctgcagatagaacatccgcagctggcaaattttgttcaggaagccactgcagttggtgttttgaatgctgtgcagtctgttgcttctaattttcaggatatcaaggaattgttcatgggtatttcactggcagaaacacatgagctacgcagttttattttccagtcaaagtggttttcaggaaatcacatgaactcttcccatatgaatacaatcaggaatcttcctatatttgaatcctataaatctagagagcttgttagcctgacaagtcctagaaaatggcttaaacctgaaggtgttcatgaggatctgttgaatgaaagttttataagaacagaatcggcaaaggagaagtcaattttggtatcatactttgctattagggaacctcaaaaggctgaattttacaaggaccacgtgcttcctcgaatatccgagtttctatcacaaccagctgttgtttcagcaattctccgtgatgtgaaactattggcagaaaatgatacttctgtgagagctgcattacatgaaacccctttcgtcctggcagcgagtggtgcatgggtacatccctccagactttatgatcctcgtgtgcctgagttacataagttgctgcacaaagaaaccttctttccttcagagaagttcatgacgactgaagtaattgaactgcttgcaagctttggacttaaaagtaaattgggttttagtactttgcttgacattgcgaggtcagtttcactgcaacaagatgatgcgcttgagcatgggaaaaggctacttacctatctaaattttcttgaattcaaggcttcaaacatggaggataaaaaaaccttccatggggatgacaatcaggaagcttctaagactgatggaagttttgaagcagaaaacgatggggatgggtatgatccagaagaaactattttatctttgttctcaaacttcgatcatgatctaccagaagacgaattttggtcagagctgaaaaatatatcttggtgtccagtccatgttgcaccattgctaaaaggacttccatggttcatatctgaagatcatgtggctcctccaatcacaacaaggccaaaatcacaaatgtggcttgtttcatcaaaaatgcggattcttagtgctgattcttgctccatgtatctgcaaagaaaacttggttggttagacccaccaaatgcaaacattttatcttcccagttagttgagatctccaagtcttatgatgaactcaagatgttttctgaagacagtaccaatgatgctgttccgcaaaaggaaattcaactgatctactcaaaattgcaagatattattgacacagccgataccaacattctaaaacggaatctggatggacacccatgggtttatataggtgataggttcgtgccacctcaggcacttgcttttgattcacctgtaaaatatcacccttacctttatgcagttccatctgaactgtcggaatataagaggttactgtcggttttgggtgtgaagcagacatttgatgcagcagattatctgaatgtacttcagtgtttacaaagcgatgccaaaggagagccattgtctacagagcaactaagttttgttcatcgtgttttggaagcatttgttgattgttatcctgataaccaagcacctgatatgatggtgaattcattgttgattcccgattcatttggtgttttgacacctgccagaaatcttgtctacaatgatgcaccctggatgaatgctgatcctacttcaaagagctttgtgcatcttagtattggtaatgatctagctaataggcttggggttcgatctcttcgtggatcatcattactggataacgagctaatgacggatttgccttgcatggaatatgctaaaataagtgagttgctggctttatatggtgagagtgactttcttttgtttgaccttatagagctagctgatcattgcaatgcgaagaaagtgcaccttatctatgataaacgagatcatccaaagcagtccttgctgcagcagagtttaggtgacttccagggttcttcattgacagtcgtctttgaaggaacgataatgagcagagaagaagtttgcagcctccaacttcctcctccatggaaattgaagggaaacattcttaactatggacttggacttcttagcagttattttgtgtgcgataccttgagtattctttctggtggctatttctacatttttgatcccttgggcttgactggtggcacgacttccactgctacctcatccgctagattcttctcattgataggaaatgacctggtcgagaggtttcatgatcagttcacaccaatgcgtgttacacaggaggcttcactatcttcagcaaactccacagttattcgtatgcctttatcatcaaagtgcctgaaagaacttgaagctggttgcaatagagtaaagcatatttttgatcgatttacacaaaatccatccagcactctcctattcttgaggtcaatcattcaggtatctttatcaacatgggaaggtggagcttctcagccaactttgaactactctgtacttgttgacccatcagtagccactttaaggaatccattttcagaaaagaaatggagaaaatttcaactatccagaatatttgcaagtacaagtgctgctattaaaatgcaagctattgatgtgcatgtgattgacaatggctgcaattatattgacaaatggtttgttgccctttgccttggatcagggcaaacacgaaacatggctcttgacaggcggtatctcgcctataacttaacccctgttgctggagtagcggcacacatagctcgaaatggagtatcaaccaatatacatgcatccagttgcatattatctcccttaccactatctgggtctataagcatgccagtcacaactctaggccattttattgtgaggcataatggtgggcggtacatttttggcagctcacatgataaatctctgtcagaccttgaaatgcataaaaacaaattggttgaggcatggaataaggaacttatgctatgtgtgcgtgattcatatgttgagatggtcctggaatttcaaaagcttaggaaggatcctctgtcttctgctattgaatcaaggtctgcacactcggtgagtacaattttacaggcttatggtgatagggtgtactctttctggcccagatcgaagcagcatcctgcttcactcactgggtatggctctactgtaactaatgtgaattcaccaagagcatctaaagcagattggcaatccttggtagagcaagtgataagacctttctatgtacgcttggctgatcttcctgtttggcaactttatggtgggaatcttgttaaagtggatgagggtatgttcttatcccattcagggagtggagatgatgataatctgccatctgctagtgtctgtagtttcattaaagagcactaccctgtattttctgtaccctgggagctggttagggaaattcaagcagttggagttaatgtaagagagatcaggcccaagatggttagggatctactaaaagcttcttcatccattttactccgatctattgaaacatatatggatgttcttgaatattgcttctcagatatggacccataccgtttctcagatcttcatatacatgaggaatcacgagttagcaatcaacaatctgaaataatgaattcttcaatatcaaattctatgccatcttcaagcagctctgtgtcttaccatagaaatacacaaaggcagggtgcttctgggggtgacgcgcttgaaattgtgacatactttggaaaagctctctatgactttggtcggggggttgtcgaggatatcagcaagactggtggctcagcatcccataggacccaagctgctgaaaataatgtgctgtcatctatcatcacagagctcaaaggagtcccgtttccgacatcgacaaaatgtctaacaaggctgggatctaccgaactttggatagcaagtgaggagcagcagctattgatgcgcccattcttgcatcactttatccatcatcaatgtttacaaaagcccttcttggagctattgctcaccactcaagttattcatagacctctaaagctaagaagtttttctcctcacttgttgtcaggccatttgaagcacatatttgatgaacgttgggtgcaccttgcagtagagaagaagtctccatggattccttgggataataatgctaattcatcaactgctggaccaagtcctgaatggattaggctcttctggaaaatatttagttcaatgagtggtgacctttcacttttatctgactggcccttaattccagcatatctagacagacctgttctctgccgtgtgaaagaatgccatctaatatttgtaccaccagcagatgattcaaatcctgatagtggagatagtgcagctagagtagttgacacgtctgcccacccaggagatgagactggagaagctgaacagaacagcatacttgatactgcatttcagtcaatgaactcagcatttccatggttacctgctctgctttacaagttgaatataccagtttttgatttatcttttccagagtgtggtacaatatgcaatttgtttccttcacgtgaccggactcttggacaaattattgcttctaaactggttgcaataaaaaatggtggccatttacctttgccacttagtctatcaagtgaagactgtgataaactgtttgcattgtttgtctcagagttcagattgtccagtaaccacttatatcagagagaagaattggatgtcctgagagagcttccaatgtataaaacagttacaggaacatacactagtctgtcagggtccgatcattgcattctttctcccacagcattctttcaccctgctgattctcggtgcctttctagtacagctaatgcagatctatttcttcaggctttgggggttgaacaattgagtgaccaagaaatactagtaaggtttgctttgcctggctttggaaataaatcagctcaagagcaagaagacattctagcctacttgtattctaactggaaagatctgcagctgaactcttctgttgtaaacaccttgaaagagactaattttctgacaagtgcaaatgagttttgtacagagttgttcaaaccaagggaattacttgacccttcagatgctttgcttacttcagtattctctggggagagacacaagttcccagctgaaaggttcttgtcagatggttggcttgttatactcagaaaagcaggtcttcgaacatctacagaggctgatatgatagtacagtgtgcaacaaaaatagagtccatgggaaatgatattgtgtcatcttcagaagatcctagtgactttgaggcagacttttcaggcagcaaaaacgaaattccttttgagctttggtctttggcagaatctgttgttaatgtgattcttgctaattttgctactttgtatgacagttctttttgcgaaaagattggcaaaatcgcatttattcctgccgaaaaaggttttccaagtattggtgggaagagagggggtagaagggtacttgcctcatatagtgaatcaattttatcaaaagactggccattagcatggagttctgctcctattcttaccaatcaagcaattatccctcctgaatattcttggggagcatttcgactaaggagtcctcctgccttcactacagttctgaagcacttgcagagtgttgggagaggcaatggtgaggacacactggcacactggccaacttcatcaggaataatgacggtggaagatgcctttctacggatcttgcaatacttggataaaatatggggaacaatatcttcttcagagaaaaatgagttgcagaccctggcttttataccagttgcaaacgggactcgcttagtcacagtgaaatcactttttgctcgtctgacaatcaacatgtcgccttttgcttttgaacttccaagtctttatcttccatttgtcaccatcctcagagaaattgggatgcaggaaacccttacaaacacttatgcaagggaacttcttttggatatacaaaaagcatgtggttaccaacgcctgaatccaaatgaactccgcgctgtgatggaaattttagacttcatgtgttctggtgtcaaccaggccacagatggatcagaagacatatttgattcagtaataccggacgatggttgcaggctggtatcagctgtatcgtgtgtatatattgacccatatggttctcatttactgagtaacatagatacatccaggataagatttgctcacccagatcttccccagaatatttgcaacacgttgggcataaagaagctttctgatgtcattgtagaggaactggatggaaaagaagaactaaagatggtgaatagcatttgctctgttactctggacaaaataaaagagaagctgcttagtaaatcgttgcaagatgcgttaaggattgttatgattggtgtatccaatcattttccttcatttgaagcactcaatctggcgcagatagaaagtgtactaaaggatatatcacagaacctgcagtttgttcagcgtctccatactcgctttctattactccccatgctccaagacgttacaagaagcagccagcgtcctccatttcctgaatggtcaagcaatggaaagcacagaagtgtttgctttgtgaacaaatccacgggtcaaattctagttgcagagcccccaaactttttgacaatacacgatgctattgctattgttgttagttacagattaggggcacccgtgatcttgccgattgcttcagtatttgcatgcccagatggcacagagaaagaggtgcttaaaatactccgtctgggcactgacattggagtttcaaaacgtgaaggaaggtacaatggttccctgggagcagagttgttgtcccaagatgctcgccaggttcaattccttcctttaagaccattctatagtggagaaattgtggcatggaagacggggaaagagggtgaaaagctcagatatggcagggtccctgaagatgtaaggccatcagctggccaagctctttacaggtttccagtggagacttctgctggtgaaacttgcatgctactttccagtcaggtttactcatttaaaagcgtttcaatggctgatctctcttctgcaccattgcaactggatagtggtagagctgcaggtggacagcagggcttctcacccatcaacacaggaactgaagctgcagatgatgtggctactggccttgaatatgggaaggtatcttcaaccgagctggtacaggcagtccacgatatgctttcagctgcaggggtaaggatggatgctacaaaggaaacgcttctacagactactctttccttgcaagaccagcttaaagaatctcaagtggctctactcgtggagcaggagaaagcggaggcagcagttagagaagctgatgttgccaagtcagcatggtcatgtcgtgtctgcctgaatgcggaggtcaacatgactataataccatgcggtcatgttctttgtaatcgatgctcaagttcggtttcacgatgcccattttgtcggacgcaagtatctaggatgatgaaaatattcaggccttaa

SEQ ID NO: 13480 - DNA, 224 bp, Oryza sativa
  Clone ID: TFbOSC400770j.C1.o13.gp
atgacctgatatgctatttggtgccttttaagaacaagtgcagcttcttctctaggaagaagaatgatgagtaatgtgtgatatgtaaatcgacttataaaagccgacagaaattgataagattgccctgcagccactgttaccatgcggattgcataactcgctggcttaagatcaacaaggcatgcccagtctgcaatgaggaggtatttgggtgaatcaca

SEQ ID NO: 13481 - DNA, 1446 bp, Oryza sativa
  Clone ID: TFbOSC408415j.C1.o6.fg
atgccggcggtggaggggatgcgggacgtggtcgccaccgtgagcggctaccacggcgacgagcggcacaggctggtcaggctcatcgcggagaccggcgcgagctacgtcggcgccatgagcagatccatcacccacctggtgtgctggaggcttgaggggaagaagtatgacatcgcgaggaggcttcggacgcgcgtcgtcagccaccggtggttcgaggactgcctcaaggaggggaggcgcctccccgagaaaccctacatgctggaaagtggtgaagaagcagggccagtccctgagctgcccactttcccgcgttcacgatccaagagaaatgcaagcatggaggatagatgcttgaaagaattacctgatgatttctgcaatacttcatatgcgaccgatgtgcttgtggttgctgattcaggttctgattgcaatcatcagcgatggtctgattcctccctactgaaagaaaattttgttggtgatcgcgataattctaagattggtgcaacacacgtgaaggaaagaagaaaacgtttaaagcatgcacaaaattcaaccaatgaagatgcactagatgcagaagacaatatttctaggctcatggcaagacaagggcgttatgagtcaagttatacttcatctcggagcgcatcaaatcagaagggagatttgttaaagcttctgcataatgatgatgctagcatgatgagaaaaagaaatagtctcatgaaaaaggaaacaagaaccaagcttgcaggctatcttatagaaagctgtgaaaatggaagtttgacagacagcttcgatgaacctcaaatgtcggatactccgcccactgaagatcgaagaaaaataaggaagacaagactgcgacaaagtacgttggacagtatatatgattatggtgaagccagtgagcatgatcctgaaaaaagtgaggatcaagaaaattttgaattgggtgaaagttcaagaagctttcagtcaagtgattcatccagacaagaaccagctttctgtactgagaaaacaaatcaaggaagcattgacattgcagctgatgatgacaagggagatgatgagaaagccactttggaagaaccaaccagttgtcaagggcaagctgaactttcctgtgtcatttgctggactgatttttcatccacaaggggcatcttaccatgtggacaccgattttgttattcatgcattcaagaatgggcggattctctgtcttctaggggaaaagtttcgacatgtcctctgtgcaaaacaagttttgcctggatcagtaaaatagatgaggctggtacatctgatcaaaagatatactctcaaactataccttgctcaacttctaccgacactttcatatttgatgatagagtctacggcctcccagaatcaccggttgatgtgatgaaaaaggactga

SEQ ID NO: 13482 - DNA, 636 bp, Oryza sativa
  Clone ID: TFbOSC405088j.C1.o1.fg
atggattggttcgtgcggtgctacatgctggcgatcgccaacggcgtgtgcatcggcggcgcggcgatgatcgtctacgggatcgtgcaggtgtcgcggacgggcggcgacgcggggtccctcgtcgtgctctccctcttcctggcgctctgggtcgccgtcggctcctgcgtctacgcctccttctgcggcgcgttcttcccgtgggcgtcgctgcggcgcccgctggctcctgtccgggacgcgctctcccggtgcgcgcgcgcgctgctcccgcgccggaacggcggcggcggcgatggcctgccgagccacctgcgcgacggcgtgcagccacgggagacgccgaccgtgcgcggaggcggaggcgcgcgggtggcgacggcggacgacatccccgcgtacgagcagccgcctgcgggagagggcgagggcggcgcggcggcggcgccggagtgcgcggtgtgcctcggcgaggtggagaagggggagatggcgaagcggctgccggcgtgcctgcacgtgttccaccagcggtgcatcgacgcgtggctgcggggcaactccacctgcccggtctgccggcgcaacgccttcgccacggcggcgccgccattgccggctcaaatggtgtag

SEQ ID NO: 13483 - DNA, 388 bp, Oryza sativa
  Clone ID: TFbOSC900281j.C1.o9.gp
tgaaaaaaatattgagccatcatccaatataccagccataaatattcagttgaatgcagagcgacagattccagggattatttactgcaggagggggcagtttgcagggaccagttcttttaccttttttttaatcaaatttgtaggtcaatggcaaaaaaaatttctaatcaaaaaacggcacggtaatatgaatcactaaacgatcttgcgatcgaacaagcacgcagtgtttacagccctgtgctttttctaagacttcagagcagtatttttgcatatgggacaggtgttcttcacaaccagccattgcctgacgcatccaacatggaagtcatgtccacagtccagtgtcccgagatcatccccatcaacatactcttcctgg

SEQ ID NO: 13484 - DNA, 183 bp, Oryza sativa
  Clone ID: TFbOSC9137j.C1.o1.gm
gaagcgcaggtgagcgaggcgagggagagcgactgcgctgtgtgctttgagggcttcgaccaaggagagaagctgacgaggatgccctgctcgcattgcttccatgcgacctgcatcttggattggctctcgctcagccatctctgcccgctctgccgattcccgatgccaacggggcagtag

SEQ ID NO: 13485 - DNA, 579 bp, Oryza sativa
  Clone ID: TFbOSC423581j.C1.o10.fg
atgaccaagcctcagctagcttgcttacgtagaagtgcatacgtcacgtcacgtcaatcgattccgactccgaggagccaattaatgggcgccggcgccggcgactggcccgtcttcgtcgacggaggaggctcatcgtacaaaacaagctggtccggcgccgccgccgtcatcgtctgcctctgcgccgtcgccgccgtcttcctgatcatggccggcatcacgcagctctgcaaacgcgtcttccctgcggcgccgcccgcgccgccgcctcaacgccggcgcgacgacgacgacgacgatggcattgtggtcgccgtcggcatcgacgaggcgacgctgcaggcgctgccgctggtgctgtacggcgaggcgaggacggcgcagacgagctgcgccgtctgcctggagagctacggcggcggcgacgtgctccgggcgctgccggagtgcggccacctgttccaccgggactgcatcttcacgtggctccggcgccgcccgacgtgcccggtctgccgggcgccgccatcgccggcgccgcccgccgacgttcttggtctgcagctctctgtttaa

SEQ ID NO: 13486 - DNA, 633 bp, Oryza sativa
  Clone ID: TFbOSC900408j.C1.o20.fg
atgctggggtcggggctgaatctggtgaccacggtgatcggcttcgggatgagtgccaccttcatcgtcttcgtctgcgcgcgcctcatctgcggccgcgccgcgcgggccgacgccgaggccgacgccgccgagggcagggtcgcggccgcgcgggccatggcggctggccccgcgccgttcgacttcgacgtcgagttccgggccacggatctcgaccgcacgattgagcatacccgtagtggattggaaccttttgttgttgctgcaattcctacaatgaagtacagctacgaggccttccaatcaaaagatgatgcccagtgctccatatgtttaggtgaatacaatgagaaagagattctgcgcatcatgcccaaatgccgtcataattttcatctttcctgtatagatgtatggttacaaaagcaaactacttgtccgatatgccggatctcattgaaggacctacccagtggaaaacctgccgagtcccctgtccgtagtctccctcaactattcagccaccctgaaagctcaaaacgccgtgcgttcttccagcagcagggcagcacgtacacggctttggcacagaattgcaaggaatttgtttacgacaggactggattttag

SEQ ID NO: 13487 - DNA, 1236 bp, Oryza sativa
  Clone ID: TFbOSC400887j.C1.o6.fg
atggcgctctactccaccgacagcaagaaggttgggtttctttccttcctcaatttctttcacaactccactgcattttccaacctgatcgggtgctgccttttcattcttccctcctacctcgttggccactacattgagcatcaccatttggtctcaccattcatacctgaaaaccagtatatatgttgcatcagcagcatcatcaaacctggtctatctagctcagtagctcacctgcttgtgtgcttaagctcgtgtttgcagcaaaccatggatgcagacagggaccccatcttcccggtgcaacagatgccatcactgctgttcccgccaccgccgccacggccattggcactcgactccacttcttcagcatcttcttcttttgtgcctcaccatccatccatcacgagcttcccaatactggtgctcaccgtcctgggcatcctcaccacctccgtcctcctgctcacctactacatctttgtcatccgctgctgcctcaactggaacagcagcagctcctccgacacgcggacggctggcctcatctcccgccgtcgacgcggtgccgcctccagcagcctcccggcagtggccgagccgcgtgggctggaggaggcggccatccaatcattgccggcgttcaggtacaggaaggccatcaaggacactactgctgattccagcgagtgtgcagtgtgtatcagtgagttccaagaagaggagagggtcaggctcctgcccagctgcctccatgtcttccatgttgactgcatcgacacttggctccagggcaacgccaactgtccactctgcagggcagccatagccaccaacgacagccagcttccattggatcagttcgtgagacctgaggtggtagtcattcaggtgatcactggcgcggaagaagaaggtgcacaagcaccacagcaggaggccaatacggcagcttctgatcctgcagtagatgctactagtacaaatcaacaggtcagtagtaagaagacgaagaaccagaatgcatggcatgtcagcatcagtaagggagatgagtgcattgcagtgaggagggacagaaatgttcttccattgaggaggtccttctccatggactcactgggtggtgctggagaggtgcatttgcagattcagaatattctgcagaggagcacccacttccacagggatatcagtgacagcagcagcagcagcactggaacattgtag

SEQ ID NO: 13488 - DNA, 1161 bp, Oryza sativa
  Clone ID: TFbOSC415629j.C1.o5.fg
atggcttcttcctccccttcctcctcctcctcccccccttccgccgccggtgcctcctcctactggtgctacagctgcgaccgcttcgtgcgcgcccccgccccccacgacgactccgccgtcgcctgcccggactgcggcggcggcttcctcgaggagatgagcgcgcccccgccgcgcgccgcctacctccgccgcccgcgcgcgcaccacgccaacgacctgcgcctgcgccgcacgcgccgcgccgcggcggcggcggcggccggcgaccgctcgccgttcaaccccgtcatcgtgcttcgccgctcccccgccgccgccggcgacgacgactccctcgccgccgccaccagcttcgagctcttctacgacgacggcgcgggctccggcctccgcccgctcccggagaccatgtcggacttcctcatgggctccggcttcgagcgcctcctcgaccagctcacccagatcgaggccggcggcctcgcccgcgccagggagaacccaccggcctccaaggcctccgtcgagtccatgcccaccgtcaccatcgccgcctcccacgtcggcgcagactcccactgcgccgtctgcaaggagcccttcgagctcggcgacgaggccagggagatgccctgcagccacatctaccaccaggactgcatcctcccatggctcgcgctccgcaactcctgcccggtctgccgccacgagatgcccaccgacgccgcccgcccgcggcccagcaatgccggcacagaggaggagacggtcggcctcaccatctggaggctgcccggaggcggcttcgccgtcggtaggttcgccggagggaggaggcccgaggagagggagcttccagttgtgtacaccgagatggatggagggttcaacaacggcggcgcgccgaggaggatctcctggggttcgaggcagagccgatcgacggagaggagtgccattaggcgcatcttccgcaatgtgttctcgtgctttggtcgcagccattcatcgaattctcaggcctcgtcttcgcattcgaggccggagttgaacgatgcgtctgaccggagcgccgtgttcagccatggctcaagaagccggagcacgagctggaggctcgaagatggccatgccgacgccatggtgcaaagatag

SEQ ID NO: 13489 - DNA, 648 bp, Oryza sativa
  Clone ID: TFbOSC24360j.C1.o1.fg
atgactgtttacttctttgcaaaagaagagctcaactgcaatctaacggcggtgaaagaagacctgattaagcctgttactgtaagcttcaaagagggtcttggtcagaagttcagacagccttctggcactggaatcaacttctccgtgtttgaggattccgagttattgaagcagggggacatggatgtatatccacttgcagttaaagctgaaacaaccatgcctgttgatcaaaagttggaaggagaagatcaaaagatgaaaactccaaactcacagatcacacaggctctgtttgaaaagaaagaaagcggtgattatcaagttcgagttgctagccagatcctttgggtcaatggaactaggtatgagttgcaggaaatatatggaataggaaactcggtggaaggcgatgctgatgccaatgatcctgggaaagaatgtgttatttgcctctcggagccaagggatactaccgttctcccatgtaggcatatgtgtatgtgcagcgagtgtgccaaggtcctgaggtaccagacgacccggtgcccgatctgccgacagcccgttgagcggctacttgagatcaaagtcaacaacaaagctgaagagcagcagcagccgtcacccgattcaccgatcaaa

SEQ ID NO: 13490 - DNA, 723 bp, Oryza sativa
  Clone ID: TFbOSC900028j.C1.o10.fg
atgactgtttacttctttgcaaaagaagagctcaactgcaatctaacggcggtgaaagaagacctgattaagcctgttactgtaagcttcaaagagggtcttggtcagaagttcagacagccttctggcactggaatcaacttctccgtgtttgaggattccgagttattgaagcagggggacatggatgtatatccacttgcagttaaagctgaaacaaccatgcctgttgatcaaaagttggaaggagaagatcaaaagatgaaaactccaaactcacagatcacacaggctctgtttgaaaagaaagaaagcggtgattatcaagttcgagttgctagccagatcctttgggtcaatggaactaggtatgagttgcaggaaatatatggaataggaaactcggtggaaggcgatgctgatgccaatgatcctgggaaagaatgtgttatttgcctctcggagccaagggatactaccgttctcccatgtaggcatatgtgtatgtgcagcgagtgtgccaaggtcctgaggtaccagacgacccggtgcccgatctgccgacagcccgttgagcggctacttgagatcaaagtcaacaacaaagctgaagagcagcagcagccgtcacccgattcaccgatcaaagtcaacagcaaagccgaagagcatcagcagcagccatcccaatcgctgccaatcccacacagggaagaggtgtag

SEQ ID NO: 13491 - DNA, 921 bp, Oryza sativa
  Clone ID: TFbOSC422248j.C1.o9.fg
atgggcaggtcgttcagggactcgctgaaggtgctcgaggccgacatccagcacgccaactcgcttgacacctgtcaccagatatactgcttaagtggccaaagctatctcctttggccttgcagtgctgctgaatttagaagggaatatgatggcgcctgtcttcagatgagaatgtcatactgtccagctgcacacttcttcctttttcttgtgcagtggacagattgcaaccttgctggtgcacttgggctgttgaggattctcatttataaggtttatgctgatgggactaccaccatgtctgctcatgaaaggaaagcaagcattagggaattctatgctgtcatatttccttctttgatgcaactacatgaagggatcaatgaagtggaagacaagaaacaaaaggcaatctgtatagaaagatatagaagacgagatgaagatcagaaaatggtgatttcagagattgatgataacatcgaggaggaatgtggcatatgtatggagataaatggcaaagtagttcttccaacttgtagccatgctatgtgcattaaatgctaccgtgactggagatcaagatcccagtcttgtccattctgccgcgatagtctcaagagagtgaactcggccgacctatggatatatacagataacagggacatagtggacatagcgacggtccgaaaggaaaatcttaggcggctcttcatgtacatagacaagttgcccacggtcatccctgaaactgtttttgacgtttacgattcccactgctgtagaaattgtggagcccttggtgttcatgctgccccgcttgtagaagcttgggttactgggctcagcttcagaacacttcagagggctcccggaatggtccagcttcagagtgaaaacgcctgtcggagcgcgtga

SEQ ID NO: 13492 - DNA, 873 bp, Oryza sativa
  Clone ID: TFbOSC400555j.C1.o39.fg
atggcgtcgcccccgccgtacgacaacccgacggctgggttccccatcgcgatcgtgatcgccatcgggttcatggtcacctcgctcatcctcgccagctactacttcctcgtcgtccgctgctggctccgtggcacgggcggcggaggcgccgccggggccgggctgctgcaccgctcgcgccgcgagagcgcggcggagcgcgtcgccgcggtgttcttcaccgactacgaggccgaggttggaggcgggctcgacccggacgtcgtggcggcgctccccgtcgtcaagtaccgccgcgccgcctccgggaagtcggcgtcgccgcaggagtgcgccgtgtgcctgtcggagttcgtccgggacgagcggctcaagctgctgccgagctgctcccacgcgttccacatcgactgcatcgacacgtggctccaccacaacgtcagctgcccgctctgccgcacggtggtcaccggcggcgcgatcggcctcctcgtccgcgacgaccagtatgacgcgtccagccgggaactggccgccggcgagaggcgcatcgacgccgccgcgaggatgggccacgggatcagctcgtgcaggttccccaagaccggggccgagcaggagccgatccggcgatccttctccatggattgcttcctaggcgatctcggccggaagccaccgccgccgccgccgaaggatcccgcaggctcggaggccgggccgagccaccccgacgcggccggtagcagcagtatcgtcggcaccgccggcgccggcgagaccagcggccggtttcggcggttgctgtcgtcgttcgggctcggccggagctcgcggagcacggtgttgcccatccacctcgacccatga

SEQ ID NO: 13493 - DNA, 1569 bp, Oryza sativa
  Clone ID: TFbOSC413563j.C1.o5.fg
atggtgtggacacatcaagttgccagtcctgaaaaccaagttcaacctgaaagtttctatcatggaggtgctgggagcaacttatctaacctgagtgtgcaagttgctgttggagttccaggaaatactgatttccggagtcactatgagagcattaatcttcagcaccagcatgttcagaatccatacccacatgtgggtgttgcttcaagttctgtgttcccatctactatgtacaacccctgcatatcaacaacagcagtggacagatatgttcctcctattcaaagttttggattgggcaatccactactactgcctttatatcatcaacttgctcaaggatccatggatgagaacggcagcagtggcaatttttgtgacagcgtcagggaatttatcaagaggaaaaatgcattacttgtgggtggccatcattttgttaatagttttgcaagctcaagctcatctgcttatgtgcctccaaatcctttacataggtcatggaacgcttcatttgaagcaaatatcctacccagcactggagtttccaatccaccagagtactcttctgcagattcactgaacaattccaattcgatggcttcacatccagaattggtgcatcatggcaattatgtatttccagctggtcacatgagccaatacaatgcatggattgcacaggcaagcagaactggtggagtaccacagtgggaacatggcaatgcagcggctaatcctccaggtggatttgttcattctggaaccatagacatgccaaatggaggtcttcagggataccaagctggcccttttgccaattattatgggcctctgccccatttccaccaaaatcctctgaatagcatgcagcatcctgctctatttaatcatatccaaatgcaagtacctcatcaacattgcctcagtaacaatttattgcatcacccttctggcaatggcctccccttggatccaagaattctggcaatttcatccaattctgggcatacctttgggcctacagctcagccatctttagcaaaccaagttaatgctgggagttcgagaattcagccatatgagttcctgtttttcaaactggacaatactaaatttaaaggatatcagaatttagttgaaaaatatcacctgatattgttcctgaatgctccgttcgtggatctttcgagattgtatgaagcaggagttattgatgaacatagagatatgcggcttgatgtagacagcatgacttatgaggagcttgtagcgttggaggagcggattggaaatgttaatagtggttttacagaaagctacattgaggaaaatttgaagtcaagttcttatgtcccggacgctgattgcatgcctgatcagtcttctgtggagaaggatgcttgcataatctgccaggaggaatatgaggctaaagaactcgttggaacccttggttgtggtcacaagtaccatgcgatgtgcataaaagggtggctgatggtgaagaacctgtgccccatctgcaaaacaacagctttgccagctgatagaagaaacggatga

SEQ ID NO: 13494 - DNA, 558 bp, Oryza sativa
  Clone ID: TFbOSC401369j.C1.o3.fg
atgaacacgcccaactcgtggctgttcgcagacaactccaagtacagcacgcgggcgcggctgctgttcatggggctctccttctccatcggcatcctctccttcctcgtctacctcgccatctggtacacctgcacccgccgccgccggagccgtcagctccgcggcggcggctcggcgtccgcggatcaggaggcgcccgaggcgaacagccacggcatgagcgccgccgcgatcgccgcgctcccgacgttcgggtacgaggcctcggcggcggcggcggcggcgctggattgcgccgtgtgcctcgggcaggtggacgccggcgagaaggtgcggcagctgcccaagtgcgggcacctgttccacgccgagtgcgtcgacgcctggctgcgcgcgcactccacgtgccccatgtgccgcgccgccgtcgaaggccccgccacggccgccatcgccaagaaggccagctccggcggcggcgccaccgacacgccccccgtcgtggcaccagccccaccggcggcggcagaggcactgccactgccacctgtctag

SEQ ID NO: 13495 - DNA, 2862 bp, Oryza sativa
  Clone ID: TFbOSC401238j.C1.o36.gm
atgcgggtcgaattggaaatggactgtgcaatggtagcaacaaggctgactagcaaagtacaagacagatcgcaatggtcctttcagatcagagaagcttcggcgagcaatggcaactcttcagatgagtggctggcgccgtcattcaacaggacggcgccagcctctttggcgccgtccccctgccgacgtggcggggcgatgctgagggaccgcgcgttcgacgccgggtacaaggacgacgtcttcgtctgctcgtcgctgctccacctctacgcgagatggggcgccatgggcgacgcggtcaaggtgttcgtccgaatgccgaggagggaccgcgtcacctggagcaccatggttgctggtttcgtgagtgctggacagccactggatgcgattcagatgtacaggaggatgagggaggatggtgtgaagggagatgaggtggtcatgattggggttatacaagcgtgcacagcagccagaaatgtccgaatgggagcttcagttcatgggcatctcttacggcatggaatgaggatggatgttgttactgcaacaagcctcgtggatatgtatgcaaagaatggactacttgatgtggcgtgccgagtttttggtctgatggtgcaccggaatgatgtctcatggagcgcgatgatctcaggttttgcacagaatgggcaatcggatgaggcacttcggttgttcagaaatatgcaggcttctggtattcagcctgactcaggagcacttgttagtgctctgctagcttgctcaaatattggattcttgaagctagggaggtcagtacatggtttcatcgtgaggaggtttgattttaattgtatcctcggtacagcagccattgatatgtactcaaaatgcggctccctagcaagtgcacagatgcttttcaacatgatcagtgatagagacttgatcttgtggaatgccatgattgcgtgttgtggtgctcatggacgaggccaggatgcgctcactttgttccaagaaatgaacgaaactggaatgagaccagatcatgccacatttgcttctcttttgtctgctctaagccattctggtcttgtggaggaagggaaactatggtttggtcgcatggttaatcacttcaagatcacacctgctgagaaacactatgtctgtctagttgatcttttagcacgttccggtcttgtggaagaagccagtgacctgctcacatcaatgaaagctgagccaaccgttgccatttgggttgctctactttcaggctgtctgaataacaagaagctggagcttggagaaagtatagcagacaatatccttgaattgcaacctgacgatgttggcgttcttgcgttggtctcaaatctctatgctgctacaaagaaatgggacaaagtcagacaagttagaaagctaatgaaagattctggaagcaagaagatgcctggctgtagctcaatagagatacgcggaacacgccacgtgttcgtgatggaagaccagagccatcctcagcgtgaagagatcgtaagtaaggtggcaaagcttgatttagagatgaggaagatgggctacattccgagaacagagtttgtgtaccacgatctggaggaggaagtgaaggaacagcagctcagctaccacagcgagaggctggccatcgccttcggtttgctgaacacaggcccaggaacaaggcttgtgatcataaagaacctcagggtctgtggtgattgccatgatgccatcaagtacatctcgaagatcgcggaccgggagatcgtagtgcgagacgccaaacgcttccaccatttcaaagacggagtctgctcctgcagagattactggctaccgagaaccagcatggcaagaggatgcgtgttgctgtatgtatacccaactgatccccctaggcggggaccatcagaagaagttcagccacgcaaggcggccacgtccgtccgtccgtcacgggggacccggcggcgtggtagtggtgcggtgcccgtcgccttcgccattcccggccgcgggcgtcatctgtcgcggcgaaaacgacccgggaggtggcggcaaaggcttttgcttcctacccgctggggcgcgcgcgtcgccgatgatcacccaagaccgctgcactgcacctgccccatgtgggagcagcatccagcatggccagttcgcaacgctacaccgctccgatgtcgtcgtcatcctcgccgcctcctctgcgccctcatctgcgtcgtcggcctcgccgccgtcgcccgctgcgcccgtaaccgccgcaacagcggcggagccggcgccggcgccggctccgcctccccgtcgcacagcccggcccacgcggggcacttcggcggaggagggagcggaggtggcggcgtaacgacgacgacggcggcgacgaccgccgccaaggggctgaagaagaaggcgctgaaggcgctgccgaagctggcgtacgcggacgcggtggcggcggcggcggcggcgaggggcacggtggtgggggaggaggaggaggggaaggtggaggtgctcgccgagtgcgccatctgcctttccgagttcggcgagcgggaggaggtccgcgtgatgccgcagtgcggccatggcttccacgtcgcctgcgtcgacacctggctccgatccaactcctcctgcccctcctgccgccgccccatcgtcctcgacgacccctcgccgcccaagcgctgccgcaagtgcgaggccatagtcctcgaggccgtcgtcgccgcctcctcctcctcctcctcctccgccgccaccgccaccggcagcggcggaggcggcggcggtggcggtggccgattcttgccgtag

SEQ ID NO: 13496 - DNA, 642 bp, Oryza sativa
  Clone ID: TFbOSC405088j.C1.o2.fg
atggagtgctgcttccgcgtgtacggtctggccatcgccaacgcggtgtccatcggcggcacgagcctgctcgtctaccagctcgtcaggctggcgcggacgccggggagcaagggcggcgtcgtggcgctcgccatcttcctcgtgttctgggtcagcatcaacgccgtcgcctactcggtcttctgcggcatgctcttcccgtggtccgcgctgaggcggtgcctcgcgccgctcccgagcgccgcccggtggctgctctgcctgccgtgccggtgcgcgcggcggcggcggcggcgtccggcgacgagcacctcctcgtccgcttctgctctgccaccgcacatgtacgtgctggaacgcgagccgccggtgaggtggggggcgcgggttgcgacggcggacgacatccccgcgtacgagcagccggcggcgagcgagggcggcgcggcggcggcggcggcggagtgcgcggtgtgcctgggcgaggtggagaagggggagatggtgaagcggctgccggtgtgcctgcacatgttccaccggcggtgcatcgatccgtggctgcgcgaccactccacctgcccagtctgccggtgcgacgccttcgccgcgccgccattgccggcccaaatggtgtga

SEQ ID NO: 13497 - DNA, 721 bp, Oryza sativa
  Clone ID: TFbOSC400261j.C1.o18.np
cctagggtttcttcaccgccggcgagtgctccagctcccagccctgcgcgtcctcctcgccggacgctgccggtgacgtctgggccaagctagtgccctccgattccgtgttcccggaggtggagctggccgaggacgacgccgtggtgtgctcccgggtcaccccggatggcggcggggaggtggtcgcgtggtgcaagattaggcgcggcggcgacgtgtcggcggcgacgatttggaatctgagcttggatgcaattattgtcgatggaagagttatccagcaagaagcagttgacatcaaaccggggagtgaaattgttccagggccccagaaagatgggtatctgttgtacacctttgatataactggcctgaatgactaggacaaaaataatatcaattgtgctaggtattgagaatgcaaagtgcagcatatgcttaaatttgtgggatgatgttgttactgttgcttcatgcctccacaacttctgcaatggctgcttctttgagtggttaagaaggtcttcagctaattcgcgtgataaaagttagagtgctgcctgtccacaatgtaggacgacagtgcaattagttggtgggaatcacttcctacataatattgaagaggctatactgtaagttttttcatcgctacagcggtctgatgaggagattgcattgttggagtcatatgccccggtcaagacaaatattgtga

SEQ ID NO: 13498 - DNA, 642 bp, Oryza sativa
  Clone ID: TFbOSC900165j.C1.o12.fg
atgtcgctcaccaatgctccctcgtcgatggtgtcgatcgtgacgccggtgacggacagggacagcgggcgacgggtggcgggcgtgccgccggtgctcgtcggggcgtccgtctcgtcggcgccggagctgcgggggcgggcgtacctggtgcaccacgtcttctacgaggacggcagcgccagcgccgacggtggcggcggcgtggccccggcgtccagggcatcgatcgcggcgctgagggaggtcgaggaggaggatgacgacggcgaggaggcgtccgactgcgcgatctgcctcgacgacggggaggagtccagggagacgtgcgggagcgggaggaggaaggagatsccgtgcgggcaccggttccacggcgagtgcgtggagcggtggctggggatccacggcagctgcccgctgtgccggcacgagatgccgccggcgacggcggcggaggcggaggaggaggaggtggtggtggcgatggtgcatggggagagggtggtgatgagggggaggcgcgtggtgctgagcgtgctggtcatgggccgggcccacgatgacggcgagggcccggagcaacgcggcacggatccgattcctcctcttccgcgtgtgctcatagatgatgtggattaa

SEQ ID NO: 13499 - DNA, 663 bp, Oryza sativa
  Clone ID: TFbOSC14849j.C1.o7.fg
atggacgacgacggcggcgcgggccgcgacggcatcctagcgttcgcgcaccagctggccaggcaagccgcgttcctacttcaagcctccaacgacctactcgcatcgcttcttcagtccacctcgcgcggcggcggcggcgccgacatcctatcgttcgcgaatcagctggccaggcaagccggcgcgttcctccaagactccaacgacatactggcatcgcttctgcagtccacctcgcgcggcgcttccgctggcgccgccgccgcctcggacgaggcgatccaggcgctcaaggacgtgggcggcggcgacgtcgacggcggcgggcagaagctggactgcgcgatctgcctcaaccacgacgatccgtcagcgtcggcggcggcggggtggaaggagatgccgtgcgggcaccggttccacggcgggtgcctggagaagtggctgcgcatgcacggcacgtgccccatgtgccgccaccagatgccggcggcggaggtggtggagggggcggcttcggaggtgaccacgtcggagccgctcctgctgatagcgcgcgtacgccgctccggcgacggcggcaatgaagaggagcattaccattactatctttacgaaatacgagtacagtactccaccaatgtcgaaattaacccttaa

SEQ ID NO: 13500 - DNA, 546 bp, Oryza sativa
  Clone ID: TFbOSC400505j.C1.o10.fg
atggagatcttggtgagtgcactgctcctgctcctcgtgccacccttgtccgccctcctcgccgtcgccgcgccgagcctcgcgtggccgtcggggtcgtcgtcggtgaggaagctgatcgccaagaaggtggcgccggagcaggcggcgcgcgacgagctgctgcgcgtggcgcggtacagtagcgctagcgccgccgctgccgctagtgctgtccaacaaccaggcggcagcgagagtagtcgtccggcggcggcggcggcggatgatggtgggcggccggatcagtgcgcggtgtgcctgagcggcatcgaggagggcgacgaggtgagggagctccggtgccggcacctgttccaccgtggctgcctcgaccggtggtggttgtcggcgcggccgcccgccacgtgcccgctctgccgctgccggctcctgcagagcccgtcggcggcggcggacgacggcgacggcgacggcgaggaggattcggactcggacatggtgatgttcatggcgtacctgcgaagcagtagcacctggctctag

SEQ ID NO: 13501 - DNA, 1050 bp, Oryza sativa
  Clone ID: TFbOSC2013j.C1.o1.fg
atggggcggcgcgcgcgctgcctctgcctcctcctcctcctcctcctcgtcgtaggtggcggtttccacgtggccaacgcgcaggcgtcgccggcgccgccacagacgggcacgagggcggtcaaccgcgccgtgtccaccgtcatcaccgtcgtcatcggcgtcttcttcgtcctcgtcttcgtatgcgtcatcgtcaaccagtgctgcgactgcgactcctccgctggcgctggggctgggcaagggcagtcgtcggctgctcggcgccgccgcgggctcgacccggcggcggtggcggcgatcccggtcgtgccgtacgcggaggtcaggaagcacaggagcggcggcggcggcgcgctggagtgcgccgtgtgcctcaccgtgttcgacgacggggacgacctccgcctcctcccgcagtgctcccacgcgttccaccccgactgcatcgacccctggctcgagggccacgtcacctgcccgctgtgccgcgccaacctcgagaagcagccagcgccgtcgccgcctgccgtggagttctcctcctcgcctgctgcggccgcggcggcggcggaggagtcgcgtacgcccgaggccgcggcggtgcgggttgaggaggtggcggaggcgagcgacgaagaggagacgaggaggagggaggaggaggccgtggagctggagagtctgcgcgccgtgcggcgggcggcgaggatgccgaggtcgaactcgacggggcactcgctgtgcgcgctgccggcgccgcgcgcgccggggccgggcgacggcggtgaccacgagaggttcacggtgcggctgccgccgcacgtccgggaggaggtgctcaagtcgaggcgcctccggcacgccacgagcctcgtcctcggcatcaggggatcgagccgcgagggcagctcgaggggcggcggcgggagctggcacggcgcgcggcggtggccgtccttcctggcaaggacggtgtcgtgggcgcgcggcggcgtgggagcggacaccagcgcgaaggagacgccatgccgtgatgcggtctga

SEQ ID NO: 13502 - DNA, 807 bp, Oryza sativa
  Clone ID: TFbOSC416014j.C1.o1.fg
atggggcggcgcgcgcgctgcctctgcctcctcctcctcctcctcctcgtcgtaggtggcggtttccacgtggccaacgcgcaggcgtcgccggcgccgccacagacgggcacgagggcggtcaaccgcgccgtgtccaccgtcatcaccgtcgtcatcggcgtcttcttcgtcctcgtcttcgtatgcgtcatcgtcaaccagtgctgcgactgcgactcctccgctggcgctggggctgggcaagggcagtcgtcggctgctcggcgccgccgcgggctcgacccggcggcggtggcggcgatcccggtcgtgccgtacgcggaggtcaggaagcacaggagcggcggcggcggcgcgctggagtgcgccgtgtgcctcaccgtgttcgacgacggggacgacctccgcctcctcccgcagtgctcccacgcgttccaccccgactgcatcgacccctggctcgagggccacgtcacctgcccgctgtgccgcgccaacctcgagaagcagccagcgccgtcgccgcctgccgtggagttctcctcctcgcctgctgcggccgcggcggcggcggaggagtcgcgtacgcccgaggccgcggcggtgcgggttgaggaggtggcggaggcgagcgacgaagaggagacgaggaggagggaggaggaggccgtggagctggagatctgcgcgccgaattcaggatttggtacttttaatgggattgcagagaagggagaattgatgaacgacttcactaatattgccttttctctagaattgttcgcacttgaaagatgcttttaa

SEQ ID NO: 13503 - DNA, 425 bp, Oryza sativa
  Clone ID: TFbOSC32353j.C1.o1.np
ccccccgcccttgccgacgccggccaatggagttgccccgactgctccggggactccacagacgccccgcccccggccccggcaccgctggcccctgggagtgccggccaactcgtcgccgacatccgcgccatcgagtgcgacgccaccctctccgaccaggaaaaggcacgccgccgccaggagcttctcggcggcgccgcgcccgccggtgccgacgccaatgatgacgagggggacgacgtcctccaggtcatcggcaagaacttcagctgcgccttctgcatgaagctgcccgaacgccccgtcaccacaccatgtggccataacttttgcttgaagtgcttccagaaatggatccacagcggaaaaaggacatgtggtaaatgccgggcacaaataccagcaaaaatggcagagcagcc

SEQ ID NO: 13504 - DNA, 630 bp, Oryza sativa
  Clone ID: TFbOSC33081j.C1.o8.fg
atgccgccgccgacgcggacgcggcgaggcgtcacgctcgccgagcagatggccgcgtcgtccaacctccgcgacctcctcaagctccgcgacaacgacgacgacgacgacgacggcggcgggcaaggtggtcgccgccagccgcggccgctgcccgacgcggtggtggtggcggcggggcggcgacgcacgctgctcgacgtcatccgcggcgtcgacgacgacgatggccacgaccacccgcccaccggcgtccttgagggacaccgccccgcgacgtcgacgaggacggcggcggcggggggagcgcggggcgggagggtgtcgctgatggcgctgctggagcaggcggagcggcagtggacgacggccgccgccggggacgccagccggaggcgcgtagcggacgaccacgcggcggcggcggaggcgggcacgaacaagggcttcgccggcgccgccgccggcgtgggagggcggtgctgcgtgtgcatggcgcgcggcaaggccgcggcgttcatcccctgcggccacaccttctgccgcgcctgcgcccgcgagctccgagtcggccgcggccgctgcccgctctgcaacgccgccatccacgacgtcctcaacctcttctga

SEQ ID NO: 13505 - DNA, 300 bp, Oryza sativa
  Clone ID: TFbOSC33082j.C1.o1.fg
atggcgctgctggagcaggcggagcggcagtggacgacggccgccgccggggacgccagccggaggcgcgtcgcggacgaccacgcggcggcggcggaggcgggcacgaacaagggcttcgccggcgccgccgccggcgtgggagggcggtgctgcgtgtgcatggcgcgcggcaaggccgcggcgttcatcccctgcggccacaccttctgccgcgcctgcgcccgcgagctccgagtcggccgcggccgctgcccgctctgcaacgccgccatccacgacgtcctcaacctcttctga

SEQ ID NO: 13506 - DNA, 681 bp, Oryza sativa
  Clone ID: TFbOSC33082j.C1.o1.np
gtggtggtggtggaggaggaggaggaggagcggcggctgcggggggcgctgcggagcctgcagcaggaggccggggtgctggagcggctggtgtacaagcaccggaaccagcaccgcggcgccgcctacttccagtacctcctcaaggtgaggcgcgacgtgaggctgctcctcgccgccggcctcggggacgtcctcaccgccgtcttccccgtcctcgcctcccgcaagccggccaacaccatcctcgccgtcaacagtaggcagagtaagaagaagcctggtgcaaaccattgtcaccatgagaggcttttgggtgtcgcacgcttgttatcagagatggctgaacctgttatgatgggagcaagtcagatctcgtttttacttgcaagatcattttttgttgatctttgcacagcgattcttgctttgctagcaagagtgagggctctggttcaacagatgctacttgatgttgtctcagtttacaacaaggcttctgatcttattgataggaagcaatctgttaagattagtattggtggagcgcaggctttcagagagtactatccctcaagcaatgatgcccgtacttttctggaatgtgtttgggtgaaagataaatttgttttgcatgaaaatacaaaaggtagcaagaggtcgaagcccactccgcctcgt

SEQ ID NO: 13507 - DNA, 471 bp, Oryza sativa
  Clone ID: TFbOSC406125j.C1.o4.fg
atgtgcgccctgtgccagggccaccgcaacagcagccgcgcatcagccgcagccgccgccgccgccgccgcggctcaatcgcgaccgccaccgcagatgcgcagtggtggagatggtggcgacgacggcggcggcggcgagcggcagctcggcaggtcgagcgctagccccagcgcgccgccgtggcccaccgccctcgtcccggcgttcacgtacagccggtcggtgaggcgcaacgtgggcggcgacgacggcgaggaggaggagacggcggcggcggcggcggcgtgctcggtgtgcctgggcgcgttccagctcggggagacggtgcggctgctgccggcgtgcctccacctgtaccacgccgagtgcatcgacccgtggctggacgcgcacaccacgtgcccgctctgccgctccgacaccggcgacccatcgccggtggacgccggccggataccgccggtgtag

SEQ ID NO: 13508 - DNA, 447 bp, Oryza sativa
  Clone ID: TFbOSC932j.C1.o3.fg
atgctgttcttgaaagagctgcccatctggcaagcgttcgggttttccttattcacaggggccctcgccggcagcatcctgtacgccgtgtgcgtgctcctcctctgctgcgtcgatcgccgacgtcgacatgccggtgcgccgccgcctgatccgaagatctggctgccggaccacgcgcaccatcgccggcggcgggatgagtcgtcggagatggagtgcagcatatgcctgggggaactggaggagggggagaggtgctgcacgctggcggcgtgcaggcacgagttccacaaggaatgcatctaccgctggctcgccaaccgcaacacctgccctctctgccgccacatctccctcccccctgcttcatcaccaccacctgcgccgccgcctcaccatgcttctcctcctccttccaatgtactggctgctgctcatgtttag

SEQ ID NO: 13509 - DNA, 783 bp, Oryza sativa
  Clone ID: TFbOSC12971j.C1.o1.fg
atgccatcgtcatcgtcatcctcggtcgccgctgccccttctggcagcaatggcacccgccgcgacggtgggagcgggagcgtcacgggctgcctcccggctgaccaggcatgcttcgcgctttcgtcgtcggccagctcgccaggctacctgcacgcctcggccacaacgacgcgtcgcgatgcttctgccaccgtggcgcgcgcgtgctgcaccaccgcgtcgtacgtcgtcgtcctcgggatcagcttcggctccctcctcgccatcctgctcatcctctgcatcatccggtggtacctcgtgtggaggtcggcgcgaccacggcgggacgacggcgccgcggatgaggcggttgggtcagccaagaagcggtcggctgggctggatgacgacgccatcgcggcgctgccggtgttcgcgtacaagcaaagggaggagggcggcggcggcgcggtgggggcagcagaggaggagaaagaggaacgggagtgcgcggtgtgcctccccgtgatggccgacgggaaggcggcgcggcggctgcccagatgcatgcatgtcttccaccggggctgcgtcgatgtgtggctcagggagcactcgacgtgccccgtctgccgcgccaaggtggttgttaggccggccggtgcggcgcgcgttgagaagttgccgaagagcagcgcgtcgcgggcattgacatcgccggtgccggcaccggcgccgaggccgacggggacagtggtggacgacggcagggagagggacctcgaggcgcagcagtag

SEQ ID NO: 13510 - DNA, 516 bp, Oryza sativa
  Clone ID: TFbOSC900034j.C1.o1.fg
atgaaccctgcaagccgaagacattatgattctctcgtcgcgcgatatggtgaccaagatgcactcgccgaccgtttcggcggccaaaacgacggccctgacgcctggtggtccaacctgcgtgtgcggatgtctcaggatcatctactgaggcacgaggcgcggaggcgagccgccaccttggaggttttcgaggatagagaaaactcgcatgatggtgcctttggttgcggtgaccgggcctctgctaaggccatggtaactctgcatcagcccaatttgggcgagaccagggagcaggattgcgccgtgtgccttgagcctttcgaggaaggcaacacgcttagaatgatgccatgtttccattccttccatcagcgctgcatcttcagttggctccgcattagccgcatctgcccggtgtgccgtttcacgctgccctcccaggctgattttgagtcggagaaggctgagaaagaacgagttagtgcttcacctgaagatggcaataactga

SEQ ID NO: 13511 - DNA, 572 bp, Oryza sativa
  Clone ID: TFbOSC900034j.C1.o1.gp
atatcaaccatgaagcataaataagatcaactcaattgtgagacaggacacaagcaaagtaactcactaagcagattgatcactcaaaatcagcctgggagggcagcgtgaaacggcacaccgggcagatgcggctaatgcggagccaactgaagatgcagcgctgatggaaggaatggaaacatggcatcattctaagcgtgttgccttcctcgaaaggctcaaggcacacggcgcaatcctgctccctggtctcgcccaaattgggctgatgcagagttaccatggccttagcagaggcccggtcaccgcaaccaaaggcaccatcatgcgagttttctctatcctcgaaaacctccaaggtggcggctcgcctccgcgcctcgtgcctcagtagatgatcctgagacatccgcacacgcaggttggaccaccaggcgtcagggccgtcgttttggccgccgaaacggtcggcgagtgcatcttggtcaccatatcgcgcgacgagagaatcataatgtcttcggcttgcagggttcatcgtgtaccaacagggacatgaaccccctaaa

SEQ ID NO: 13512 - DNA, 633 bp, Oryza sativa
  Clone ID: TFbOSC401539j.C1.o112.gp
ggctccaccccggcgcggcagaccgggcacgacgagctggacgcgagccacttgtcgatgcaggcgacgtggaacacgtggcggcaggccggcagcacgcgcaccgcgtccgcctcctgcatggcgccgaggcagatggcgcactcggtggtgccgcccgccgcgtcgccgcccgccaccttcccgtacgccgcggtcggcagcgccgcgatggccgacgggtccagcccgacctgcttgggcggcgcccccgcgttcacggtcgccagcgcggccgcttccgccgcgcgcctgcggttccggcggcgtacgtggcagacgtagaggtggaggaacagggccagcccgagcacggacacgaacgcggcgacggcggtggcgatgagccgcacgttgcgccccggcccggccgacgagctcctctcgccgccgccgaaccacgcggaccccgggtcgctcactctccccggcacggctgacgtccgatccatcgatcgatactccgcttatccgctacacgcgagcgcgagctagttggcggagctaagcttctcccttggtttggtgagatggcgcgcggtttgggtgtgctaagctgagtagtactatctggtctctttataagctaagcag

SEQ ID NO: 13513 - DNA, 717 bp, Oryza sativa
  Clone ID: TFbOSC401539j.C1.o91.fg
atggatcggacgtcagccgtgccggggagagtgagcgacccggggtccgcgtggttcggcggcggcgagaggagctcgtcggccgggccggggcgcaacgtgcggctcatcgccaccgccgtcgccgcgttcgtgtccgtgctcgggctggccctgttcctccacctctacgtctgccacgtacgccgccggaaccgcaggcgcgcggcggaagcggccgcgctggcgaccgtgaacgcgggggcgccgcccaagcaggtcgggctggacccgtcggccatcgcggcgctgccgaccgcggcgtacgggaaggtggcgggcggcgacgcggcgggcggcaccaccgagtgcgccatctgcctcggcgccatgcaggaggcggacgcggtgcgcgtgctgccggcctgccgccacgtgttccacgtcgcctgcatcgacaagtggctcgcgtccagctcgtcgtgcccggtctgccgcgccggggtggagccgccgccgccgcctccgtcaacggcggcggcgaggtgcgtgcacgagaagcaggacgcggagaaggaggaggcggccgccggtagctcggcgccggtgcgggtgctcggcgcgtcgctaatgaagatgctgagcagggagagaccgtcgccgaggaggcagccgggagtccacgccgtggaaatggaagacttggaaagccagctgccgcggccgcaacagcagtag

SEQ ID NO: 13514 - DNA, 2079 bp, Oryza sativa
  Clone ID: TFbOSC409503j.C1.o6.fg
atgggcgccgggagcagccgcgccgatgcgccgccgcggcggcgggcggcggcgcgcggcctcgggctcgggctcgcggggtgcttcggcggcggatcctctggggcggccaccggaggcggcggcggcggcggcgcgaccgccgcgtcctcctcgcgagctcacgaggtggaatcttggcaagcagctcgagcggttgctgagatggactttcgggcttctgtcgctgctaaggatatccgcatatcaagtgagtcagatccaagagtgcatccatcttcaagcacaataagtcatcatctcaggttcaatcacttaaacagtcacgaaaacaaggaagatgccctgggaacagaaatcgctgaaacaagtgttcgtcagagttcatcaggaaaggaagtcatgcctaggggaaatttcagtaatgaagttgcttatgctgagataacgtctagagaaggaatcagtcatattggacgagatattttagaacctgcagcaaacaatgctgagactgacacagtttgcattccagaagttggtggccccgtttctgaatctggtttctcctcctcacagagggcatctgaaaggatcatggctgacttggaggctggagagattgctcatgggacttcatccacaactattatgtcaagtgaaagatcagatacttctcaatctagcttaacatctgtgttgcctgctacttcaactgcaccatctacaattggagaatcacttccagatacagtccctagcagagaagatgtccccatatttagtgggacacaaggtgagattggtggaaatacattacatgatgacatgatgagcattttctcaaacgatggtccagcgcgtgttagagattcaagcagcaatgaaatgaggaggagccatagaagggttctgtgggacacattttccagacgtagttcaagaggatatttagattctgataccgatgatctgggattttacagcagatggctagaccttggtgatgaactttttgcggatgagattgaggaggcacggttctttcatcggagacgccatggttcaatcagagtaagccagtattcaagatctcggattagggagcatcggcgtgctgtttttgatagcggtactgaccaaagtaccgttgcttgtcctttggggatccaccaaattggcagatgcacctgtgattccttcttgattgctgaagaatctagtgcccgtgcaagtatatcaagaattgtcatgttaaccgaggcattatttgaggtattggatgaaattcaccggcaacctgcatcactttcgctttccatggtctctgcccaggctccagaatctgtggttaattcattaccatgtaagagctacaaaaagcagacagcccaatgcagtgatgacatggaacagtgtcacatctgcttaactgaatatgaggatggagatcagataagaagcctcccgtgcaaacacgagtttcacttgctgtgtgttgacaagtggctcaaagaagtacacagcgtaccaaagctaataagcaaggccctgaccaacagattgcagctcatcatcgactatctcattgaccctatgcaatcaagttttatcaaaaacaggtcaatctcagaaaatttcattctagcatcaaagatggttcaatctgcgctcaagagaaaggagccaatgatagtgctgaagctcaatttccacaaggcgttcgacacagtaagctgggatgccctgttcaaaacattggaagcaagaggatttcctgaattatggataagatggatgaaatgtctcctttgcacagggaaggcccagagacagattaaacaccagggcaaacaacaacccacagacttcatcaatcttaagacataccggctcagtctttgggaggtgctcataggggtaggaccctatggaaagcacgcaacgccaggatctttgatgggtagcaaaattctctctctctcgtgtcaagtcaagtcaggaaatccattgaactctggagtcatcgaggccaagaaacaaccagggctaagctcttgtcctggtgtgaaaggctag

SEQ ID NO: 13515 - DNA, 1788 bp, Oryza sativa
  Clone ID: TFbOSC407936j.C1.o30.fg
atggcagagcagccaagaatcaactcagcattagtttctgttatccgtatggctaaggtttcaaagaatgccaactcagctgtctctgcagctgcgtatcattacatacgaaatgatgatagacctgacaaggcttttacaactgaaagggctaagagggctggaaaagctaatgcttcaagtggccagatctttgttactatcccacccgaccattttggccccattcttgcagagaatgaccccaagagaagcattggtgttctagttggggatacatgggaagacagacttgagtgcaggcaatggggtgcccattttcctcacgtggctggtattgctggccaatccacacatggtgctcagtcggtagccctctcgggtgggtatgtcgatgatgaggaccatggggaatggtttctatatactggaagtggtggaagagatctaagtgggaacaagcgtacaaacaaggagcagtcctcagaccagaaatttgagaagctgaatgctgctcttcgtattagttgcctcaagggttaccctgtcagggttgtgcggtcccacaaagagaagcgttcttcatatgctcctgaagctggtgtgaggtatgatggagtttacaggattgaaaaatgttggaggaagattagtgttcagggtaaattcaaggtttgcagtgatatttatggtgaccgtccgaggccactccccaaagttgatgagctgaaaggtgcaacagacatatcagagaggaaaggaactccttcatgggactttgatgagaaagaaggctggaagtgggtgaagcctccaccaatcagcagaaagcctaacctatcaggggatcctgcaactgacaaggaaatccggagggttgcaaggcgtgcccagatgtctgtgactgaaaggctgctgaaagagtttggatgttccatttgcaagcaagtgatgaaggaaccactcactactccatgtgctcataacttctgcaagttgtgtttggttgggacatatggtagtcaatcgtctatgagggagagaagccggggtgggcggactctaagggcacagaagattgtgaagaagtgcccttcatgtccaactgatatttgtgacttcctagagaatccacagatcaatcgagagatgatggatttgattgagtccttgcaaagaaaggctgttgaagaaggagataccaagacaagctcagatgttagcaatggtgctgagtcatctggagatgatggaaacaacgaagctttagagaagggagaggatgatagcagcttgaaggatgatggcagcttgaaggatgatggcaaagtggtcaaggctgtggttgtaatcaaggaagaggacctgcagcctaagaagagcaaaggagaagatgagaaagaacaaggtgacaagaagatggacagtgctgatgtggtggacattgcagttgaaaagaaacaggcgacgaagcgggcttctgagaaggctgagaagaagcaggcaaggaagcgcaagggggatgctgttgccacaaatgatggtaaaaggatgaaaacaggtggtgatgctatggagacagcagcggaagaggatgctcccctgagcggcggaactcctgtgaagcgcaacagcaggaagagtagtgaggttgatgccaaaggcggtggcggtagtcctgttgtgagcagccctcgcagggtgacgaggagcaatgccaaggctagcggtgaagctgatggtagccctgcgacaaggaccaggagggctacccgcgctgaagcctga

SEQ ID NO: 13516 - DNA, 615 bp, Oryza sativa
  Clone ID: TFbOSC14789j.C1.o6.fg
atggtgtcgatcgtgacgccggtgacggacagggacagcgggcggacggtggcgggcgtgccgccggtgctcgtcggggcgtccgtctcgtcggcgccggagctgcgggggcgggcgtacctggtgcaccacgtcttctacgaggacggcagcgccagcgccgacggtggcggcggcgtggccccggcgtccagggcatcgatcgcggcgctgagggaggtcgaggaggaggatgacgacggcgaggaggcgtccgactgcgcgatctgcctcgacgacggggaggagtccagggagacgtgcgggagcgggaggaggaaggagatgccgtgcgggcaccggttccacggcgagtgcgtggagcggtggctggggatccacggcagctgcccgctgtgccggcacgagatgccgccggcgacggcggcggagccggagaagaagaaggtggtggtggcgatggtgcatggggagagggtggtgatgaggggaaggcgcgtggtgctgagcgtgctggtcatgggccgggcccacgatgacggcgagggcccggagcaacgcggcacggatccgattcctcctcttccgcgtgtgctcatagatgatgtggattaa

SEQ ID NO: 13517 - DNA, 629 bp, Oryza sativa
  Clone ID: TFbOSC14789j.C1.o7.gp
aaagaaagaagcacctcgacattccttctatttactttatacttaaacaaagggaaagcattgcatacttacatttgcatgcgagtatatacatagatagcacggcaaaatcctagttaatccagatcaccctttcttaaatttgagaggagttattaattaatccacatcatctatgagcacacgcggaagaggaggaatcggatccgtgccgcgttgctccgggccctcgccgtcatcgtgggcccggcccatgaccagcacgctcagcaccacgcgccttcccctcatcaccaccctctccccatgcaccatcgccaccaccaccttcttcttctccggctccgccgccgtcgccggcggcatctcgtgccggcacagcgggcagctgccgtggatccccagccaccgctccacgcactcgccgtggaaccggtgcccgcacggcatctccttcctcctcccgctcccgcacgtctccctggactcctccccgtcgtcgaggcagatcgcgcagtcggacgcctcctcgccgtcgtcatcctcctcctcgacctccctcagcgccgcgatcgatgccctggacgccggggccacgccgccgccaccgtcggcgctggcgctgccgt

SEQ ID NO: 13518 - DNA, 615 bp, Oryza sativa
  Clone ID: TFbOSC400332j.C1.o12.fg
atggtgtcgatcgtgacgccggtgacggacagggacagcgggcggacggtggcgggcgtgccgccggtgctcgtcggggcgtccgtctcgtcggcgccggagctgcgggggcgggcgtacctggtgcaccacgtcttctacgaggacggcagcgccagcgccgacggtggcggcggcgtggccccggcgtccagggcatcgatcgcggcgctgagggaggtcgaggaggaggatgacgacggcgaggaggcgtccgactgcgcgatctgcctcgacgacggggaggagtccagggagacgtgcgggagcgggaggaggaaggagatgccgtgcgggcaccggttccacggcgagtgcgtggagcggtggctggggatccacggcagctgcccgctgtgccggcacgagatgccgccggcgacggcggcggaggcggaggaggaggaggtggtggtggcgatggtgcatggggagagggtggtgatgagggggaggcgcgtggtgctgagcgtgctggtcatgggccgggcccacgatgacggcgagggcccggagcaacgcggcacggatccgattcctcctcttccgcgtgtgctcatagatgatgtggattaa

SEQ ID NO: 13519 - DNA, 629 bp, Oryza sativa
  Clone ID: TFbOSC400332j.C1.o15.gp
aaagaaagaagcacctcgacattccttctatttactttatacttaaacaaagggaaagcattgcatacttacatttgcatgcgagtatatacatagatagcacggcaaaatcctagttaatccagatcaccctttcttaaatttgagaggagttattaattaatccacatcatctatgagcacacgcggaagaggaggaatcggatccgtgccgcgttgctccgggccctcgccgtcatcgtgggcccggcccatgaccagcacgctcagcaccacgcgcctccccctcatcaccaccctctccccatgcaccatcgccaccaccacctcctcctcctccgcctccgccgccgtcgccggcggcatctcgtgccggcacagcgggcagctgccgtggatccccagccaccgctccacgcactcgccgtggaaccggtgcccgcacggcatctccttcctcctcccgctcccgcacgtctccctggactcctccccgtcgtcgaggcagatcgcgcagtcggacgcctcctcgccgtcgtcatcctcctcctcgacctccctcagcgccgcgatcgatgccctggacgccggggccacgccgccgccaccgtcggcgctggcgctgccgt

SEQ ID NO: 13520 - DNA, 332 bp, Oryza sativa
  Clone ID: TFbOSC900163j.C1.o11.gp
cctctcccatgcaccatttgccaccaccacttcttcttcttccgcttccgccgcggtcgccggcggcatctcgtgccggcacagcgggcagctgccgtggatccccagccaccgctccacgcactcgccgtggaaccggtgcccgcacggcatctccttcctcctcccgctcccgcacgtctccctggactcctccccgtcgtcgaggcagatcgcgcagtcggacgcctcctcgccgtcgtcatcctcctcctcgacctccctcagcgccgcgatcgatgccctggacgccggggccacgccgccgccaccgtcggcgctggcgctgccgt

SEQ ID NO: 13521 - DNA, 729 bp, Oryza sativa
  Clone ID: TFbOSC900163j.C1.o7.fg
atgtcgctcaccaatgctccctcgtcgatggtgtcgatcgtgacgccggtgacggacagggacagcgggcggacggtggcgggcgtgccgccggtgctcgtcggggcgtccgtctcgtcggcgccggagctgcgggggcgggcgtacctggtgcaccacgtcttctacgaggacggcagcgccagcgccgacggtggcggcggcgtggccccggcgtccagggcatcgatcgcggcgctgagggaggtcgaggaggaggatgacgacggcgaggaggcgtccgactgcgcgatctgcctcgacgacggggaggagtccagggagacgtgcgggagcgggaggaggaaggagatgccgtgcgggcaccggttccacggcgagtgcgtggagcggtggctggggatccacggcagctgcccgctgtgccggcacgagatgccgccggcgaccgcggcggaagcggaagaagaagaagtggtggtggcaaatgtagtgttacacggagatgagaggagaggagaggagaggagggaggaggcggaggctgtggggcactggggacgaggaggaggcagcgatggcagtgagggccgggaggagaagacagcggtggcggtggaaggagaagaggcggaggtggcgaagcgacgcgtgcgaggagtcgcagcgatacacaggagagggagggggaaaatgaaaatacacaggcataggaggactagaagctga

SEQ ID NO: 13522 - DNA, 1128 bp, Oryza sativa
  Clone ID: TFbOSC900418j.C1.o14.fg
atggcggggctcgccggcgacgactcctcattcttcggggacgacggcgacggcgatgagttctgctacgggccgttcgacgtcgaggatctctgctacggcgcctccgatgtcgacgacgattgggaggagttctgcgacggccccttcggcggcggcggcgtggaggagttctgcgtctccggtttctccgtccgcgacctctccgacgcgtcatcctccggcgcccgcgagacgggcgacccccacgacgacgatcccctcccccaaaccctagcccgctccctcgactccgacggcgacctctccgccaccctccaccagatcgtgtccgcgatgcgcctctccgaggacgaagaggaggaggaggaggaggagctactggtcctcggccacggccacggcgtcggcatcggcggcggcggcgacgtagatgggttcatggtgagcgccttcgatctcgacacagcgatggccattgggggcatcctcgaggacatccacgaggtgatgggcgccgatgaggtacgggaagaggtggtggtggaggaggaggaggccggcaatggcggggggatcatgccgaatggattcgagttcgggccgccgccgcgggccatcagtggcaccgccgcgggattccggatgatggtggacgccgatgacactgactccgatgacttccagtttgtcgaggtactcggaggaggacaggtcagggaggccggtgccggcatgagcatgcggccctcgcgtgcgtcccaattggtggtggagagcttgccggaggcgacgctcagtgaagaggaggcctctcgtggctgcgccgtgtgcaaggactcttttgcgtcggggcagatcgtcgccttgctcccgtgcaagcattacttccatggggactgtatctggccatggttaactatcaggaccacttgccctgtctgccggcaccaagttcgcactgaagatgacgattatgaacaacgtatggctcggcgcgtgattgttctagcagcagtggagcatcagggtgcaccggcacagggctgtggagacagcgcaaccatgggtgctgaaggcgcaagtgaatgtgtggtagaaaatggacctgagaaaacttcattttga

SEQ ID NO: 13523 - DNA, 1017 bp, Oryza sativa
  Clone ID: TFbOSC401561j.C1.o21.fg
atgaacaaaagatttaacccacagtaccgggcatggcgcccacccacagggccacagggccacagggccgggccagaaagcggaatcgtcccaccaacaagagactacgtggtcgaggaggaggacgaggagcgccacccccacccccaccaccgcctcctcctcgacgacgacgcggcggggttcgaccacgacgaaaccctagccgcccccgcgcccgccccgggctccccgttctccttcgcctccgaccccgaccccgaccccgacatcgacctcgagctccgcctctcctcccgctcccctcccttctgggactgcctcgaggacgacctcgccgacgaggagatggtcgggggcggattcgagtgggaggagatcgccgacgccgctgtccctgcccccggagccgtcgctgctggtggtggtggtggtggtggaggaggagatgggggccttgttggggacggcgacgtgttcgggttcctcgacgagagggagatcctcggcgcgatggaggggctcgacagcggcgacgacgaatcggggttctccgacgagccgttcgacttcggcgacgagggggacgacataggggacatcttccggagcgtggggtgggaggtgctcccggtgccgctggacgaggacgacttcgaggtgctgccggggcacgtcgcggacgccgcggcgggaggggcgccccccgcggcgcgcgcggcggtggagcggctccaggtggtgccggtcggcggcggcggggaggaggcggcggcggcgtcgcggggttgcgctgtgtgcaaggacgggatcgcgcagggggagctcgccacgcagctgccgtgcgcgcacttgtaccacggggcgtgcatcgaaccgtggctcgccatccggaactcgtgtccggtgtgccgttacgagctgcccaccgatgaccccgagtacgagaagcggcgggtgaagcggcgttcttctggtgactccgtggcgcaattgggtactcctatgcaaatttga

SEQ ID NO: 13524 - DNA, 1938 bp, Oryza sativa
  Clone ID: TFbOSC34790j.C1.o5.fg
atggagccgtcgcggcggctgctgctgtccgactacgacggcgcgatcgtgtcgccgctgccgtcgccgccgccgtcgtcggccacgccgttcaggccgggcgtcgcggtggtcgtgggcatcctgacgagcgtgttctccatcacgttcctgctgctgctgtacgcgaagcactgcaagcggaacgccgcggagtcgtcgggcccgtacgggagcggcggcgcgttcgggtcgtccggtgggggcggggcgggcgagcggcggaactccggcgtcgaccgcgccgtggtggagtcgctgccggtgttccggttcggcgcgctccgtgggcagaaggctgggctcgagtgcgcggtgtgcctcggccggttcgagccgacggaggcgctccggctgctgccgaaatgccgccatgggttccacgtcgagtgcgtggatacgtggctggacgcgcactcgacgtgcccgctgtgccgctcccgcgtcgaccccgaggacgtcctgctcctcccggagccgccaaagccgtccaccacggggccccctgatccgccggagacgaaggtggcggcggcggcggcggctgctacggccaaggacaaggaggcgagcttagctcctgctgctcctgctccgtctccagcgtttagaggcttcttctccggccggcactcgacggggtcggtacgggcgccagggagggttggccctgcctcacgccggtcggccgatctcgtcggaggcgacggcggtgcggtggtgggatgcttcgaggccgccaaggttcgcaaggacagggtgctgttgatggagccggcggccgcggtggcggagcctgacccggaagcctacgaccggcggttcgggcaccgcatcctggtgagcaccgccggtggctgcgaggacgagacggcaccggcggcgaagcagcggtggagcgaggtgcgaccatccgatctgatgttcgtccggtcggagatgctggtgacggaggccggccgagttcagctagagaccatcacatcacgtgcactgttcctttcaacgatcggctgctactactacccgatggtgaacatgcacgtctcccgtcgtcaatctggcgatgtgatagttgtaagggtttctctgatagagacttggaggaccaccgacgacgatgttctcagccgatcaagcttgctaggaggaccggatgagcatgatgtcagggagcacctgctggacgtggacggcgtcggggaagaaggggcggcggcggcggcggggccgaagatacgggtgcgggggctgacgcggcggtcggaggcgagaggcgaggagatcctgcggggcgtcgacctggacgtgccgcgcggggtggtcgtcggcgtcatcggccccagcggcagcggcaagtccacgctgctccgcgcgctcaaccgcctctgggagcccgcgccgggcgccgtgctcctcgacggcgtcgacatctgcggcatcgacgtcctcgcgctccgccggaaggtcggcatgctcttccagctccccgccatgttcgacgataaaaactattttgaaaagtatttttattgtgggagaaactacaactacccgaagctccctaaggttgtgtttgaaggaaccgtggctgacaacgtgcgatacgggccacagctgcagggcaagaagctgacggacgccgaggtgcttctgctggatgagccgacgagcgcgttggatcccatctcgacgcagaacatcgaggaggcgatcgtgcggctgaagaagacgagggggctcaccacggtgatggtgtcgcacagcgtgaagcagatccagcggatcgccgacctggtctgcctcctcgtcgccggcgaggtcgtcgaggtgctcccgccgtcggagctgtccgaggccaagcaccccatggcacggcgcttcctcgagctcagctga

SEQ ID NO: 13525 - DNA, 1092 bp, Oryza sativa
  Clone ID: TFbOSC400903j.C1.o30.fg
atgatggtcgccggagtaatcaggagcaaccaggatggcggcggcggcggcgggacggtgtccggtgcggcgaggattagcccggcggtggtgttcgtcctggtgatattggctgtggtgctgttcgtgtccgggttgctgcatcttcttgtcagattcttgctcaggcgcggccgtgggcgagatggcggcggcggcggcgacgcggaggcggcggagggtgtggaggagtcggcgttgcaacggcagctgcagcagctgttccacctgcacgacgccgggctggaccaggacgtcatcgacgcgctcccggtgttcatgtaccgggaggtggtggtcggcgtcggcggcggcggcggcgcgggcggcggagccaaggagccgttcgactgcgcggtctgcctgtgcgagttcgccggcgacgaccggctccggctgctgccggtgtgcggccacgcgttccacatcgactgcatcgacacgtggctgctctccaactccacgtgcccgctctgccgcgccgcgctcggcgccgacgccgccgctctgttcgacgccgcgttcgacgagatggccgacgaggaggaccggaagcagcaggaggacgccgtgttccccgtccgcctcggcaagttcaagaacctctccagggcggtcggccccgtccacgaccgcgacgacgccgccgccgccgccgccggcgtcggcgtcggcggtggcattatcacgcgagaggaaggcgagtcgagcagcagcagcttggacgccaggcggtgcttctccatgggctcctaccagtacgtcctcgccgaggcgagcttgcaggtgtccgtacaccggaggcacggcgacggcaatggcagggcgaggctgagagggctcgccggcgccaacccggccggcaacgacgccgccgccgccgccgacgggaagaagatcggcgccggcagcaagggcgacagcttctcggtgtccaagatttggcagtggccgcggcaaggcaaggggaagctgccggtgctcgcctccgacgactcgccggcggtggacggccggctgccgtggccgaggagaagccccggggcttcctga

SEQ ID NO: 13526 - DNA, 1095 bp, Oryza sativa
  Clone ID: TFbOSC21352j.C1.o8.fg
atgtcgaccaagaggttgaataaggggagtgctggagtggcttgtgtttacttcgcttttctgcatattttggttctccgcactttacaggtttgcacgttctaccagaaaggttcatgctcgtatggtagccgttgccgatatgaccatgtcaaagtttctcgtaaccccacagtggctccaccaccaagctcaagtactacaacacgtgcatctagttctcttcagcctttgagtttcgggcgccctcaccatgtggggtaccaagcagattcaagcaacccaaggcaacagatatctatggatgtgctggcacattctggaagtaagcctgtatggagaaatgattttcaacatgaaagtgtacttgaggatgggattgactggtcaataagtccaactgtgcaaaaccagacaaccttgagtcctgctgatctgccaatctgttcttttgctgctggtggtaattgtccttatggggaagagtgccctcagatgcatggagatctgtgcacaacctgtgggaaaatgtgcttacatccttatcgtcctgatgagagggaggaacataccaagctatgtgagaaaaaccacaagcgtcttgagtctttgaaacgtagccaagagatagaatgcagtgtctgcctggaccgtgtgctctcaaagcctactgctgctgaaaggaagtttggactcttatctgagtgtgatcatcccttctgtatttcatgtattagaaattggcgtaacaattctcctacgtctggaatggatgtgaactcagcactgagggcttgtccaatatgtcgcaaactttcatactatgtcattccaagtgttctttggtacttttcgaaggaggaaaagctggagattattgacaactataaagccaaactcaagtctattgactgcaagtacttcgattttggaactggtacttgtccctttgggtcaagctgtttctacaagcatgcctacagagacggacgcttggaagaggtcatactgcgacatcttgatgctgacgatggaagtacagtgattgccaaaaatattaggttgtcggacttcctcagtcggttacatctttag

SEQ ID NO: 13527 - DNA, 897 bp, Oryza sativa
  Clone ID: TFbOSC7089j.C1.o1.fg
atgaaggagaagacgttagcgatggtttcgggcttgcctagcgcgaggatgatgcggcaaagtagggcttcgtgggtttaccagctgtcaccaatgacttgtgctgttgccggcactagcacgttggtgagcatggaggtgatgcatgataccactgggaagaaggaagtggttgtctgttatatgaacgcccctctaccgtacatgattgaagagaattacgggggatgcttctttgaagacgacgttgatcttgcacaggttctccaggaccaggaaatagtctatcaattaatacaaggaaattatggtactggttcatccaaaactcattcaaatcctagttctagttatagccatggatgtgaattgggtgaacggaaaccatcaggagttgcaagttatgaagcgcaactagttgttgatgaagctttagctcgagagctgcaacagatggaggaccaactagcaagtgcatcaattgatgaccataacataatagaacatggaagaaagccaatagcttcttcaacatctagcggtggtaatgcttctgcaagcagacctcctcaggtagtgatggaggatggcattgatccagataacatgacttacgaggaactgcaacaattaggggaagctataggtactgaaagcaaagggttgccggaagatgtgatagcgctcttgcctacttcaacatacaaaattaggatattctcaagaaaggaaaagcatgacgaatgtgtgatatgctgtatgacttacaagaaccgagataggctgactaaattgccctgtgagcatcagtaccatcaaacttgtgtcaccaaatggttgaagatcaacaaggtatgccctgtttgcaacaaggaggtttatgggtcgggcaagtga

SEQ ID NO: 13528 - DNA, 2247 bp, Oryza sativa
  Clone ID: TFbOSC900071j.C1.o19.gm
atggcctcctccctcctctcctccccaaaaccctcctccttctcctccgcaaaccccacctccactccacgcccacgcgcccaaactctctcccccttccgcgccgccgccccacgcttctcccatggcctcgccaccgccgccgccgccgcaaaccctagcgcctcccgccgctgctaccaccgcgccttcgcccgccccgtccgggcgtccatggcgcagccgcggcgcccggagtacgtccccaaccgcatcgacgaccccaactacgtccgcatcttcgacaccaccctccgcgacggggagcagtcccccggggccaccatgaccagcgccgagaagctcgtcgtcgcgcgccagctcgcccgcctcggcgtcgacatcatcgaggccgggttcccggcctcctcccccgacgacctcgacgccgtgcgctccatcgccatcgaggtcgggaacacgcccgtcggggaggacggccacgtgccggtcatctgtggcctctcgagatgcaataagcgagacattgatgctgcctgggaggccgtgcggcacgcgcggcggccgcgcatccacaccttcattgccaccagcgagatccatatgcagcacaagctaaggaagacgcccgagcaggtggtggccattgccaaggaaatggtggcctacgcccgcagcctaggctgccctgatgtcgagttcagccctgaagacgctggcagagagtttctatatcatatactagaggaagtcataaaagctggagcaacaacactcaatatcccagacactgttggatacactcttccttatgaatttgggaaactaattgctgatataaaagcaaacactccaggaattgaaaatgccattatttctactcattgccagaatgaccttggtctagcaaccgcaaatacattagcgggcgctcatgcaggagcacggcaattagaggtgactatcaatggtattggtgaaagggctggaaatgcttctttggaagaggatgggatgcttaagtacaaaggaacttatgaaataatttctcctgatgatattggtctaacacgtgcaaatgagtttggtattgttcttgggaagctcagtggaaggcatgctgtgagatctaaactagtggagcttggatatgaaatcactgacaaggaatttgaggatttctttaaacgctacaaagaggttgcagagaagaaaaagcgtgtaactgatgaagacattgaggcgctgttgtctgatgagatatttcagcccaaggttttttggtcccttgctgatgtacaggcaacttgtggaacacttggtctgtctacagcaactgtcaaactgataggtccggatggagatgagaagattgcatgtgcagttggaacaggtccagttgatgcagcttacaaggctgttgatgatataatacagatcccaactgttcttcgagaatatagcatgacatcggtcacagaaggcattgatgcaattgcaactactagagtggttgtcactggagatgtcagcgactctaaacatgctttgactggtcactccttcaaccgggcattcagaaagacggaggacgccgctatgattggcaacggaattgctccacggatggccggtgatcagtccatcgtgatgtccgagcaacagcgagctgagttttgcctgacgttgatggccgtaatgtacggccacacccggcagccagccgacgccgagctgctgcgaaggccgcaacgccgccgtgctgctgctgctgctgatccgccgccgcacatccgcaacgcaagtgtggtcgaaaacaccgagcctgatgtcctgttcgcgtatactccacacgatggtttgtcaccggagttcgacgatgacagcggcggcgttgctgattattttgcagccgatgatgacgaagcttacagcaacggtggcttcggcgcggtgccggcgttgtccgaggccatcgttagcatgccggagttgtccgtcggcgaggcgagggagaagcagtgtggggtgtgtctagaggggttcgaggagggtgacaagctcaggaagatgccatgcgagcactacttccatgagagctgcgttttcaaatggcttcaggtcagccgtctttgtccctactgtctcttcgccatgcctgcggctgaggaggaggaacataacaatgatgatgaagaagaagaagacgaagcaatgatgtgcatccgtttcttgttcccagagtag

SEQ ID NO: 13529 - DNA, 1689 bp, Oryza sativa
  Clone ID: TFbOSC422112j.C1.o3.fg
atggccgcggacgatgccgcgcggagcagcagaaggatggatctgaacctctacctcggcctcccccgcgccccgcgcctgcgccgccccgatctcggctccgacctcgcgctcggcaccccgatgctctcctcctcgccttcctcctcggcggcctcggccgacgcgccgccgctggagacggagccgctccacccgccgtactcaccgccccccgccgagcttgtgcgccccccgacacctctgcccgagccgtacgacccgtcggctcccgaggcgcacccgccctacgtgccgcctcccgtgccgcccccggaggcgatacctgagctcgctgacgaccttgagttcggcttctcccacccgccgcttctgctgcggcccagcgagctgcttgggtgggtagaccggccatcgtcgtcgacggcctcctcttccttccgcccggagcgtgtcgaccgctaccgtccccccgtgatctgcctgaatagccgccagagtcgctgcctccgtccaagacggttcaggtcggaccttccgcctctcggctcggaggcccctgccctggagaacgacgctgcagcacaaccgccaccgcaagagcctatgcaagatacggttgaagagaacaaggtggtcgccgatggcgctatcgtgggtgcctcagaggaggagccagccgaacgtggcaagagcgttgcgatgtttgagtgcaacatctgcttcgagatggcttccgagcctgtggtaacttcgtgtggacatctcttctgctggccttgtttgtaccaatggctgcatgtccactcaactcacaaggagtgccctgtctgcaaaggcgaggtcactgaagggaacatcactccaatttacgggagagggaattcgacttcggacgcggaaaagaaggttgcggaggagggaaatgtatcaggccctacaatcccaccaaggccacatggcaatcggctcgagagcttccggcagaaattccaccatttgcgcccgatttctagaaggcttggcgaggcacatgggatattgtcttcttggaggcgcatacttgatcagcagattatgaatagtgtgagtaggtttgaggggcctcctgaatcaactgtccaggaaatgattgatcatgctcatcatgctagccgtttaggtcgaattactactagaatgagggcaaggaggttgcagagggaagccgaaaactctacatttgttgcttcttctgctgcggagagtgggctgccagcaaacagcacatcggatctgcctaggcgtagctcaagtccattttcctcggaaagaattgatttattgcaacactttgttgaccttgcaagcacggaaagattggcaagcgctgtgagtgaccttagaagaatggttaggccgagcccttatggagcatcaacttcatcaaatccaccaaatccaccaaataccgagctgctgccagttgatgggaatcatgttgccgttgcactagctgcagatcaagcttccaattcaagcaccatggctgtaattcaggaggatgctgcttttactgaaagcacaggggaaccaagtaatgcagggtcttcgagatccctgaggaggagaggaagaaatgatgccttaggttctttggatgtggatggtgtgggactacaccggaacaagagaaggcggctgaactga

SEQ ID NO: 13530 - DNA, 972 bp, Oryza sativa
  Clone ID: TFbOSC402805j.C1.o20.fg
atggcagaagctgcaatcacaaggtactggtgccatgaatgcgagcaggccattgaggaggccatggtggatgagatcaagtgcccatcctgtggtggcgggttcgttgaagagatgaccgatgaggagattgagagactgaccaacaggcagccagagccgggtttctcgcaatggaaccctattgagcatccaggagaaacgatggacagcgacgatgaagataatgatttaggtcgtgagtttgagggttttatcaggaggcatcgacgggcatcaactctacgacgcgtgcttgacagcatccatgatgaccttgcagatgaccaagaaagggacagttccattctgatcaacgccttcaaccaagccctcgctctgcaaggctcagtgcttgatcctgatgagggccaaggtgaccaaggcggttcaacaaatgatgatggcttactggaggagtatgtcctcggagcaggtctgagcctgctgcttcaacatttggctgagagcgacccaagtcggaatggtacccctcctgcaaagaaagaggcggttgaagcgctgcccactgtgaaaatcgaagaggttgtcagctgttcagtctgccttgatgatcttgaggtggggtcccaggctaaacaaatgccatgtgaacataagtttcattcttcttgtatcctgccatggcttgaattacatagttcctgcccggtttgccggtttgagctgccttctgaggagacaaaagacttgaacgagcctagcaacattggtagagtggaggacagccatgaggaagtcagagctgatggccctggaaacgtcagcgagagcagtaacagaccctgggctattgttccttggttgaatgagctattctcaactcgtgaggcacagaatgctggaggtgtttctacggatcaacaatcaccgcacacttctggaaccaacccaaatgcagggcacagttga

SEQ ID NO: 13531 - DNA, 858 bp, Oryza sativa
  Clone ID: TFbOSC400283j.C1.o26.fg
atggaactaactggttggcatcttccagaaccaccgtcttccaccgtccgatctgtgatcgacggcggcggtgctcaccacccacgtttgataagcagccaggtaggccagccagcgaggcctacctcgccatcaccattgccaccgcgccatcgccaccgccacattccaaaagcagaagcagtccaaggcgagagacagagtccgcgacatggttcgatggagttgtcggcttctgctctgggtttcggtctttgtcttgaccctcacccagttgggggccttcgtcgtcgtcttcggcgagggggaggacgccatacctcgcgttctgattgccgccgccgtcttggctacgtaccacgtcctgctcactttccggtgagcggagtcggcggcggcttgcgcgggttcctccaccgcgcgccgccgggttctgcccggaacgacaagggctgcgcgaggcgccacaagacggcgtcgagttcggcgacgagcgcggaacccatggacgagggcgaggccgacctcctccagtttctcttcgtcacctccggtgtctcctggggaggcatcgtgggggtcgtcgtcgccgtgaacgcctccgtaccggctgcgcgggtgtggatgctccccggcgtcaccacgctggaccgggagctgggcggcgacgactgctcgatgtgccagtacgacaaggatgccggagccgtcgtccgcacgctctcctgcgaccacgtcttccacaaggcgtgcatcgacgtgtggctccgcgagcacggcatggcctgccgactttgccgccgtaccgctagctgcgtgctgccctggaaaaccggagggcgccgccgacacggctga

SEQ ID NO: 13532 - DNA, 1371 bp, Oryza sativa
  Clone ID: TFbOSC401376j.C1.o7.fg
atggggccctccgcagccgcgctgagggccgccgccgtggtggggctggttgtggcggtcgggctcgcgctcccgccgctggccgcggcgctgcggccgctcagggagcgcgtcgcgtccgcaggggccgcctcctcctccggatcgtggggcgatgagcatgcattcttcaagagggatgagaatgagataagtccgtactcatggaatatcacagggacatataaaggaagttggaactttgctggttccacaaatggttcttctaggtttcttgagtttacaaaattgaagggcgatgcggttttggaactattaagtacaccgacaaagataagcggggtgcactatgttcagggatctgttacattccatgatgttctagacaatgctcatgatcgtggagttgctcagataagtggtgcagatggcgagccacttcaagaagaggattacttcttatcaaatccatatcatttgaatatgtcagtacaatttggacctcttgcttttcataacctcaaagattccagttttgaggtagtttatatcattttgcagggagctgccaaggtttcaattctaatgatagggcaacaagctatcatggatgcatatctttgtctactgcatctgactgctgggatattggttgagtctctctttaacgcattcgcaacggctgctttcttcaagtttgtcgtattttctatatttgagatgcgatatctccttgccatatggaaagccagtagaccattgaacagtggagaaggctgggaagtaatgaggagagaattgtctgttctttacagccgcttttatggcattcttttgggagggatccttctcatgtatgagttgcacaattttctgcgcccacttcttttcctgatgtactccttttgggttcctcaaattgtcacaaatgtcatccgggatacaagaaaacccctgcaccctcagtatattttaggcatgacgatcactcgccttgctattccactgtatatatttggttgccctagcaatttcatgcgcattgagcctgacaagacatggtgcatagctgtgacaatattcatgggtatccaagcggcagtgctcctgctccagcactattttggttcacgctgctttattcctcaccagattctccctgagaaatactgctaccacaggaaggtagaggataacacaaatcagcccattgattgtgttatttgcatgactacaatcgaccttacccaaagaacaagtgaatacatggtggcaccttgtgagcatatattccactcaggctgtttgcaacgttggatggatatcaagatggagtgcccaacttgcaggcgctccttgccgccagcttag

SEQ ID NO: 13533 - DNA, 621 bp, Oryza sativa
  Clone ID: TFbOSC416737j.C1.o20.gm
atggcgcgttcctgcagcagcagcggcagcgatcatagtagctacgacctcgcgttaacgttgcggcggaagctcctgctcctcgacatcctcgccgtcctccgcttcctcgcggcggccctcctcgagcgtctcggcgtcgtgtcctgccaggaggacaatgagctccccggctgccactcctggtgcgacagcgacgtcgtagacaccggcgcgatggagcgcctcatgcaggcgaagctcagtacgtcgtggtacaggctacggcggcgtgcttcgcggggcggatcagacaacatggcctcgccgcacggcgacacgagcgcggacatctgcacgatttgcttggcggaactggaggctggaggtggaggaggaggatgccagcgccaggtcgcggagctgagcagctgctcgcacgcgttccacgccgcgtgcatcgacggttgggtggtggaggcgggaacctgccctctgtgccgcacgccggagtacatttttatagcttcaacaatcatgcctgttggcaacttcccgtgttctagctgcaacctggacgatcttcagaatttgtatagcggcaacgatagctggtcggtgcaccagctaggcatccactag

SEQ ID NO: 13534 - DNA, 1407 bp, Oryza sativa
  Clone ID: TFbOSC900230j.C1.o4.fg
atggtaatcgaccgaaacaaaaatggaaatggtaaaaaatatggaaatgaaaacggaaatggttttgctgttataccgatcgtttccgtatttactgtattcttgcggaaattaccgtttcttataatatggtgcttttctgggaggtgtaaccaactaaattcctatgctaccttctggttgatggccgtccctcctgttgaatcagaaacaagaagtgaagaaacagataatttccctttacttgcagaccacatggaaaatactggacatcatgcacatgcagttgatatcccatgggattcttcaccatcgacatctcgccgagataatcataatggatttgatcaattacctcgtatcttagaaggttctcctgggacatctactccatctaactctcagaatggtcctctagcaagaagagatgataatcgtggtcgtcgtcagcctagtcccttgaattctggttgctggatctcagttgagctagttgtaaatgttagccagatcatagcagctatttgtgttctgtcagtatcaaggaatgagcatccacactctccgttatttgagtgggtcattggttatacagtaggttgtactgccacgctgcctcatctttactggcgctatctccatcgcaacctcccaaccactgggcaagagccaacagttcagaatatccctccaaacaacacccctgaagctaattcatatggagtaaccggcacaaatggagtctcaagaaacaatgaggcaacagtaaatccaaggttccaagcttttgctgatcacttcaaaatggctctggactgtttctttgctgtgtggttcgttgtgggaaatgtatgggtatttggtggacattcttctgctcacgacgcgcccaacttgtacaggttgtgtattgccttcctcacattcagctgcatcggctatgctatgcctttcatcctctgcgcattgatatgttgctgcctaccctgcataatctctatcttgggatttcgggaagatctaaaccaaaacagaggagctagtgcggaaacaatcaatgccttgggaacatgcaagttcaagtcaaagaaaactcgtgatggagatggaaacgaagttggtgtcggtgttgtggctgctggaacaaacaaggagcgagtcatttctgcagaagatgctgtctgctgcatctgcttggccagatatgtcgataacgatgatctccgagagctcccttgtgcgcacttcttccacaaggattgtgtggacaaatggctcaagataaacgcgctgtgccccctttgcaaggctgagatagatggtgtctccacaagtgctccagccattggctttgggcgtcgccacagcgacaacagggtaggaaacgacattgaatcacaactataa

SEQ ID NO: 13535 - DNA, 786 bp, Oryza sativa
  Clone ID: TFbOSC400545j.C1.o54.fg
atggcgatggaaacgataatacgcttacggagcagcagcaagcagctggagggccaccacgggacggcgccgctggaggagggcccctcgtacgtgcgcttcgtctgcgacgtcaaggtgcggtgctggtcgcggcggctcggcggcggaggcgagcccgtgcgccacgacggcatcaagttcacgctggagacggagcgcaagcacgtgctggacggcgccggcggcgacgtcttcctcgactacgaggagacgcggcggatggcgtgggccgtgttcaccgggatgcgggagctccgctgcgtcgacctctcccgcagcaactgggcgacgcccatgcccgacgacgacgccgccgcgtggatccaccgcgcggtgaggcggaaccacgacgacggcctcgccggcggccactaccgcttcgccgcgcgcgtgaaggtggcggtggagctggtgttcagcgagcccgtgtcgctcgtccgcgggctggtctggctggagacgcgcgccggcgacacctgcgggatctgcctggacggcctgacggccagcgagaggtgcaagacgccgccggcgaacctgccgtgcgggcacgcgttccacccgccgtgcatcaccaggtggctgttcaaggggaccacctgcccgatctgccgcgacgacctcaccggcctcgccgccgcgccatgggagagcggcgtgatgtcgtgccctgggtgcatcatgccatccacgccgtgcgtcgaagattgcccgagcctgaaggctctctctctcaacagctag

SEQ ID NO: 13536 - DNA, 1197 bp, Oryza sativa
  Clone ID: TFbOSC900378j.C1.o8.fg
atggaacaaactacaggtgttagtggccatgagcacataattgatattccaagggacagtggtccatctacttcgacttcccatagtgttgctagagaaaaccatggagaaccaaatcctgttgatagatctgcaaccagagcgctagtacctgctttgcaggcaccatcagcagttggtgcacctagtgcaggacatacttcaggtgctagaagaagtgataactatgttcgccggcacagaagccctttgaattctggactctggatttcaatagaagttcttgtcaatgtgagccaaattgtagctgctattgttgtgctttctctttcaagaaaggaacatccgcaagctccattatttgagtgggtcataggttatacagttggttgttttgctacactaccccatctttattggcgctatatacaccgcaatattgtcaatggtgaaaatgagccagcacatacacttcaaggctcctctcagaacaattcaactgagccttctgctagtgcatcagagcgtcgaaggaatgctgcacgaaatgcagtgctcgctaatccaaggattaatgctctttttgaccacttcaagatggccttggattgtttctttgctgtgtggtttgtcgtaggaaatgtgtggatatttggcgggcgttcttctgctgccgatgctccaaacttgtacaggttatgtattgtgttccttacctttagttgtattgggtatgccatgcctttcatcctctgtgcaatgatatgctgctgcctgccctgcatcatatctgttatgggatttagagaagatacaaacaatacaagaggggctacctcagaatccatcaattctcttccaacatacaaattcaaaaccaagaaacgccgtcatagttcaggaaatgaagctgaaggccaagatggtgggatagtagctgcagggactgacaaggagcggtcactatctgctgaggatgctgtttgttgcatctgtcttgcaaagtatgcacacaatgatgagcttcgtgaacttccctgcacacattgtttccacaaggaatgtgttgataaatggctgaagattaatgcactttgcccattgtgcaaatctgagatagcgagctcatctggaacatctgatactcgtcgctctgaccacacagatattcctgtgcaggagattgaaatgcattag

SEQ ID NO: 13537 - DNA, 915 bp, Oryza sativa
  Clone ID: TFbOSC400225j.C1.o16.fg
atggacgtacaacttgagtctactgctgttcaacatggacaagctaagataaatgtggaggaacatgctctagtttctctgttgtctgatgagaagtacgcaactgaaaagaccgaagatgtggaccctgatgattatgagaaacttgaggaagggataatgcagtatgggtgtgcacattatcgaagaaggtgccgcattcgagctccatgttgcaacgagatttttgattgtcggcattgccacaatgaaacaaagaattcaattaaaattgatgctgtgaagaggcatgaactcccacgccatgaagtgcagcaggttatatgctcgttgtgtggcacggaacaagaggtacggcaagtatgtatcagttgtggtgtatgcatggggaagtacttctgtgaagtgtgcaagctctttgatgatgatataggaaagcataatgacacttctttctacaatgtcaggtttcaaaacagcaatatcattgcaatggttgtggaatatgcaggatgctgttattctatagtattgaagaacagtcatgcatgtgttgaaggagcgatgcatcatgactgtccaatctgctttgagtacctttttgaatcaaccaatgatgtttccgtcttgccctgtggtcataccattcatgtcaagtgcttgcgagaaatggaggagcactgccacttaaaattgatgctcagatttgcttgcccgctttgctctaaatctgtctgcgacatgtcgaaggcatgggagagattggacgaggaactagcaacgatatctgacacctgtgacaataaaatggtgcgcatattgtgcaacgattgtggggcaacatcagaggtgcagttccatttgattgcgcacaagtgccagaagtgcaagtcctacaacacccgccagatctga

SEQ ID NO: 13538 - DNA, 429 bp, Oryza sativa
  Clone ID: TFbOSC33582j.C1.o2.gm
atggcgctgagaagaaccttgcagcttgagagcttgtacatcgagaaaaacccagcaagtttgcaaggacaagatttggctgcattaggatccttatcgggctcaaacgtcgtcgatgttccgctctccacgtccgcgggaggatccttcgacatagagccgtccggggtcgtaaccacgacgttctcgcttccggtcattgatggaccagccgagatcggcaccgtgaaccttgagcaccaagtccccgtacctagcgcgcaactgtcgacggtggatacccgcagaccggatatagagggtattggggatcaaactaactggcacgccctgaacctgattaatagggcctgcactagagataagtggatctcccaggccttcgtgtgtcgtgatgaatttcatgttaacacctctatgtggcgctga

SEQ ID NO: 13539 - DNA, 741 bp, Oryza sativa
  Clone ID: TFbOSC400800j.C1.o38.gm
atggggcgtcactacgcattcgtcgcccacgtcatcctcctcctctccattgcccacgctgctccgaggccaccactgccgcgcatcgttgccgtgggggcggtgctgtgcacgccagcgcggccgttcgcgtcgtcggtggggaacatcggaggaggcacgtggggctcgacgtacgcgacagcgagggcggtgaaggccgggcatggggcgctcgagtgcgcggtctgcctcgccgagtttgtggacgacggcgagaagctctgcctcctccccgggtgctgccatgtgttccacaccgcctgcatcgacgtgtggctcgccgcgcatgtcacctgccccgtctgtcgtgctgacctcgcggaccgggccgttgctgcagccggccatgtccttgccgctgaccaagctgctccgcaggtcggtgagcatggtcaccacgcccgcgaccgcatcaagcgggcggtgggcttcggcggcatcgcggacaatgtcggtggcgcgtccgagccggagaaggagaacaacatgccaacgccgaggcaggcagagcaggagacgctagagcggtgcgcacgcacaccccgtgcgtcgactccatcttcgctgtgggagctcaccgacgatgccttcagcggcaacgaaagaaagaggaagaagaggatgggagaaagaacaagagatatccacgagaagattcacgttctttggatgtctcacagcaaatgccacaaattttga

SEQ ID NO: 13540 - DNA, 615 bp, Oryza sativa
  Clone ID: TFbOSC401325j.C1.o13.fg
atggagatcggtggcgtgctcgtgtcgctgctcttcgccgccttctccctcccctgcctcctcctcctcctcgtcctcgccgaggccggcctccgcctcgcctccctcgcgctccgcggcggccgctacgcctggcccacccgctccgacttcctcggctaccgcatcgcccgccgccgccgcgccgccgtctccggcggcgccggcggggcggacggcgaggaggaggcgcagccgacggcggagtgctgcgaccgccttgccgtggcgatgtaccggcgcgggcgcgacgcggctcccgtggactgcgtgttctgcctgtcgcgggtggacgacggcgaggaggtccgcgagctccggtgccgccacgtcttccaccgcgcctgcctcgacgcctggctcgtcctcccgcgcgccacctgcccgctctgccgcgactgcctcctcccgccgccgtgcgagccgccgcgcagcttcccgctcgactactacgacgacgacgacgacgtccacttcggcttcaacgacttctccatcacctcctccaccaccaccaccacctccgccgccgccgccgtcgcctacccacacggcgtcgcgctctggcccatgtaa

SEQ ID NO: 13541 - DNA, 579 bp, Oryza sativa
  Clone ID: TFbOSC13655j.C1.o5.fg
atggcgccgcctccgccctcgtccgagctgccgcctccgccgccgacgaacgccgccacctcttcgtcggctatggctgtcccgtacttctgccgcaagcacgtcgctctggccacctcgcgttcctccaccgtatggaccgtcgcaaagcagaccgggctgaggagcgtcaccgtcggctccgacaccgcggtggcctgcgccgtctgcaccgacgacctcccgccggcggcgaccgcgtgccggctaccctgcgggcacctgtaccacgccgactgcttcgtgcagtggctatcgcggcgcaactcctgcccggtctgccgccgccgcgtcccgttgttccccgatcatggcgccgcctacaccgacgaagacgaagacgaagacgaagaagagatcgcgccatcgccgccgccgcctcatggtccggagacgacggcgaccgacgaccaccggccgcggtctctgccgggagcgagctggatcggaagaatctgccgcaggttgcttggctacacggaaacgagccacccgcgtcaactgaaccgatgcagcggcgacacgacgcagcaatggtga

SEQ ID NO: 13542 - DNA, 1731 bp, Oryza sativa
  Clone ID: TFbOSC13655j.C1.o5.gm
gggatcgccggccggtacgtgcggttcgacaagggcagcgacgcgtacgacctccccgacggcgtccgcgtgccgcgctccacgcgcaccctggtgcgcaagctatgcgagctggggtggctgttccgcaaggtgcgggggttcatctccgacaacatcagtcgctctccctccgatgctgccaccgaggtcggcaccgttgctcaggccttctgctccgctctacaggaggagctctctgattactataagctcctcgccgttctcgagtcttactcgctgaatccgattcctacgcctggatctgattcaggggtgtctggtaattacctctctctgcggcgtcttgcagtttggctagctgagcctgcggtgaggatgcgcctaatggcggttttggttgatggatgccggggtttgagaggtggcgcaatggctggtgcgatccatgggcacgcacagcatggggatcccaccttccaggattttatgggccgcttgctgcggcgggtgtgctcaccgctgtttgaaatggtccgaagctgggtgttagaaggggagttggaggatgtgtttgcagaattcttcattgttgggcagccagtcaaggctgagtctctgtggcaggagggctatcttcttcagtctgatatgcttccagctttcatttctccagtactggcgcaaaggattcttagaaccgggaagtcaatcaactttcttaaagtttgctgtgatgataatggttgggcagatgctgctactgaggctgctgtctgtgttggcaccacaactagtcgaggtgggcttggttatgggcagattgatgctttggaggcactagtggttgaagcagccaagaggattgatcggcatttgatggatgtgatccataagcggtatcgattcaaagatcattgtcttgcgattaagaggtatttgcttcttgggcagggtgacttcgtccagtatctgatggatgttgttggccctgagttgtcagagccagcaaataggattagctccttccatttggctgggttgcttgagactgcgatccgagcatctaacgctcaatatgatgaccgtgacatcttggatcgcataaaggtaaagatgatggatcatggagatggtgatcgtggctgggatgtgttttccttggagtatgatgctagggttcctctggatacggtattcacagcttctgtcatgaagaggtacctcaagatttttaacttcctgtggaagcttaagcgtgtagaccattcattgactggaatctggaagacaatgaagcctaactgcattgtttcatctccattttacaaggagggaacaaacatcaggtctcagtttgtttcagttcttcgcaaatgccaagttctatttaatgaaatgaaccactttgtgaccaacttccagtactacattatgtttgaggtcctggaagtttcctgggctcgtttctcagaagaaatggattcagcaaaggatttagatgatcttctgttggcacatgataagtatctcacatcgattgtggagaagtctctccttggtgagagatcacatggaattctgaggaatctttttgcactttttgacatcattttgcaattccggagccatgctgatcggtggtttgagcggatatatgagttgcaactgaggggaaaggtcgtgtttcgtctaacaaatgaagatgtgttcctgatgtggaaaaagtag

SEQ ID NO: 13543 - DNA, 1680 bp, Oryza sativa
  Clone ID: TFbOSC401539j.C1.o2.np
atgagtgctggacttcccgcttggaagatcaaccgaacatttccattaagggtctgttcgctcagaagcactacacttctgaaaagggggaataatagcaaggctgagtacaaccaccgtactcaacaagccacaccaacgatgcagacgtgcaaggggaacacaaggacgaggaaagctacactacaagcccagccgttgcccacgctggcttgtggggcgggccccacacgtcagcggcaaagcccaccgtggaccgagtccacggcggcagccggccacgtgggcgcgcacccgacgctccggatcggccggggccgatcggacggccgggggcggccgagcggcacgaccgggcaggcacgcccacaggcggcggcgaccgccgagcctagaccaccggcgacgacgccggcggcgggcggcgacggcgcgagaggcggcgagagagtggagagggaggctgttctcaccgagcgaatggggcggcgagacgaagacgaggagggcgacggcagaggtgcgactggaggcacaaaagtggctgtggctcgggttcaccgtggagcgggcggctcgggggtggaatggaggagcggcgtggtggccgggcttgccggcggagcagcgaagctagtggtggtggcggcgcggcttgaggtggacgggaacggcggcaagaggctgccgaaggcggcgaaacggcggcggtgctcggaccgaggcgtccaccaccaccaccaccactcgagttcccccacgatccccaacccttcctcctccgattcgccgccggtagctgccagcgtctgctccccggctcgccgcgcgccggccggcgagtgcaccgcgcgcgggcgcttggtcgacgctatctccggagtactccgcggtgacttgtgctgtgctcgatcgcggtcgtcgcttgctgttgatcgaccggtccagatccgcgtcgtttacacggtgcgtggctgttcctcaatctacggatcggacctcggactcatggagaaccgcgtcggtgagtcgtcggcgaccgccgtcgatggcggcggcggcgccaaggactcgggcagcttcgagtgcaacatctgcctggagctagcccaggaccccgtcgtcaccctctgcggccacctcttctgctggccgtgcctctacgagtggctccacgtccacgcgcactcccgcgagtgccccgtctgcaaggccggcctcgaggaggagaagctcgtccccctctacggccgcggcaaggcctccaccgatccccgctccaggtcggtggccggcgtccagatccccagccggccggccgggcagcggccggcgacggcttcccagcctgatcatcaccacgaccatttgccgcaccacgacccgtggttcatgggcggcgccggcgcccctgtggccggcggtcgctgggggaactacactttctcggcggccattggggggcttttcccattgctgagcttccaggttcatgggttcccgcaggcggcggcgtatggacctgccgctgggtttccttacgggtatggacattcgttccatggctggcatggccatggtttcccgcaccaggcaccgcagggccagcatgttgatgtgttcttgaaggtattgcttgttctggttggtgttcttgtgattgccagcttgattgtgttt

SEQ ID NO: 13544 - DNA, 1065 bp, Oryza sativa
  Clone ID: TFbOSC401785j.C1.o9.fg
atggtggctgtgccggtggtggccgacgatggaggcggagggcatggggcgaagggggaggagagtgtgagcgggagcgtcgcgggcatttcgccgagcatcctcatcatcgccgtcatcgtcgtggtgatgctcctcgcctccgtctccatccactacttcatccgccacctgtgccgccgctcgtcggcgtcggcggccgcgtcgtcctccgcgccggtgctccccgtcgtggtgcgccccgcgtcgtcggcggccgtgggggagcaggtggtggggaaggcgtcggcggagcgcgcggcggagatggagcggctcatctcgcggctgccgctgttcacgctggcgtcgtcgctggcggcgctccccaagtcgtcgcgcgactgcgccgtgtgccagagcgcgttccgcgacgacgacgagctccgcctcctcccggcgtgccgccacgcgttccactcccgctgcgtcgacccgtggctccgcgccaacccctcctgcccgctctgccgcgcctccatcgcgctcccgcacccgcccctcccggacctcctccgcgtcgagctcggcagcgtcagcagccgccgctccaaccccaactccgccgccgccgtcgccagcgcgccgcccgagggcgccgccgtccgcgcctacccgctccccaccctccccaactccgagtacctcgtcgaggaggagctcgaggtcgtcatcaagcaacccgccgccgccgctgcgccaagaaccggcgagccaagccagcatccgctgccggcggcgcaggcggagcgtgggcagccgtcgtcggtgaccccgacggcgtcgttcagctcggcgaggtcgcaggagcggtggagcaacaggtggagcagcagatggagcagccggtggagcagcgggcggtggagcagccggtacgacgccggcacggtgacggcggccgccacggcggagtggtggtgggacatggacggcggcgcggcgcccgccgcgcggcggcgcgaggtggaggagcagggcaacgcgttccacggcttcatgcgctggctcacaggggcatactag

SEQ ID NO: 13545 - DNA, 5709 bp, Oryza sativa
  Clone ID: TFbOSC21831j.C1.o4.fg
atggggaagcacaagggccgagctgccagcagcggcttggcggcgtcgctgctgccgcatgcgcagggtgccgtccccatcgttggtttcgggggttaccatggcgcctcccgtgttgagcccgccgcgccttcgtcctcgaccgaccccgatgcctcgattctcctccctcccgatgtggacagtgaggtgctgcagcacctaaggagattaggaaggaaggatccaacaacaaagctcaaggcattatctacgctctctatgctctttgcacaaaaacctggtcaggaagttgtgcaaattgttccacaatgggcattcgagtacaagaggctgctgcttgactataacagagaagttcgtcgtgctactcacgataccatgtctagcctcgtcaaaactgtcaagaagggtcttgctccgcatcttaaggctttgatgggtccttggtggttttctcagtttgaccctgctcttgaggttgcacaggctgctcggcattcgtttgaggctgccttcccacaatcagataaaaggttggatgctttaatgttatgtgtgaaggaaacatttcttcacttgaacgagaatttgaagttaacaacacaagcattgtctgacaaggctacaccaatggatgaactagaagatatgcaccagaggggaggcattgaggcaggtcaggttactggcacagtatgtcacaagtcactgcaacaaccaagtgacgagcacaaacagttattcgttggatgggtaatatcatcatcattgttagcaatggcaactctgattgacattttgctaggtgtaaaattacaaaattgtgtccgtgacaattccagttctgaaaatacgagtctttcaaaagttctatctggcacattgtcttctgctgaatctgcattttctatgaataaatattttcttgatttcctcaagtcaaaaagtgcgattatacggtctgccacatactcactgcttgcaagttatatcaaacatgtttctcatgttttcaatgaagaagccatgaaggtactatctcctgctttacttggtgccttcaatgaaaaggacccatcatgtcactcctctatgtgggatgcatttcttgctttctctagaaggtttccagaggcttggtcatattgcaacattcacaaggttgttttcagccggttttggcactttctacaaaatggatgctatggatccaagcaagcctcataccctctcctggttcagtttttggagtctataccatctaaagctgtaactacagagcaatttgtttttgacttcttacataatctctgggctggaagaaaccagaggcaattatcagctgctgacagtttggcattctttactacctttaaacagagtttcttgtggcttctaaaagttctaccgagacattctggaggaggttcttcggatgatattcctatcaagctcataacttactttcttgcaaaagttgtttggcatgattaccttcgaataccatcttccaaaaaccaggatattagtttgagtggattgtctgatgaagcaatcagtggtgattgtcagttatctcataaggagtcactgttggcatcaagcacacgctacccaacttattatcttcaggatttggggaaatgcatcattgaaatattggatgagatttcagctatggaaaatcatttgttaaatattgcttgtgagactctattgaaggactgtttggatataatccatcaaagggagagtttgccaaattttcagtatcatgtggaacaagttgtgtccttttttatttcgttggatcagctcattgtacagaaaggtaaaacatggccattggaaagcttagcaagaccactgattgaacaatctgtgccagctatcaagtctatgatccagaaggacactccaattgttgttaaacttctatcagttttggttgaaatattcaggcctgtccctttgttcttgaagaattcacagaaagagagtgaggaatctgtccaagatgagtgcttctttgaccagtggtgtacgattattaaatatactagtgctaagcaaaagcaccctgttgataataagaactcacacgttgatgaccaatttgaattgctgacacttatacttcaaaaggtaagagaaagaattgctgggggcaagttgagaaatttgcagaaaaatggctctctaccagaacattggcggcatgacctattagattctgctgcagaatctgtcttctgtgatttgcctgctacagattcccatgtccattatgtatgtgctgcacttggtggctcagatcaagatgaccaaatttgttttctttctgctgatactgtccacaaaatgctcgggtccattttgaagtgtttgacatcagtactcatgacatcaacttttgagtgggcaaggtttgcatatgtggtgttattgcctactgaaccaaaggactcgaaggttataggagcacaatccttttcatcaaacattaagatggctcattttgctttcaaagttcttgagggtagcttatttgccctgagaagactagaggaagattctttatttccttctgttctggcagctctgtttatcattgaatgggaatatagcatggccttaacactcgatgaagaacatgacttgaaaggttataaagaagatattgatgttgggtcttctgcatgcaacagttcagatgatcatttggatgagggaatacatttgaaagctaaccttgcagagagtatacataccttttgccaaagcttaagtccatccttttggagtgatcttcatccattcaccttgaataatttgttaaatattttagctcaatctgtcaggtgtgctttatttcagacactagagttgccaactgagagcacatcagtcttatgctcagagtggatggtgaacatgttgaagctcatctctcttgatcacacaaaattgcagagttttttttatcttcttttatctgagggagaatattggccactctgggtgaaaccatctttacaaaatgagaatgcaccagtgaagatcaaatttgagccagttattacaaatgaaacgggactgaaacaccatcaatttgttgcttttgttgacaagcttgttcttaaccttggctttggtgaagtgatcttaggtgttccaggaaatacatgttacaacacatcacaatcaattgatactacttcaactgttccttcattgtctagagcatgggttgctgctgagattctttgcacttggaaatggaaaggggggagtgtattcagcacattcttgccttctatgattcagcacttgaaaatggaatcatgtgcagaggtcagcatattgtccatattgcttgacacattgttggaaggagcttttcatgagtgtaaccagtgggtactgttcaatgcttggcacatttctgacaatgagattgagaaaattcaagatcattttctacgtgctcttgtggctttgctatttagtatcaatagcatcaatgagtgtatttggagagaatccgaggcacttgtattttttgagaaactactgagcaatctttttattggttccacagtaaatagaaaatgtgtaaagactcttccctttgtcatgagtacaatcatcaaaccgttgtcaggcaaactgaaattaaatgaagcttcttgttacactgatttggtggggcaaaacatactgagttggcttgatgtagccatctcttgcctatcatccagcccgagggaagtacttcaacaagacattgttgattggatgcaagtggtgttgtcttgcttcccgttgaatataacatgtggaacccagaaactagaagttaagattgaacgagagatcagtgatacagaaagatcattattgctgactctttttcagaagtacaagattttctgtgccattgaagctccgtcgctgtccaccagtggaactaccctgtcaacaatggttgaactattgggggtgaaactgatagcagttatggttggctattgctggacagaacttcaggaaaatgatttgcattttgtgtttcatacagtacagaagtggattgaatcagctgttttgcttgtggaagaaatgacagatgccatcaatgatgctgtaataaaccagaaatcaaatgaagatactttggagaagcttaaattagtggttagctctatagatgagttaactttaagcttcggtgaattcgctttggttacactgtgtcacctcaaccatctcgtggatatccaagaaacggagaacttccagagtttgcaaattattaaatcaggggattttgctgatagaaataacaatatgatggaaagtatgcttcgtttgttcttggcttctggtgtttcagaggcaattgcaaagtcttcttgtgaagaggcttcatccatcatagcttccagtcgcgttgcttatatgcatttctgggaacttgtggcatcatttgtcatttatgcttcaccacagactagaagatgtgcactggagtcgatggaactgtgggggctcgcgaagggctcagtcagtgggctatattcaattttgttctcttcacagccaatctctcatctgcagtttgctgcttattctctacttctttctgaacccctctgtcaattttcactaataaaggagtgttctctgggatcaaatagaccactgactcaggaatcttgcatgggacaaagtattgagttgatgccagattcagagaagacactagatctgagagaagaactctcatcgttaattgagatgcctacttctgaacttctccagacagatctgttagcccatgatagggttgatgccttcattgcctggtcattgttgttgtcccacctgcaattactaccaccagcttccattactagggaaaggcatattcctttaaggactggtgcaccttgtggaaagaaaaaagatgctgaactcatgcctgaagcagaagttgctgcgcaagcttctaagaatgccataattacatgttcactgctcccatgcattgaatccctttggccagttgggacatggcaaatggcctcacttgcagggggactgtatgggatgatgattaggctgttgccttcctatgtgcgtacatggtttactagtttaagagatcgttcattgtcatcctcaatcgagtccttcactagagcatggtgcagtcctcctcttctacttgatgaattttctcaggtcaaggactctctgtatgctgatgataatttctcagttagtgttaaccgctcggcgtacgaaattgttgctacatacaagaaggaggagacaggaattgatcttgtcatacgcctcccgagctgttaccctctgcgccatgtggatgttgaatgtaccagaagtttgggcatcagtgaagtgaagtgcagaaaatggttgctttctctcacggcattcgtacgcaaccagaacggcgcaatagcagaggcgatccacacttggaaaagcaattttgacaaggagtttgagggggtggaggaatgcccaatctgttacagcattctgcacacgagcaaccacagccttccccggctggcttgcaagacgtgcaggcataagtttcatggtgcttgcctctacaagtggttctcaacatccaacaaatcaacgtgtcccttgtgccaaactcctttctag

SEQ ID NO: 13546 - DNA, 771 bp, Oryza sativa
  Clone ID: TFbOSC400601j.C1.o18.fg
atgacgatgcgccgcaccggcggcgtcgggtgcaggaacgccaagggagccgacgccgacgccacagcggccggcgaggagtgtggcgaagttgggggcgaggcccatgaggacggagcccgcgaggaagatgcagctgttagctttggaattggaagtttgggacctgtcgccatgtcagatcggggaacgagctcgagcgtctccggtgacacggacgcggactccgtgcccaccgccgacgccgccgccccgctctgggcgccgcacggccgcgcgctcacgggctgcctcgtcgtcgtcaacgtcgcgctcgtcctcctcgtctacctctacttctggagggtgttctcgcgcaagcgcgccgccgctgcagcctccgcgcgcagcgacgacgacgacgacgacgacgaggcgtcgtcctccgcctcggctccgcccccggccgcggcggccgtctctgtgaggacccgggacgacgtgctggcgtcgctgcccgtgttcgtcgtgcgctcgtccggcggggagaaggcggaggcggaggcggagtgcgcggtgtgcatcgcggagctgagggacggcgacgagtgccgcgcgctgccgcggtgcgggcaccggttccacgcgtcgtgcgtcgacgggtggctgcggctgcacaccacctgcccgctctgccgtgccagcgtcgtcgccctcgccgccgccccggagcgcaaaggtggcgtggcggacacgacggcggccgcggaggatgtggatgcgcgtgtctag

SEQ ID NO: 13547 - DNA, 801 bp, Oryza sativa
  Clone ID: TFbOSC408540j.C1.o1.fg
atgagggggaggcggcggcggggggtggggaggaggtcacgacgagaaggagcggtggtcgcgtcgctgacggtgttcaccatggcgtcggcgctggcggcgctgcccaagagctcccccgactgcgccgtctgcctctcgccgttcgcgcccgaggccgagctgcggctgctcccggcgtgccgccacgcgttccacgcctcctgcgtcgacgcctggctccgcaccaccccgtcctgcccgctctgccgcgccaccgtctcgctcccgcacccgccactcctcaccgccgccgccgccgccgtctccaacgcggtgcaacaggatcccctctactcgcggagcagcaacaactcgaggagcttccgcgtcgagatcagcagcatcagcaaccgccgctcctccgccgcggccgacgaccggcgcacctactcgctcgggtccttcgactaccgcgtggacgaggaggtggaggccgtcgtgtcccgcatcgcgcgccccgcggcggccaagtcaacgaccggttccgtgacgccggcccccggcgaggcgctggcggaggcggcggggtcgcggggatggctgcgcgagtacgtggaccgcctcgcctcctccgcctcgtccctctccggccggtggagcgggcggtggagcgcgcggtggagccagagccaccacagcaaccggcaggaggactcgtggcggtgggacccggaggcggcggtgatgtcggcgccgcgcggggtggacgacgacgagccgggcttcgtcacgctgtaccgttggatcgtaggcgtatag

SEQ ID NO: 13548 - DNA, 1122 bp, Oryza sativa
  Clone ID: TFbOSC408596j.C1.o11.fg
atggcctccctgccgccgcccgcgccgccggccatcggcggcgacccgctcgccgccaccattccgccctcattgccgtcgccggcgccgtcgtcgtcttcgctcaacctctccccgtcgcttctcatcatcaccgcgctcctcgccttcgtcttcttcgcctccgtgtcgatccacttcctcctccgctgcctcgcgcggccgtcgcacccggctccgagcccgctgcccagggcgtcggcggcggcccaacgcgcgacgacggcgtccgccgtcgaggctggggaggctaccgccgcgtcggcggtggggaggagccatgagggggaggcggcggcggggggtggggaggaggtcgacgacgagaaggagcggctgatcgcgtcgctgccgctgttcaccatggcgtcggcgctggcggcgctgcccaagagctcccccgactgcgccgtctgcctctcgccgttcgcgcccgaggccgagctgcggctgctcccggcgtgccgccacgcgttccacgcctcctgcgtcgacgcctggctccgcaccaccccgtcctgcccgctctgccgcgccaccgtctcgctcccgcacccgccactccccaccgccgccgccgccgccgcctccaacgcggcgcaacaggatcccctcgactcgcggagcagcaacaactcgaggagcttccgcgtcgagatcggcagcatcagcaaccgccgctcctccgccgcggccgacgaccggcgcacctactcgctcggctccttcgactaccgcgtggacgaggaggtggaggccgtcgtgtcccgcatcgcgcgccccgcggcggccaagtcaacgaccggttccgtgacgccggcccccggcgaggcgctggcggaggcggcggggtcgcggggatggctgcgcgagtacgtggaccgcctcgcctcctccgcctcgtccctctccggccggtggagcgggcggtggagcgcgcggtggagccagagccaccacagcaaccggcaggaggactcgtggcggtgggacccggaggcggcggtgatgtcggcgccgcgcggggtggacgacgacgagccgggcttcgtcacgctgtaccgttggatcgtaggcgtatag

SEQ ID NO: 13549 - DNA, 336 bp, Oryza sativa
  Clone ID: TFbOSC402928j.C1.o3.gm
atggcgaccacaggacgattgctgctgccccacgacatcaacggtcgcttcggctccgtcccggcgtgcagcgaggccatcgccgccttggaggagacgtcggccggcgaggcgaaggagaaggactgctccgtgtgcctggaggccttcgaggaggagagcgacaagctgatgaggaagatgccgtgctgccatgccttccatgagagctgcatcttcgagtggctgcaggtcagccgcctctgcccgctctgccgcttcgcgctgcccacccaggcggaggcggaggcgggactgtggccattgctcacgcctggttctggttcggggacatga

SEQ ID NO: 13550 - DNA, 2154 bp, Oryza sativa
  Clone ID: TFbOSC34790j.C1.o7.fg
atggcgtttgggagagagaaggggatacaaggcaacacgatgagagaaagccgggcaatagaagggcctcatgttctcagacagaccttgtcaaatggttgcaactgttccacaaaacttttcatggcagtgaaggaagctgggggtccaaatgctaaagctggttgttccattgttgtccttgagaagcaatcatggcgaaaggaagaaaaagaaatggaaacccgcggcgtgagaaagcggcagctgcgccgaaccttccacggcggcggggggcgtttaacacgtggcgccgacgtggacgagtcccacgccgcgcacgaatctcgacgcggcgccaacggccggatctgccttcgtgggggtggacacgtgcgggggatcagcgcgccacgtgtgaagacggggctccgttacgtggaagattctggtagatcaatatcaacaactggttttcttagaagaggctctagtgtctccttaaaagatcaaggcaatgaggagaggccaaacaagacaaaactcaacccaatgaatgccaggtgggctgacagtaaggagaagccaagatatttacgtgagccatttcgttcatcaggcactaaggctgcatgtccaagctcttcaaaagctcccgtcagaaaatatttcgaggaaaaacaaggacggacatttttaggagaggcagataatgcagaaagtagtagcagaagaactgaggccaaccgtctgcagtgtagcaagaaagctgttgttgaggaggatgtgcatccatatggtcagcaggatgagccagaagatttgttgtccacatcaactactgaagatcagcctgcagaacttgatcctgaactattagattcttctgtttcttcaggggtgtctgcacatgcaattggttctgtagtcagaaatgctgctttgagatctaaatcacgtcagcagaagggtaaagaagaattgtgtcagattagacctcaaactgcttctgcttttgttaatcggtccactatacctcgaaattctaccaatggtgtgaaatcatcaaatgctgctggccctggggtacagagacgtactctaaaaaaccttggctgcacatcaatatctgatgttttgccttctggctgttcttcagctaattctattcataataagagggctgaggttatgagaaacagggcatttgacggagagagttcttctagaccaaggggcttaaatggacactctagtttaggccattcacctgccatgtattctggtatcactggtcctagagtcagaactgctgaacaatcagcttctcagcaaacacggactagtagcagaagtattcaggagtctgcagattcttcaaggattaggcgaccttctactcagcatgccagagtaagggtgccaaatgaaagggaggatagcgtgtttgctcttcgtgaaactcttgcaagggatcgccaaccagaatgggctcatttctccttgggtgaagctgccccacggagatcgatgaggcctttttctatggaattaccacatgagatatactcatctagtcgtcaaggctcaagtaatcagacagcaaggagcagatcaagttaccgccctgacgaaagccctccacaaatgtttcatggtttgctggtggagagagagaactacaggcgtataaacatggaaggcatcgctgaggtgttgctagcattggacaggattgaacaagatgatgaattgacttatgagcaattgctggtgctagaaactaacttgtttcttagcggccttggcctgcatgaccagcacagagatatgagaatggatattgacaacatgtcttatgaggaactattagcactagaggagcgaatcggttctgtcagcactgccctatctgatgagcagcttgtgaagtgtctcaagcgaaatgtgtataagttaccaaattcagatcttgaagcgaacagagctgtactagatgacgccaagtgcagcatatgtcaggaggaatacattgagggcgaagaagttggtaggatgcagtgtgagcatcaataccatgtgtcctgcattcatgaatggcttagacagaagaactggtgtccaatatgcaaaacttcagcaataccttcagagatggacaaggggggcacatga

SEQ ID NO: 13551 - DNA, 603 bp, Oryza sativa
  Clone ID: TFbOSC900007j.C1.o17.fg
atgtcgacgccgacggtgcagatggtggcgccggcggcggcggtggtggaggacccgagcaagcactggacgcggcacgggccggtgctgacggcgtgcctcgtcgggatcaacctgctcatggtcctcctcgtgttcttctacttctggcggttcttctccgggaagcgtggcccgccgacgtcgtcaacgtcaacgatggccagcggcggcgacgacgacgaggaggagggggcgtcgtcgtcgtcgtcgtcggccgacacgtcgccagggcgccaccaccaggatcgggaggacatcgcgtcgtccctgcccgtgttcgtgtactcctcctccgccgccgcccccgacgtcggcgacgccggggggaacgggaaggcggcggcggcggcggagtgcgcggtgtgcatcgtggagttccgcgacggcgaccgggcgcgcctcctcccccggtgcggccaccggttccacgccgactgcatcggcgcgtggctccagctccactccacctgcccgctctgccgcgccgccgtgctgctccaccccgccgccgccgagccggccaagaacgatcagcccaaggatgacgactgcccggtgtga

SEQ ID NO: 13552 - DNA, 868 bp, Oryza sativa
  Clone ID: TFbOSC900007j.C1.o23.gp
agcaatacactacgaagtgtatctcgaaattaattaaccacaagattaacaggatcatccgtagtaagctagttagcttgaaaaatcaaaacgggctgcagttacaaactgggtaataaggtgatcttgcggtagtgctcttcactcctttcttacatgcattcaactacgagtaattaacctttattacaaagtacatactaattctatccgatatgcatgcatgcagcagatcgatcgatttctatacacaaaactcttatactatatagcagcacacagctccaatcatatacacacacagatgaggacacacaatataatcacacacaatataagcagctagggtaggtaacaacaaattaaagaacaagctggagagaagaagaaaacaaaaacggccgtacgagtggaagcaaaacctcgcgtcttctcaactcataagtcatcaccgacaccaacctttcttgatttcctccatcttggacagcgatgcacgccgaaagatgcttgtcgcgttctcgatcaccccggccggcgtacgatcgattgcgcgctcgaccctccgtctatagctgtgttctcgtctctcccggcgacggcgacggcgaggcgtcacaccgggcagtcgtcatccttgggctgatcgttcttggccggctcggcggcggcggggtggagcagcacggcggcgcggcagagcgggcaggtggagtggagctggagccacgcgccgatgcagtcggcgtggaaccggtggccgcaccgggggaggaggcgcgcccggtcgccgtcgcggaactccacgatgcacaccgcgcactccgccgccgccgccgccttcccgttccccccggcgtcgccgacg

SEQ ID NO: 13553 - DNA, 657 bp, Oryza sativa
  Clone ID: TFbOSC422132j.C1.o3.fg
atggatccgccggctcgcagattgatggattctcgggcggcgcagttggcggcgccacttcctgatccatactcggcagaaacatttgaagacctactccgagaattgggagtcgaccctagtatccacaccatagtccgtagcgccgggagatggatggatccggcagcggcagcagcacgagttccagtgagattccaccgcacgctccaacgcctaggaatcgaccccaatagcgatgcccggagcatccgcgacatgctacaagagttctatcgagtggtgtaccatggagaggtgtactgggctggccgagtcatcaggcctcgtccttcgtccatgccaacgcccgtgataggacgacgtcgccgcgccgccgacggggatgccccgatgcagccgccgagcaagtacgctcgagtacacgccgtgtcgcgcgatgtcctcctgggcctcgcgctgacgaaggcgtgcgacgcgaggcaggaggagtgcgccgtgtgcctcagcgacttcgaggagaaagacaggctgaggacgatgccgtgtaaccactccttccacgagaactgcctcttccgttggctcagggatagctgcctctgccctctctgccgctacgcgctgcccaagcagcagcaggttcaaagctgctga

SEQ ID NO: 13554 - DNA, 450 bp, Oryza sativa
  Clone ID: TFbOSC900071j.C1.o17.gm
atggcgaccaccggacgattgctgctgccccacgacatgtacaggaggctgcaggctcccacggcagcggccgcggcctcgctctttattttggcgccccacctgcacttccagaggcctaacgctgccgctgccgcaccggaagggtacagcaacggtcgcttcggctccgtcccggcgtgcagcgaggccatcgccgccttggaggagacgtcggccggcgaggcgaaggagaaggactgctccgtgtgcctggaggccttcgaggaggagagcgacaagccgatgaggaagatgccgtgctgccatgccttccatgagaactgcatcttcgagtggctgcaggtcagccgcctctgcccgctctgccgcttcgcgctgcccacccaggcggaggcggaggcgggactgtggccattgcccacgcctggttctggttcggggacatga

SEQ ID NO: 13555 - DNA, 1506 bp, Oryza sativa
  Clone ID: TFbOSC400410j.C1.o4.fg
atgagccactacacaatgcatgcgcacatcaactacaccgccctgccgccgacgtcgccgctgcagctcccgcttccgtacctcccgccgcctcctccgccgccgcagccgccattgctgcagctccagccgccgccgccgccgtcgtcgccggtgtcatttgacacggcgttccagagcaggatcagccctagcatcctgctgataatcttgatcttggctgttattttcttcgtctccgggctcctgcatctgctcgtccggttcatcctccgcccggcgccgcgtgacgccggcgacgccgacagcggcgacgcgaacgtgaccgccttccaggggcagctccagcagctgttccacctccacgacgccggcgtggaccagtccttcatcgacacgctgccggtgttcctctacggcgccgtcgtcggcgccggcaggaaggacccgttcgactgcgcggtctgcctctgcgagttcgccgacgacgaccgcctccggctcctccccaagtgcagccacgccttccacgtcgactgcatcgacacgtggctgctgtcgcactccacctgcccgctctgccgccgcagcctcctcgccgacttctccccctacggcggtggctgcagcccgctgctgttcgtgctcgagtccggctcggagggctccatctccgatcgcctcgacgcggcgtcgtcggctcatctcagcctcgtcatggagcaggaggaagaagcagagccggaacagaagcatgcagaggcggcggagaaggcggacgaggtggtcgtctccgtcaagcttggcaagtttcggagtcaggccaccgaagtcgccgccggcggcggctgcggcggcagcagcagcgccaaccccgagcaggacgtgcggcgttgctactccatggggacgtacgagtacgtcatggacgagaggtctctgctccgcgtcgccgtgaagccgccggccaagaagcgccccacgacgcagatgccgggccaccgggtcgccatgtcggagtgcgactgccactccaagcgggagagcttccgcggcctcgacgcgctgcccggcggcaagctcgcgcaggcgcagccgccgaagccgccggccaaggtggggaagaaggagagcttctccttctccaagatatggatgcgcggcgcgccgcggatcaggaaggacggcgcgtcctcccggcgcgcgtcgtcgttccggctctcctccgtgctgcagcgcgcggcgagcgacgtcggggcaacggcggcgccgaagccgctgcgcccggacgtcgtgagccccgtcacggagtcggagtacaacgtgtcggcgtgggacaagagcgagaagagcgcgagcggcagcgtcgcggactgggacctcgagtccgccgccgccacggcggccgtccccggcgcaggcgccggcaacgggctcagctcgagggccgacgaggcgccgtcgttcgcgcggcggacgctgctgtggatccgaggacacctgtga

SEQ ID NO: 13556 - DNA, 1511 bp, Oryza sativa
  Clone ID: TFbOSC401273j.C1.o23.fg
gaatcttagctgattggtgctttggactgcagttaggagctgcaaatgtagtgctgatggggacaaatctgactttgtcgtttgatgatgttgaggcaagttttgctccaggagtgaaaggttcaggttttgaaggcgttgtttatactgctgaacctttggacgcctgcagtccgttaacaagtaaagcagaaaagggtccaccatctccatttgcactgatcataagaggcgggtgcacatttgatgaaaaagtaaaaaatgcacaggatgctggattcaaagctgcaatagtatacgacaatgaaaatagcggggttctgatttcaattcatttagcattgtttagactttgggggcatatggttctgcattatctaactttgaagtttacagtggctggaagctcaggtggtattcacatttatgcggtgttcatctcgaaggcctcaggggaggtgttgaagaaattttcaggccatactgatgtagaggtgtggatactacctgcgtttgagaactcagcctggtcaatcatggcaatttcattcatatctctgcttgccatgtctgcggttctagctacttgtttctttgtgagaagacatcatataaggcgggaccggcctagaattccagaagcccgagaattccatggaatgagcagtcaattagtcaaggcaatgccaagccttatcttcacgaaggtgcaagaggacaactgcacatcatcaatgtgtgccatttgcttggaagactacaatgtcggagaaaaattaagagtgttgccttgccgtcacaagttccatgcagcttgtgtggacctttggctcacaacttggagaactttttgccctgtatgcaaacgtgatgcaagtactggaataccagatcctccagcctcagagactacaccattgctttcttctgcagttcgtttgccttctcagtcatcttcgttccggtcaagcgtggcagcatcgcctccaagaccaataagtcgacgaccttcatcacagtccatatctcggatttatgctgcttctggtacccccaactctcctaaccccataaggtctttcacaaactcaactgccatgagcataagtagaagcaatgtggacttatcaaacatgtcttcccgccctcgcgcctcacacctcgcctccgcacattctttggttggcagtcacttgtctccaccaatcaatataaggtacgcatcgccgcatatgtcccactctggctatgcatcacctagtccacatgttagctcatcctatgtctccaactctgggtatggatcttcaagctactatctcggttcatccagccagcatcggtcatacctaaggcgctgtggggaatcagggcctagcttgtctaccatggcccctcagtcgccgcaacagtcccagttaggtcatagtggggcatacggtcttagtctaagcaggagcatcctcaggccagttgtccggcgatccagcctgagactctgtgctgattaa

SEQ ID NO: 13557 - DNA, 3705 bp, Oryza sativa
  Clone ID: TFbOSC400549j.C1.o7.hg
atggaccaccacccgccgccgccgtcgccgccgcgggactccggcggcagcctcgaggtgcgcctcttctacgtccgcctctcgccgcgggggcccaccccaccgccccgcctcgcgctcgcgctgcgcagcagccgcggcggcgacgaggaggaggccccgacgcccctttccctcccgctccgcctcgatcgccgggacccggcctccggcgaggccacctacgtgtccaccgcgtccgcccgcctccccccaccctccgcggccttcgaggtcgccgaccaccgcggcgccgcgctgctccgcggctctcttcggcggtgccctgatgccaagcccgattcctcccccgcctgggcaatcgactgcatccccgccgcgggggcggaggcggagacctccgcgttcgaggtctacgtcgccggatgctgcgccggcgagcccgccgtcctcacgtgcgctcttcggctagccacccccgaagaacagaaagctgccggcgggttggtccgccgccgatcgccgacttcgaacgctgctggtgatgaagatgtcaatggaagtatacagcatccagaaggttggtactccgacgatgatgacgggcaactcacatggttcaatgctggtgttagagttggtgttgggattggcctgggagtttgtgtgggtgttggcgcgagcggcttcttttcccctcctctcccaaatccaaccacaagaagaggaggaggaggccaccgttcgcatccgccggatgccaccgccgccgacgacgacgacgccgccatgaccggcgccgccgcatggccggtctgcaccatctgctacgaggacctccgcccgctctccgaccagcacctccactgcctccccgcctgcggccacgtcttccacgccctctgtttggagcaatggctggagtactgcccgggcgggaagaagaagctcacctgccccatctgcaagcagccatgcggcgccgcccacccaccgacccgcctcttcttccaatccaccggcgcgtgccccacgcagaccgcctcctcctccccctcgcggcacgagcccaccgatggcggcgccgaccgggatgagctcgccgccgaggtcgcgcggctggagcaaaaggccgcctccctcggcagggtgctcgacgagcagcgcgacgggatccagaagctcaacgccgaggcgagcgctgctgctggccccccgaatttgggtggatcttgtgttgctatgtggagggagaaggcggccgaggcggaggtgatgaaggaatcggtcaggagggagaaagaatgtgttcagcatctgctcaatgcgaaaacagaggaattgtcaaggaagtcatcagaatgtggcaggttgcaggagaagggcctctcattggcgaaggaacttgcagcattgaagctgtcgacagatatgaaccttcaggaggaagagatccttaagttggcatcacttggtaaccatggaaatgctgcgaatgcggttgatgttttgacgagatctcttgctcttcggaacaagagctacaaagaattgatgatccaatgcaatgttctgggaagatcagaatctcgttcccagcagaggtttgagaaggcaaaagaactcattaagaagttaaaggcaagagtacaagaccttgagaaggaacaagaagaaaaagaaaatggtgtgattagggacctgaggtctgcaaagaaatttaaagctgaccagacaaattcaggaaataccacagttaataatggtttctcgggtcttgctgctggatgtggagattatccgatgaagctcgatgaagtggtgcaggatccatgcgacaagcctgggccatcacctgaagctaaaaatgacctgaatataaaagacaaaatggacgacaagcatgcggatgtgattgacttagatgctgatgattctgtcttccaacatgaacacaagaaaggactttctgccaaaccatttgggaacgatgctactagaatggctcctggcactggaccccagcaggttcacaatttcaattctctttcagatgacttccaaataccaattagaaatcttggtggagagggaacaggaaaaagcgtcggcaaatggtgcaagggcgtagctacccctggatctctcaacacaaatgcaaataaaaggaatctgatcgccgtagggccagacggacgtgggggaaaggatagcaagactcaagcactatggcctaaggcacagaaggttggaagcagagcgattgttccctcccttggagaggtggccgtagctctccggcggaaggcggcggagatggcttccacggccgcggcggcgtcgtcgcaggggtgcatctcgtgggcgctgcggcagcgtgggcttggtggtggtggtgcgcgggctgtcccggtgcttccccgccggagattctgcgtctccgcggcggcgggtgcggggttcgacaacgagaatcgcgagtatgtgatcgtgggtggaggcaacgcggccggttacgcggcgaggacgttcgtcgagcacggcatggctgatggccgcctttgcatcgtctccaaggaggcgtatccgccatatgagcgaccagcactgacaaagggctatcttttccctccagacaagaagcctgctcgtctacctggctttcatacctgtgttggatcaggtgggcagaggcagactgctgaatggtacaaggagaacggcatagaggtattgtatgaggatccagttgtagcgtttgatggcaaaacacataccttaaaaacttcatcagggaaaattctgaagtatgggtcacttattatttctactggctgtgaagcttcaaggttacctgctaagattggaggaaatttgcctggagttcactatatacgtgatgttgctgatgcggattctctagtatcttcattgggaaaagcaaagaaaattgttgttattggtgggggctatattggcatggaggtagcagcagcagcttgtggctggaatctcgacacaactattatattcccagaggaccacattatgccaagactctttacaccttcccttgctaagaagtatgaggaactgtatcagcaaaatggtgtcaaattcattaagggagctcttattgataaacttgaagctggctctgatggtagggtgtcatctgcagtacttgaagatggatctgtagttgaagctgatacagttattgttggtataggagcaagaccagttattggcccatttgaagctgttggggtcaacactaaagttggtggaatagaggttgattccttgtttagaactagtatacctggtatctttgctattggagatgtagcagcttttcccctcaagatgtatgatagaatgactcgagttgagcatgtggatcatgctcggaagtctgcacaccactgtgttgaagcactcctaacatcacacacaaagccgtatgactaccttccatatttctattcaagagtttttgagtacgaaggaagttcaaggaaaatttggtggcaattttacggtgataatgttggcgaaacaattgaagtgggaagctttgaaccaaagattgctaccttctggattgactctgatagtcgactgaagggtgttttccttgagagtggtagctcagagacaaagctaagctcaaaagtgcaacctctgtcgaggatgccttag

SEQ ID NO: 13558 - DNA, 920 bp, Oryza sativa
  Clone ID: TFbOSC401172j.C1.o1.gm
atgaacggctttgctccgaccggctaccagcagccgccgccgccgcctgcggccagcgcttcgccgggcggatggatcgcgtcgacggccatcttcatgtccatcttcttctccaccttcctcctcgccatggcggtctccgtctactgctgcctcctgtgcagagaccgcgtccgctcggacgacgacgacaccggcgccgccgccgagcgcgcgcgtggcggcggtaccattgccccgttccccgtcgaggccctccccccggcctacgcttatgtagttggaagctccgaggatggtggcgcgacggcggcgagcgggggcggcgggcgggagtgcgcggtgtgcctgggagcggtgcgggagggggagatggtgcggcggctgccggcgtgcgagcacgtgtaccacgccgactgcatcgaccggtggctcgccgctcaccggacgtgcccgctgtgccggcgtgagcttgacccgggcaagaatccgcctgatcagttgccgcgtgcccatcctccatcgccggcgacaaggagggcagaggtcgacgaggaggtgggtcgccgccatcgagcccggccaccgaaagtcctcgtcactgagccgcccctcctccttgtcactgagccgcgccgctgccgctcgtcttcctcggcaacgagccatccaccggccccacaagacccaccgtctcgcgagtccgccctccgcgtgcctagccggcggatccgccgtctgcaggccttgccgttgtcggttccgccgtcagcacgcctcgttgccaccggatccgccgcctcgcgagtcaccgaagctccgcccgtcgaccaagccaccgcgcgccacgagcttcatcgtcgtagctcccgaggcccggcaggcggccggatggagagatggagaaaggaaggagaatg

SEQ ID NO: 13559 - DNA, 573 bp, Oryza sativa
  Clone ID: TFbOSC406124j.C1.o3.fg
atgaccggcgccggcgtcgagacatgctgcggcggcggcgggcaggcggcggcggcgtcggcgtccggcccgccgccgcgcgggttgatcgttgtgtcggccgtgttcctgtccatcttcctcgccacgttcctcaccctcatgtcgctcgccttctgctgctgccggagatggagggagcgcgacgcggtctccggctacgtcgacggcgagggcgcggtcgtcgtcgtcgctgctggcgaaagcggcggcggcgagccgttccctgtggaggccctccccccggcctacgcttatgtagttggaagctccgacgacggtggcgcgacggcggcgagcggcgtcgggcgggagtgcgcggtgtgcctgggcgcggtgcgggagggggagatggtgcggcggctgccggcgtgcgagcacgtgtaccacgccgactgcatcgaccggtggctcgccgctcaccggacgtgcccgctgtgccggcgagagcttgacccgggcaagctggcggccggagcaccgccggcgcctgcacagcaacaagttgatccaactgatcagttgccggtttaa

SEQ ID NO: 13560 - DNA, 468 bp, Oryza sativa
  Clone ID: TFbOSC900108j.C1.o16.fg
atggacggcgagatggattggatcgcggcgcgcttcgtcctgtcggcgataatgggggtgcacccgctggtggccgtcgacgacgccggggccgatgacgagcacttcccggtggacgacgccgcagccgtccacggccacgcgtcgccgcctcctgtcgcgctgccggcggcggtgctggcgccggaggaggtggccggcgcggtggtgtgcgcggtgtgcacggaggaggttgcggcgcggcaggccgtggtgcggctgccctgcgcgcactggtaccacgccggttgcatcgggccgtggctgcggatcaggaccaactgcccgacctgccgcgccgagctgccgcgggagcccgccgccgccgactggcgtgtcccgcggcgcccggcggtggcggagacagccggcagccgcctgcggcgggaggcgtcgtatacgatgctcgcaggcacgttgcccagctaa

SEQ ID NO: 13561 - DNA, 720 bp, Oryza sativa
  Clone ID: TFbOSC900112j.C1.o15.fg
atgtgctgtcattcccatcccgatctgaccgggctcctcctcctcgtctcctgctctcttcaccgccgcagaccaggtcagcagttgagcaccatggcaagaaagttgagaggtcaggcggccagcagcggcacccaaaattccaatggactctcaaattccagtctcgagctcccctctgaacaccatttcttggcagcgcgcacaggcatgaacggctttgctccgaccggctaccagcagccgccgccgccgcctgcggccagcgcttcgccgggcggatggatcgcgtcgacggccatcttcatgtccatcttcttctccaccttcctcctcgccatggcggtctccgtctactgctgcctcctgtgcagagaccgagtccgctcggaccgcgacgacaccggcgccgtcgccgagcgcgcacgtggcggcggtatcgtcgccccgctccccgtcgaggccctccccccggcctacccttatgtagttggaagctccgaggatggtggcgcgacggcggcgagcggcggcgggcgggagtgcgcggtgtgcctgggcgcggtgcgggagggggagatggtgcggcggctgccggcgtgcgagcacgtgtaccacgccgactgcatcgaccggtggctcgccgcgcaccggacgtgcccgctgtgccggcgagagcttgatccgggcaagaatccgcctgatcagttgccggtttaa

SEQ ID NO: 13562 - DNA, 2103 bp, Oryza sativa
  Clone ID: TFbOSC400934j.C1.o47.np
atggcagagcacttagcttcaatatttggtacagagaaagataaggtcaactgcccattttacttcaagattggggcttgccgtcatggggatcggtgctcttgtcttcataacaggcccaccatatcaccaactgttgtgtttgcgaacatgtatcagcgccctgatatgatcacgcccggggttgatgctcaaggccagccgatagatccccgccagatgcaggagcattttgaggatttctatgaggacatctttgaggaactaagcaagtttggtgagattgagaacctcaacgtctgcgataaccttgcggatcacatgataggcaatgtttatgtccagttcagggaggaagatcaggcagctgcagctcatactgctctccagggccgcttctactctgggcgcccgataattgttgacttttctcctgtgaccgacttccgtgaagcgacctgcaggcagtatgaggagaatagctgcaaccgtgaaagccacaacgaggcaggagccgcagcccaagcccaagcccacgccataggagggagcgacatgatcgtgatgactatcgaggacgtgacgattactctggtggtggtggaaggaggggtggaagcagcagacatgaaaggcatgatgatggaggaaggcgtaggcacggtggtagccctccaaggcgtgcgaggagtccagtcagggagagcagcgaggagcgcagggccaagatcgaacagtggaatcgtgaaagggacgaaaagcaggggtgaccggctttgtccctcgctcgcgcgcgcgtgcgatcgaacggccatgcgacgactgacgaagcgtcttttgccatcattccgtggcgctggtcgagcatgccaccggcggatggcgcgctaccgtcaagccgggacggggacccccgggggggggggggggttccttttaatctgcagcaccggggatgcactttttgatgagaccgaatttacttttggaaaagtcgaaatattcaatactatgcatagttgctttaaatttagtaatgatctgggaaaccaattaaaaacaatatttttcaagaaagaaaataaaggtgggatgcaaggaaaatccaaaagtatgtacaacccctgcatgtcgacaacatctatgaaccaatatgtttctcacactcagagcttcggattgccatcaaaccaagttgttctaggaagcatggatgaagaatcagcacagcatggtaattatgcatttccaactagtcacatcagccagtgctttcaacctactagcaatacatggatttcccagtctgcaaatggtattgctgatggaataccacagtgggaatatgtcaatggaatgaataatgctccaggtatgacagaaacagtgaatggaagcttccgtgaatatcagaatggcccttcaaccttatgtcgagggcctttaccctattttcatcagcatgctggcatgcatgctcataatctgcttgatcatacacaagtgcaagctccttaccaacaatgccacaataatcctgtcttacatggtgtaaatcattctggcaaccggttccatttgggtccaaggattccagttcttttctctaattctgaacgtacttttgggcctccacatcatccactcttggcaaatccagtgaaccacagaaatatacgaatcctgccacctgagcatgctacaataatggatttttcaagattgtatgaagtgtcaaatgttgtagatgagcatagagatatgcggctagatatagacagcatgacatatgaggagcttttagcattagaagagcagattggagatgtaaatactggtctggcaaaaagctacattgtagagaaattgaagactagcttatttgtgccaggatcatcctgcatgtctaataagtcttctgaatcttccatggagaatgatgcttgcataatatgccaggaagagtatcaggttaaagaatgcattggaacccttgactgtggccacaggtaccacgaagattgcataaaacaatggttgatggtaaagaatttatgccccatctgcaagacgacagctttgtcaaccggaagaagaagtgga

SEQ ID NO: 13563 - DNA, 564 bp, Oryza sativa
  Clone ID: TFbOSC415400j.C1.o1.fg
atggtctgtaagaatggtagttacctttgcaacgtgatatcaacaaccactggtcaccctgtgttctacttagcaagtccatgtggaagactggtgctaatgaagcttttgttggttgacttatccttttcttcccagttggcatcatactttgtcataatatgtgttatagtagctgtgttttattgcttcctgaagcaactggcagaattttctgatacagaccatcaaacagttcgggatcaagatgcaaggaacaatgaaacagaaccaattctaccaagaaaaagggtggttttcagctatggagcgacggaagagcagcctgagtcgagcatgtgctcttcagaagatatgtgcagtgagaatgtctgcaagatctgctatgatgctccacggagttgcttcttcataccctgtggccatggttttgcatgttttacatgtgcaaggaggatcgcggaagacaaaaatcaggcatgcccaatttgccgaaggctgatccacagagtaaggaggctggtggagcccttaggttcgtcttgtggtaaagactttcagtag

SEQ ID NO: 13564 - DNA, 780 bp, Oryza sativa
  Clone ID: TFbOSC407922j.C1.o16.np
tactacgcgcacggcgtcatgcaggcggcggcggacaccaaggacctcctcctcgccatccccaagctggagtccgccgaatcatcagccacctccctttcagagttcatttgatgaaccaccggaggtaattccagtggtcagtagcctgaactttcaataccagcatccaatgaatgtcgttcctggcattccacagatgtcacaccggttcactggtccaggggcctcatcatcaagaagccatcagcacccacgcctaaggtccggttttctgttagaacgacaaggtgatggtgtttggggtgttccgttgtcaactaggagcagggaaggaagaagattaattgagagatccggaacgcgcttgaaatgattcacagaggggaaaatgtaagatttgaggtatatctgttcttgctacagtccattttctatggtggagtcgacattcatgacagacacagggatatgcgccttgacatagacaacatgtcttatgaggagctattggcactggaagaaagaataggcaatgttagcactggcctcagtgaggaagaagtgacaaagctcctaaagcaaaggaaattctcatcatggaggttggaagcatctgtggaagaagagccatgctgtatctgccaggaagagtatgttgatggggatgatctcgggacactggactgtggacatgacttccatgttggatgcgtcaggcaatggctggttgtgaagaacacctgtcccatatgcaaaaatactgctctgaagtcttag

SEQ ID NO: 13565 - DNA, 387 bp, Oryza sativa
  Clone ID: TFbOSC900212j.C1.o6.fg
atgctgccggtgtccgccgtctcctccggcgccggcgccggcggcggcaaggcggcgctcggggagctggacatctcggcgctgccggtgttcgtgcacgtcgccggctgcgaggcggcggcggcggtggagtgcgcggtgtgcctgggggaggtgagggacggggagaggggccgcctcctgccacggtgcggccaccggttccacgtcgagtgcatcgaccggtggttccgggcgaactcgacgtgcccgttctgccgcgccgccgtcgtcgccggcgagccgggcggcgcggcggcggcggcgggggacaagggcgacgcggtggcggtggcggtggtgggtgtcccggatgttgtggtgcatgtgcaagtggaagaaggctga

SEQ ID NO: 13566 - DNA, 2544 bp, Oryza sativa
  Clone ID: TFbOSC400256j.C1.o9.fg
atggcggcgggcaccgcatcgccaccgccggacgcggagcctcccgagtgcccggtgtgcctctcccccttcgacgccgcctccgccgcgccgcgggtcctcccgtgcggccactccctctgcggcccctgcatcgcctccctcccgccggcctccgcctccgcctccgcctccgccgcctcgctccgctgccctctctgctcccagtgcgtccctttctcccgcgctctcgggccctcctccctccccaaaaacctcgccctcatctccctcctcccctcgcccccaaacccctctcgttctcgcaccgccgccgcggcgccgccgcctcctcatgtcccgctccacgcggaccactcgcgtctcctctcccgcttccgccacgccgtcctcccggagtccgcttcgccgctccactcgcccgctcccgccgcgggcctcgccatcgggtccttcgcttccgacctcggcgccccgtggttctgcccgcgtggccaccccgtaagcctcctcccgatcgaaacccccgccgccgccgccaagcaggagtccccgttgtactaccggcccagccacgcggcgcgggtggccgccgcgatcgatgcgctgagcgccgcggcgagggatgaagtgatcgatttggtggccgtctcgtcgcggttggcgcggcgggtttgcagggtttacggcttctggatgggccccgaggcggctccgctgtggctgctctccgagcggcattcccgcggagtctcctgcttgttggaggagaggagccgacgagaggagacggtggctctgatcagaaatgtcggaatggaggtctgtgaagcgttcatgggattgcacggagaggggctggtactggggtgcatagggctaggatgcttctgcctcgatcgctttggacactgcctgctcgacctgaatcaggttttggccttgtgccacggggttcgggtaggggtttgctcatccaagtctaaggccttcatggctcctgaggtggcagaggtggtgcatgacaagttgcagataaaggatcatgatttcagtggcttgttagggcctagttcagatgcttggttgcttggttgtttattggtggcacttgtaactggggatgagcagcttgcagcaggatggagtactgaggggtcatacgatgattggaagaatgaagtgcttacgaaggttgatgcttcattggttggcacacatatggaaccatggtctgcaaccatagtgtcatgtttgaactatgatccagaaggccgtccagaaattgctgatgtctggaaatgtattaacggctcattgatgaattccgacattgaagctttgattcctaatgttgatcttgcagctcgaaagagttttatgtgtttgctccttggggagttgtcctcaatgtgctctaaccttggtgctgttgagtcagatgatacaatgcatctttctcaggatttggatgacaaacattcaactccagatgatgcaagcagtggtggtattataaacaacgaagaagttggtgcagctggaatggatgggccaaaatgtggactgtacaattcttcaactctgcttgctcaccgtgactgtattacgggattagccattggagtggatatttttaatgttatgcacttaacaagaactgccactcaaggacttcccaataatagatcttcattgactgcaggaggctttttgtttagctcttcttacgacaagacaatcaatgtatggtcactgcaggacttctctcataaacaaagtttgaagggccatgaacacaaaatcacagcaattgttgttgttgacaatgataatcagtcactttgtataagtggagacagtggtagtggaatatttgtctggtgtgttgatccttcactcagtaatgaaccattgaataagtggtatgaaagtaatgattggatttatcgaggtgttcactgtttggctgtttctggaactggttatctttacactggtagtagagacaaatctattaaggcttggtctctagaggattattcactacgctgcacaatgacaggtcacaaatcaactgtttcttgccttgcggttgcctgtggtattctttacagtggaagttgggatggttctattagatcatggtggctcactgatcacagcccgctgtctgtactggaagatggtacaccaggaagcattactcctgtgctgtcaatttcaacagaactcgattttgttgttgcatcatatgaaaatggctgtttgaagatctggaaggatgatgtcctagtaaagtcagagaaacttcaaaacggtgctatatatgctgctaaattgaatgacaagtggctctatgctggtggatgggataaagttgtaaatattcaggagttattggaagatgattcagaggtggaaatcagagatgttgctacctttacttgtgattcaattataacttcaatactgtactgggatggaaggctgatagttggactttctaacagggagattaaggttttctacaaggcatcttaa

SEQ ID NO: 13567 - DNA, 816 bp, Oryza sativa
  Clone ID: TFbOSC400608j.C1.o11.fg
atggcgtcctcgtctctcctcgtccggctcgcctccgacgagatgccccaaaccctagatgcgtcgtcgtcgtcttcgtgctacgacgccttcgtgccggtgttccacccggatccgtcgtcggggttctcggcggcgtcggtggtggcggccgccgaccgcctccgcagccagttcctctccgtggagcccgacctcttccacgacgcgctcgtcgcgccaagccccgaccacctcggcttccccgatgaggaggaggaggaggagatccggtgggattgcctccaattggatgacgacgacgaggaggaggagggggtggcggatctgcggcttgaggcctccaacgcggcggaggaattcgattgggaggaggtggcatcgccctccggcggcgccgggatggatcagccggagcccgagtgggaggtcctcgccgacgtgccgccgccgccgccgccgcccgccgacgagggcttcgtgtacacctccgaccgtgacgtgtacgaggtgctcgtcggggagggtttgttcctgaagagcaagccgcccgcggcgaggtcggccgtcgaggcgctaccgtccgccgtcgtcgccgccggcgaggacggcgaaggggaggagtgcgcggtgtgcagggacggcgtcgccgccggggagcgcgtgaagaggctgccctgctcgcacggttaccacgaggagtgcatcatgccgtggctcgacgtgcgcaactcgtgcccgctctgccgcttcgagctgcccaccgacgacccccagtacgagagctggaaggcctcgcgagctgcggctgcctga

SEQ ID NO: 13568 - DNA, 495 bp, Oryza sativa
  Clone ID: TFbOSC5328j.C1.o2.fg
atggaccccgacgcggcgcttcgcgtggagctcgtcggggtggtggccgtgggggcggtcgtcgtcgtgctcgccgccggcgcgttccccggcggccggtggaggaagagggcagcggcgcgggtggacgacgtggagcgcgcgctcggggccgccacgctcatgacgtacgagcaggcggcggcggcggcggccaagaaggcgtcgtcgtcgtcgcgggcggcggcggcggctgaggagcaaggggaggacaggtgcgcgtactgccagtcggagtacgccggcgccgacgaggtgcgggtggtgcagtgcggccacttcttccacgcgggatgcatcgaccgctggctccgcaagcaccggcggtgcccgctgtgccgcggcgggctgtcgccgttgccgccgcttcccaagcctggctgccgcccaatgccgccgcggacgagccgccccgccgcttcctccgccaccgccaccgcctccgccgccggttaa

SEQ ID NO: 13569 - DNA, 408 bp, Oryza sativa
  Clone ID: TFbOSC8949j.C1.o12.gm
ctgtcatccgacgacgaggaggagatcaaccaccaccccacgcacgccacatctccacccaccaacgcggctgcctcctcctccgcctacaggcgcgctggattggacaatattccccgcctcgactcctcgagccatccagggcctgatttcgtggcggtggacaagctcaggatgatgccctgctgccacaccttccaccagcgctgcatcttcgactggctccggctggcggctgcgatgcatctgctctctctgccgccgccccctctgcccacacagcacaacaggaggatgataagattgggtgcccggagccaggggcggagccagggtcggaatttcttcagccttcagaagtggcttccactgcaacaacagacaaatcacgcgcaggggaattgctaa

SEQ ID NO: 13570 - DNA, 726 bp, Oryza sativa
  Clone ID: TFbOSC419098j.C1.o9.fg
atgggttcagctctttcgggcagcggcagcgggagcttgttggtcctctccgtctccgtcgtcggcatccttttcacctccatcctcctccttgcctactacctcttcctcgcctgctcatggcgccgccgttcccaccaaactgcacgacccacgccgcctcttccttctttcttcttagccgccgatcaaccccgccgcggcctcggcctggaggaggcggccatccgccgcataccaacgctccgctaccagcagcagcagcagcacaacaagcagcagcagtgcggcgtgtgcctgggcgagttccgcgagggggagaggctcaggcggctgcccccctgcctccactccttccacatcgactgcatcgacgcctggctcgccaccgccctcacctgcccgctctgcagggcccatgtcaccgtcgacaccaaccacattgctgctgctaccaccagcacgcggcacgacgacgaccagttgctctccggcgtgcaccagccgatgaggaggtcgttctccctcgactcctgccacctctacctcgccatcattttgcacccgcaccaactctccgactccgacacccgcagccgcagccgcagggaaccaaagcccgccgtcttagagtcagagaggcctagtaggacgctgcgcagatccttcttctccttcagccacactaccacctccccagtcccaactccaatcctccctatctga

SEQ ID NO: 13571 - DNA, 609 bp, Oryza sativa
  Clone ID: TFbOSC401894j.C1.o13.fg
atgctggggtcgggcctgaatctcgtcagcgcggcgctcggcttcggcatgaccgccgcctttgtcgcgttcgtctgcgcgcggttcgtctgctgccgcgcccgccgcgcggacgctagcgcgtcacggccacacccctcgccggtggacttcgacgcggacttcccctcggatttcgatcgcccgatagagcattcccgcagtgggttggaaccattggctgttgctgcaattcctacaatgaagtataactgtgaagctttccattcggaagatgacacccagtgctccatatgtttaagtgaatacaaggagaaggacattctaagaattgtacctatttgtcatcataactttcacctttactgcttagatgcatggttgctgaagcagactacttgcccaatatgccggatctcattgaaagaactgcctgatggaaaatcgaccgtatcctctgctcctaccatgtctcaaccccccaccctccctgagagttctgttaatccaacatctcatttcctcccagttcatcaagaacacagaagccaccaggatggcccagatatgccagaatctgtagaggtggttattgaaatccgacagtga

SEQ ID NO: 13572 - DNA, 348 bp, Oryza sativa
  Clone ID: TFbOSC402429j.C1.o6.fg
atgagctacctcctctcctacatctccaagatgctgtgcatcaagattccgtcggaggcgaggcaagccagcgaggacggcggcagcggtggcctgacggagtgctccgtctgtctctccaggatccgtgtcggcgaggcgacgaggcgtctgccctgccggcatgcgttccaccgggactgcgtcgaccggtggctcctctcatgcaggcggacgtgcccgctttgccgggtttacgtcgtcgtcgacggtaacaagccaggggtggcagcgaagcacaccggcgagccgccgctcgctgaagacatggtgatctggttctctgccatgctcgtccctggattctga

SEQ ID NO: 13573 - DNA, 537 bp, Oryza sativa
  Clone ID: TFbOSC421349j.C1.o1.fg
atgtctgcttcttctcctgttgcctacgacgccaatgtcctcctggccgcggtcaccgcgctctcggcggccatcgcgttcgtcgccgcgctccacctctacgcccggtgtctcctgcggcggcgcgtcgccggcgccggcgccggcgccgccggcaaccctcacgcgctgcgccgcccggtgaccccgggcggcaactacgagctcgaggtgatcagcgtcgcggcgtgcgcgctggagggcggcggcctggacgccaagcagctgggcgcgctgccggtgttcacgtgggggtcttcttctccggcgacggcggcggcggacgccgccgtgcagtgcgcggtgtgcctcggggagatggaggacggcgagctggggaggctgctcccggcgtgccgccacgtgttccacgccgagtgcatcgacacgtggctcgccgtgagctcgacgtgcccggtgtgcagggcggcggtgggggcggcggaggatgatgagccagcggcggctccggtcgctggcgtgtcgccggcgagctag

SEQ ID NO: 13574 - DNA, 1425 bp, Oryza sativa
  Clone ID: TFbOSC401970j.C1.o9.gm
atggacatgttgaaggagataaatatcatggttgaagataacaaaaatgaagatggtgtaagaagctacaagattgaggacccctttgaatggcggaaccggatgagagaaatagactcaaaagaaaaattccaacaggttagagctcttgctaagttcctccaagatctatatgcaatgagccattccataggaatttcatgtggccatgagacttcgagtactcaagaaggcttccctgaggctttgggccgggacttggagactccgggcctatgcaagccaggcttccaagaggctctggaaataacatccatgcacccgagaagggactcgtcggcgtacaccacccgacccccgccgccgccgccgacggcagatggcggtggtaatggagggaggattagccccgcggtgttgttcatcatagtgattcttgcggtcatcttcttcatctccggccttctccacctcctggtgaggctgctgatgaagaagcagcaccgccgtggtggagccgagaatgccgccccgtcgccgcacagccggcatgtcgggcgggacgccgcgatggaccggcagctccagcagctgttccacttgcacgattctgggctcgaccaggcgttcatcgacgcgctgccggtgtttgcctaccgcgacattgttggtggtgacaaggagccgtttgattgtgcagtgtgcttgtgtgagttcgacggtgaggacaggctcaggttgttgccggtgtgtggtcatgccttccatctgcattgtatagatacatggctgctgtccaattcgacgtgcccgctttgccgtggtacgctctatgtccccggattgaccatagagagcctgatgtttgattttgatgagaggttggaggagggccggctgtcggaagaatgcgaggatggattccaatcttccagacagaagaagcccatggatgaggaacaaacagtaactgagaagagagtttttcctgtaaggcttgggaagttcaagaatgtcgggaacactggtgtgggtggtgttgacaatggcaatgcagctggtatagtgagtagggaaccaggggagagtagcagtagcagcttggatacgaggaggtgcttctccatgggcacttaccaatatgttcttggggcttctgaacttcgagtggctctccagccaggtcgtaacaaaaatggcgtgggcagcaggttgaagggaagagctactggcataagctctgtcaatgctgaaattatggagggcaagaggatttgtgcaaagagtaaaggtgagagcttctccatgtcgaagatttggcagtggtctaatgtgaagggcaagctgccagctgtgctggttgttgaatttcttaactatagctattcttttggtctaatttcacatgtgtatgtttttcactag

SEQ ID NO: 13575 - DNA, 633 bp, Oryza sativa
  Clone ID: TFbOSC24818j.C1.o1.gp
tgaacttgtaaccctgaaagtgaaactactcgtatgatcgttattgctctcgccaataaacaaactcgaatcatcctactaagctacgtttgtccacagctagcaaaattgagctaaacacctactaagtaccctattacagctgatgagtactcgtagcaaaatcaaatcgcaggaagcacgcgggactcgccggcgacggacaggaagccaatgtcgccgccgccgccgccgtgcctctcgacgctctcgccgtcgccgcagtaatcctccttggcgtcgtcgtccgggccctcgacgcgcgcgacgacgggtgcgcggcagacggggcaggtgggcgcgcgcgtgagcagccaccggtcgacgcactccctgtggaacccatgcccgcacgccggcagcacgcgcacctcgtccccggcggcgtactccgccaggcacaccgcgcagtcgccgctgccgccctcctcgtcggcgccgccgccgccgccgtcgcggggcggcatctggaccacgtgcaccgggatcccgtcgagcgcgcgcttggtctcctcggacggctcggggcgcaccgacgacgacccgccgtcttctcgccgtcgccgcccgccgccgtcgcagaagcaggcgtag

SEQ ID NO: 13576 - DNA, 567 bp, Oryza sativa
  Clone ID: TFbOSC900356j.C1.o14.fg
atggaccgcgcgcagcgggcgcacatggtgcgggcgctgggggtgaccaccacggtgctcttcgtcgccagcgtctcctacatcgcgctcaccgcgctctacgcctgcttctgcgacggcggcgggcggcgacggcgagaagacggcgggtcgtcgtcggtgcgccccgagccgtccgaggagaccaagcgcgcgctcgacgggatcccggtgcacgtggtccagatgccgccccgcgacggcggcggcggcggcgccgacgaggagggcggcagcggcgactgcgcggtgtgcctggcggagtacgccgccggggacgaggtgcgcgtgctgccggcgtgcgggcatgggttccacagggagtgcgtcgaccggtggctgctcacgcgcgcgcccacctgccccgtctgccgcgcacccgtcgtcgcgcgcgtcgagggcccggacgacgacgccaaggaggattactgcggcgacggcgagagcgtcgagaggcacggcggcggcggcggcgacattggcttcctgtccgtcgccggcgagtcccgcgtgcttcctgcgatttga

SEQ ID NO: 13577 - DNA, 984 bp, Oryza sativa
  Clone ID: TFbOSC401948j.C1.o36.fg
atggccggcgaccgccgcggcggcggcggcgtcgtctcggccgacggggagcgacggcgggggatccggcgcctgctgctgccccgcggcgaggggtcgtcgtcgtcctcgccgccgcagccgccgccgctgcaggcggaggaggggaggcggaaggggttcgcgtcggcggcgctgcgcgggctgggttgcacgtcggccgcggcctcgcaggcgtacgcgcccggggccggggcggccgcggcggcggccgtgcggtcgtcggcggactggcacgggcggaggcggaggagggggaaggagaagaggaaggagaggggaggaggaggagggggcggtggaggcggccacctcgtgggtggagggatcggcgccgacgtgtggtgcgcgcctgggataccgttcgccgcggaggcgtcgtccgtggactgcgtggtggcgcggcaccagatggtggggagaggccgtggcggcgacgcggagaggccgcacagagagagaccgtgcctgtccaggagggtgaccgtgcaggagcagatatcgtcgtcgttcatggactcgccgccgccgccgcacctcgacgtcgcgcccttcttcggcgccgacctcctcccctccggccgcctccgccggatgcgcgggtaccgccactcccccgtcggcctcgaggaagagatcatgatgtttcagacaagagttctgttgggaggaatgagcatgtatgatcggtaccaggattggcgccttgatgttgataacatgacatacgaggagttgcttgagcttggagataaaataggttatgtcaacactggattgcgtgaggatgagatagttcgcaaccttaggaaggaagagtttgaagccaatgaagagatggggaggctggattgcggccacagctaccatgtttactgcattaagcaatggctttctcagaagaacgtttgcccagtttgcaagactgccgttaccaagacttga

SEQ ID NO: 13578 - DNA, 594 bp, Oryza sativa
  Clone ID: TFbOSC412775j.C1.o23.fg
atgctcgcctccgccgccgagttcacggacaacccggcggcgacagccacggtggcggcgcgacacggcgtcgacggcggcggcagcagggtggtcgtgccgctgttcctggtcaccgtgtccctgttcttcgtcacgtaccagctcttcggcgtggccgcggcggccggcgccatggtgctcgacgtctgcgccgtcgccctcgccgcgctcaatgtcacggtcacccgcgcgcgccgcttccccttcctgcgcctgtcgctcggcggggaggaaggccatggtggtggtggtggcgccggcggtggtgacgtggcgccggcggcggccgggatggacgcggcggcgatcatggcgctcccggcggccttcgggtacaagcgggagcagacggcggcggcggcggggggatgggcgcagtgctcgatatgcctcggcctggcgcgcgtcggcgaggccgtgcggcggctgccgtcgtgcgggcacctgttccacgccggctgcgtcgacgagtggctgcgcgcgcacgcgacgtgcccgctgtgccgcgccgccgtgtgcgccgccgggccggagccggagctgcccgtgtga

SEQ ID NO: 13579 - DNA, 858 bp, Oryza sativa
  Clone ID: TFbOSC401064j.C1.o6.gm
atgtcctcctcatcctcttcgctgctctcctcgctcgccacgctcggcctcgggtactcgatcgccatcgcgctgggattcctcgtcctgctcgcgtcgctcctcctcgcgtcatacttctgcttccgccgcgggggcggcggcgggcacttctccggcgtgctcaccccgagctccagctccagccacctctccatcaccgtcccgcgcgtgctcttcgtcgcggaggggtccgagtcccccgacgcctactcctcgggcgtcgcggccgcgtcgtcccccgtggggctcgaccccgcggccatcgcgtcgtacccgaaggtccccttctacagcggcgccggcgcggacgccgacgccatgtgctcgatctgcctcagcgagtacgcggacggggagatgctgcgcgtgatgcccgactgcaggcacaggttccacgtctgctgcctcgacgcctggctgcgccggaacgcgtcgtgccccgtgtgcaggtcctcgcccatccccacgccggtggccacgccgctggcgacgccgctgtcggagctcgtcccgctctcgcagtacgccgccgatcggaggcgcagcagggggttgtgcttaggttatttagagaagttcgggaggtgcaaaaccactactcgggaccacgcattgggggagaaccgtagcctcgtgacgtgcttagggaaaaggagaggtcaaggagaacttgctgtggtgatcgtcgccgccaccgaggtcgcgttgccgctccatgtcgccgatgaggtcgtgtcgccgctccaagtcgccaccgctaagatccgccgctgccagtggcccctcgactgtcgcgagaagggggcgggagggtag

SEQ ID NO: 13580 - DNA, 1713 bp, Oryza sativa
  Clone ID: TFbOSC14624j.C1.o1.fg
atggccatgggtggcatccggtgtcccgtctgcttcgccgccatggccgccggccaagccatcttcaccgccgagtgctcccacaccttccacctccgctgcgtccccggcggcgccgccgcctgccccgtctgcgccacgccatggcgcgacgccccgtcgccgctcacgacctcctccatccccgccgcgtacgacgacgacgacccggtggagccggtggcgacggcggcgcgcaacagcagcggcggcggcggcggcgtgctggtgctcaagacgcactgcgagtacccggcgctctcgcgcggcgccgcgcgcgacggcttcgccgtgctggtgcacgccaaggcgcccgcggcggcggccgaggcggcggggcgcgcgccgctggacctggtcacggtgctcgacgtcagcacgagcatgaccggggacaagctggcgctggtgaagcgcgccatggggttcgtcatcgacagcctcggcgccgccgaccgcctcagcgtcgtcgccttcgccacgccgacgcgcgccgggtgctccgcggctccgcctgacgcgcatgtcggaggacgggaaggcacggccaagcgcgcggtggacgccctcgtcgcgaacgggaacaccaacatccgcgacggcctcgacgtggacgccaaggtgctcgacggccgccgccacaccgacgccgtcgccagcgtcatcctcctctccgacggccaagacaaccagaccatgggttaccgtggccgcttccacatgacggatttcaaggcagcggcgaccagctacgacgtcctcgtgccgccgtctttcacgcgcgccggcggcggcgagcggtgcgcgccggtgcacgcgttcgggttcggcaccgaccacgacgcggcggccatgcacagcatctcggagatcacgggtggcaccttctccttcatcgagaacctcgccgtcatccaggacacgttcgcgcggtgcatcggcgggctcctctccgtcgccgcgcagaatgcgcgcatctccgtcgagtgcctggaccccggcgtgcgcgtccgggcggtcaagtccggccgctacgagagccgcatcgacgcggagggccgcgccgccacggtggacgtcggcgagctctacgccgacgaggagcgccgcttcctgctcctccttgacgtgcctcgagccgacggcgacgccgccgtcgccacgcgcctcgccagcgtgcgctgcacgtaccgggacacggcgacggagcagtcggtggacgtggccggcgaggaagacgccgtggtcctccgccccgccgtcgcgacgggcgtggcgccgtccatggaggttgagcttgagcgcgagcgcgtccgcctcgaggcggcggacgacatcgcgctggcgcgcgcggcggccgagcggggcgcctacggcgaggcggcaaggatcctcgacgcgaggcgggaggcgctgagcaggtcggcgccggcggcgtccggcgacgccatgtgcgcggcgctggtggcggagctgcgggagctgagcgagcgcgtggcggacgagcgggagtacgcgcagacggggcgcgcgtgcgtgctcgccggcatgagctcgcacgggcagcagcgcgcctcgtcggtgcagctaggggagctccgtgtacgggtgttcgtccgtgttcgcgacaccggagatgcagaggatggagaagctctcggtgattttgcgtga

SEQ ID NO: 13581 - DNA, 1716 bp, Oryza sativa
  Clone ID: TFbOSC900244j.C1.o19.fg
atggccatgggtggcatccggtgtcccgtctgcttcgccgccatggccgccggccaagccatcttcaccgccgagtgctcccacaccttccacctccgctgcgtccccggcggcgccgccgcctgccccgtctgcgccacgccatggcgcgacgccccgtcgccgctcacgacctcctccatccccgccgcgtacgacgacgacgacccggtggagccggtggcgacggcggcgcgcaacagcagcggcggcggcggcggcgtgctggtgctcaagacgcactgcgagtacccggcgctctcgcgcggcgccgcgcgcgacggcttcgccgtgctggtgcacgccaaggcgcccgcggcggcggccgaggcggcggggcgcgcgccgctggacctggtcacggtgctcgacgtcagcacgagcatgaccggggacaagctggcgctggtgaagcgcgccatggggttcgtcatcgacagcctcggcgccgccgacccgcctcagcgtcgtcgccttcgccacgccgacgcgcgccgggtgctcccgcggctccgcctgacgcgcatgtcggaggacgggaaggcgacggccaagcgcgcggtggacgccctcgtcgcgaacgggaacaccaacatccgcgacggcctcgacgtggacgccaaggtgctcgacggccgccgccacaccgacgccgtcgccagcgtcatcctcctctccgacggccaagacaaccagaccatgggttaccgtggccgcttccacatgacggatttcaaggcagcggcgaccagctacgacgtcctcgtgccgccgtctttcacgcgcgccggcggcggcgagcggtgcgcgccggtgcacgcgttcgggttcggcaccgaccacgacgcggcggccatgcacagcatctcggagatcacgggtggcaccttctccttcatcgagaacctcgccgtcatccaggacacgttcgcgcggtgcatcggcgggctcctctccgtcgccgcgcagaatgcgcgcatctccgtcgagtgcctggaccccggcgtgcgcgtccgggcggtcaagtccggccgctacgagagccgcatcgacgcggagggccgcgccgccacggtggacgtcggcgagctctacgccgacgaggagcgccgcttcctgctcctccttgacgtgcctcgagccgacggcgacgccgccgtcgccacgcgcctcgccagcgtgcgctgcacgtaccgggacacggcgacggagcagtcggtggacgtggccggcgaggaagacgccgtggtcctccgccccgccgtcgcgacgggcgtggcgccgtccatggaggttgagcttgagcgcgagcgcgtccgcctcgaggcggcggacgacatcgcgctggcgcgcgcggcggccgagcggggcgcctacggcgaggcggcaaggatcctcgacgcgaggcgggaggcgctgagcaggtcggcgccggcggcgtccggcgacgccatgtgcgcggcgctggtggcggagctgcgggagctgagcgagcgcgtggcggacgagcgggagtacgcgcagacggggcgcgcgtgcgtgctcgccggcatgagctcgcacgggcagcagcgcgcctcgtcggtgcagctaggggagctccgtgtacgggtgttcgtccgtgttcgcgacaccggagatgcagaggatggagaagctctcggtgattttgcgtga

SEQ ID NO: 13582 - DNA, 1269 bp, Oryza sativa
  Clone ID: TFbOSC400993j.C1.o79.np
atggcaaaatgtcaattttctcccatcccgcgagcgattgcggcttcgtcgctcgtcctgccgcttccgccgcatcctggtgagcacatcctccgccaccgctgcctgctccgatccccattcatcgcgcgagcgagtacggcttcgtcgctcgtcctgccgcttccgccgcatcctggtgagcacatcctccgccaccgccgcctgctccgatccccatccatcgcgcgagcgagcgagggtcgccgtcgctcatcctgctgcttccgccgcatcgacaagatgccaaatagagccacgcattggtgttatgcctgccgacgtccaattcgtgttagtggacaagatattacatgccccaactgcaatgatggttttatacaagaaatcagtgagataggtggttcattgaacacttatggtatctttgacccgagctttgatgagcgtcgagatagaagttttggaatggtggaggctatgtctgaccttatgcgacaacggatggcagaaatgggcagaaatcgtgtgttggatttccatggtacgagaggggcaagttcccatcaaggaaggcagccaactgttagaccaatgctcatatttggcagcaatgcacctgatcgtgtaagcagcagtagtgaagaagcagatatactcctcaggcaaggccgcagaattggcgcggaccgtccaaatttcagtcgtttcctagtcggtcccagtcttgaagctctattcgaacagctgctcctgcataataaccgtcaaggaccaccaccagctccacagtctgcaattgactccatgcctgtggtaaagataaacctcaggcaccttagagatgatcctcactgtccagtttgcacagacaaatttgaggttggaacagaggcacgggagatgccatgcaagcatctgtaccatgctgaatgcatcattccctggctggttcagcacaattcttgtccagtttgccgccatccactgccgtcatcttcccaccgttcaggcagcacccgttcatcgtcaacccactctaacgaagctattagccatggggttgccagatctgatgctgatcctgttcctgttgcaagaagcgacgacagcagaaaccatgaaatgcacggttctttctcgtttctctggccatttgattcacctactcctgattccagttcctacacgcacgaaggaggtgttggtgagcctacagttcatgacgatgctggccagatgacctattctgagtggcattacgactac

SEQ ID NO: 13583 - DNA, 489 bp, Oryza sativa
  Clone ID: TFbOSC416737j.C1.o15.fg
atgagctttccgctggtgtgcttctgccgccagatcccgcggcccatcgtcgcgctgttcaagctgctccaggccgtggcgctggccttcgtgctgatactctgcttcctcggcctctacgagttcccctacaccgtcgaggaccacgcgccgctcatccacggccgccgccgcgatcccctcggcgacgacggcctgcagcccgaggcggtgaagcggggcctcccgctggtcgagtacatgcaactcgccgacctgtcggcggattgccacgacggcgagagcggctacccggccacgtgcagggtgtgcctggagaggttggaggcgacggacgaggtgaggcggctgggcaactgcacccacgccttccacatcggctgcatcgaccggtggatcgacctgggagaggtgacgtgcccgctctgtcggtcccacctgctgccacgtcaacgaaggggcctgcttggcagtaggcggttcggctag

SEQ ID NO: 13584 - DNA, 963 bp, Oryza sativa
  Clone ID: TFbOSC900362j.C1.o8.fg
atgtcggcccccgcggcggtggagcagcggctgcaggcgctgcggcagaagctggggaggaagcagcacttcgaggaggccgtcgccgacctcgccgccgcggtccgggaccaccacgccgccgcctcccccgccctccgcgatctgatgtattctacagtttgccgtgtggcaactgtccttcagactagatatacagcacctggattctggcgtgctggtctgaacctcttcttaggtacagagaagctggtaactaatccttcagaaaaggagcaactgaagactttcattctgagggcccgggagcatcttgatgagaaagagaacgaggaatccatgccaaacaacagggaaacagatacaagatttctttttgaagggcatcttacagtgggacctgaacctccacctcctgcctggcttgttgcccagaatttagcacgagaacttagcattttagctgaaccttctggagatcaaggtgcgaacaacaacggagagtccagggctgaggagatggcacctgctgctgctataatgaatttcttaaacaccatgacagtggatggagacctagaagccgctttggaagaatctctgcagaatgtgatggcgaatcctaaggtgcctccagcttcaaaggaagtcgttgcgaatctaccagttgtaaccgtgacagaagaaatcatagctagattgggcaaagagactcagtgtgctgtttgccgggagagcttgctggtggacgacaagatgcaggagctaccgtgcaagcatcttttccaccctccatgcctcaagccatggctggacgagaacaactcctgcccgatctgccggcacgagctgaggacggacgaccatgtgtacgagagccggaaggagcgggagcgagaagaggaggaagacaggaagggcgccgcgaatgctgtcaggggtggggagttcatgtatgtctga

SEQ ID NO: 13585 - DNA, 993 bp, Oryza sativa
  Clone ID: TFbOSC421892j.C1.o4.np
ggggcgccgtgcagtgcaggaagcggtggagcaacctcgccggggactacaagaagatcaaggagtgggagcgcgcggcggcggcggcggcgccgccgcgggagccgtcgttctgggccatgcggaacgacgcgcggcgggagcgccggctcccggggttcttcgaccgggaggtgtacgacatactcggtgactgctagaaagaatcagtctgtaaatgccaattatctgctgaatttccactatgatccaatttctcggccacagcctagaggccccagaacatatcctacaagaagacagaggaagatcagaccatacaacaaagatttgttcctacaagcaaattttaagtttgttgtgttggatactggaagctatgaaatagaattaatggatccagataagatgctccagtgggaagatattgtatgtgtaagatattatagcccttgtgaggtgcaatgccctatttgcttggagagcccattgtgcccacagattacatcatgtggtcatatatattgctttccatgcattttacgttatttacttatgggaaaagaagattacaaaggtgaaagctggaagaagtgcccactgtgtttcatgatgatctcaacaaaggagttgtatacaatctatattactcaagtccagcattttcatgttggtgacaatgtgacatttacacttttgagccgctcaaaaaattcactcactccttctattaagaacctcactgatgaatctactatagacgaagatccttgcagtgcattctccaagttcattttgacgtctgatgtggaactttctgttagagaggcaaaaacagatcttgttaattggttgcatatggcagatttaggccttgtggatgacttggagaaacttccatacgtttctaccgctttggagcagctagaagaacggatgaaatattggagtgagtataaacttttgacttataaactttgggtctctaaactt

SEQ ID NO: 13586 - DNA, 1566 bp, Oryza sativa
  Clone ID: TFbOSC420404j.C1.o5.fg
atgggatctggaagcagcaaggccggcgcctcgtcggcgtcatcttcgtcgtcggcgtcggcgtcggcgtcggcgtccggcggcgacgaggcgagtaaggggaatgggaaggggcagcggagggggagggggagggggagaggcctgctgcagcggctgccgagctcctcctcctcctgcttccgcggccacggcacgccgtcgcgcgacgacgcttcctcggcgtcttcgccaccgccaccgccacggccgccgcggcggccgttcgagtctagcaagggagaggagaatggaagcctgccttcaatcgctcaaatggacaaatcagaagaggatgctcccacaatccctaaatctcatccaggtgaaggggcaacattgccttcatcacatataaacagggatcaggatgttgatgtattgcagaatgccactgccgtcaacaacagggtggaggtcaaccagtcaccaaatcattctgacagttcacggccacgttttggtgtcaacttcgggttgagtagagctgtcagcttgggatcatcggtagcctgctccattctctcatcggacctctccacttcagctaatcctgatggaggccatggaaatgtggacaattcttctgatgcaaacatctcccagcaaggtggtgcatcaactgctgggattgattcgactctggatatgcttagagatagtgtaaccgcacaagctagagcagcccatcaggctaggagaaatttgctagaatccgacaatgctaacttgagatattccaacagaaggatgggacctcaggaaccttttgaaggcagtgttcgattcagccgaacgttgagtgttggacgtcttcgtgacagagttcttaggaggactccattctcagatgggttattcaccccttcacttctttacgatagggcaatatggccatcaggaaatgctagtgccaggcaaaattcagcaatcatgcaaaggactaattcagagagaaattctgaactgcaattggattcttcaaccgactctgcaactctaagagaggccaataatcgggatctactggagcgcagatcagcttttcttgagaggaggaggatacgatctcaggtccgagctctccaaagattgggcagcagaacgagcagtcgaccaggaaattctgatgaagaaacaaacacaagagctagcatatcaagaatcgttatgttagcagaagcactttttgaggttctggatgagatccaccaacagtctgctgccttatcctcaaggccatcgttttcttcaattgggtccgttcctgctccaaaggaggttgtcgagcgtcttcctgtaaaagtatacaggagatcattaaaacaccaaactgaggaggctgcacaatgctacatttgccttgttgaatatgccgagggagactgtgtccgtattcttccatgcaatcatgaatttcatctaacatgcgtagataaatggttgaaagagatacacagggtttgtccactttgtcgtggtgatgtctgcagatccaatgcatcaggcattggaaaaaccacatga

SEQ ID NO: 13587 - DNA, 1062 bp, Oryza sativa
  Clone ID: TFbOSC21192j.C1.o6.fg
atggctcaccgccggatcgcgctcgccgtcctcgtgacgctgctcttgtcggcgttccgcccttgcctggcgcaacagagcaacgacgacacgagcaaacaccaccggagcgccacggccggcgggttcacgccgaccaccgtcgtcgtgctcgtggctctcatcaccgccttcgtcctcctcaccgtgttctccgtcctcatcaaccgctgcgcccaggcgcgcgctcccccgcgccgggcgttccgcagcacggcgtcccatcagcccgtcggcggcgccgccgccgcgtcccgcgcctcgcgtggcctcgacaaggaggtcgtggaggcgttccccacggcggtctacggcgacgtgaaggcgcgcatggcggcgaagtcggggccgctcgagtgcgccgtgtgcctcgccgagttcgcggacagcgacgagctacgggtgctcccggcgtgctgtcacgtgttccacccggactgcatcgacccctggctcgccgccgccgtcacgtgcccgctctgccgcgccaacctcacggcgccaccggtgtcgctcgccgccgccgagagctccgacctgacggcgccggaggaggcggtgcaggaggaagagtcggaggagctcgacgaggcgtccctgatggccaccttcacgccggaatccgtcatcgacttcggcgcgacgcacgaccatgaattcgacagagcagggtaccctcactaccggaggacgcagtcggccatggacgccgcgccggaccggcacacgctgaggctaccggagcacgtcatgaaggagctcgccgccgaccgcaggcaccggcgcgccgcgagcctcgccgggtacccggacagcgtggagaggacgccgaggtggctgacgtcgctctggcgatcggtgtcgtggcagaggcagagccgggcggactgggacgccggagaggagcacggcggcagcaaaagggttcacccggtcgccggagctcaggacgagacacccagcgggtccggctccgatgggagcaaggagaactccgattctgacgcgttaaaccgagtttga

SEQ ID NO: 13588 - DNA, 1476 bp, Oryza sativa
  Clone ID: TFbOSC21192j.C1.o6.np
atgggtgacgggcgaggggatgaggaggagtgcagggtggcgctgctgaatggcggcggcgcggcgaaggagggctggcaggtggtgtccggcggcgacggcaagctgaggaggagggtgtgggaggagtcgaggaagctgtgggtcatcgtggcgccggccatcttcagccgcgtcgtcacctacagcatgaacgtcatcacgcaggcgttcgccggccacctcggcgacctcgagctcgccgccatctccatcgccaacaccgtcgtcgtcggcttcaacttcggcctcatgcttggcatggcgagcgcgctggagacgctgtgcgggcaggcgttcggcgcgaagaagtaccacatgatgggggtgtacatgcagcgttcgtggatcgtgctgctggcgtgcgcggtgctgctgctgcccatgtacatctacgccgaggacgtgctgctcctgacgggtcagccgccggagctgtcggcgatggccggccgcgtctccgtctggttcatcccgctgcacctctccttcgccttcctcttcccgctgcagcgattcctgcagtgccagatgaagaacttcgccagcgccgcggcgtccggcgtcgcgctgtgcgtccacgtcgccatcagctggctcctcgtctcccgcttccggttcggcctcgtcggcatcgcgctcaccctcaacttctcgtggtgggccaccgccgccatgctcttcgcctacgtcgcctgcggcggatgcccggagacgtggaacggcctctccctcgaggcgttcgcggggttcgtacgttttttgcagttgctgacagaatttgtgtgcttaatttgcagcttggagaactggtactacagaatcctcatcttgctgaccggtaacctcaagaacgcggctattgcggtcgacgcgctctccatctgcatgacgatcaatgcatgggagctgatgattcccctggcattcttcgctggaaccggggtgcgggtggcgaacgagctgggcgccggcaacgggaagggcgcgaggttcgcgacgatcgtgtcgtcggtgacgtcgctggtgatcgggctcttcttctgggtgctcatcgtgggcctccacgacaagttcgcgctcatcttcacctccagcgacgtcgtgctcgacgccgtcgacaacctctccgtcctcctcgccttcaccatcctcctcaacagcatccagcccgttctctcaggtgtggctgttgggtctgggtggcaatccatggtggcctacgtcaacattggcacctactacctcatcggcatccccatgggcattctcctcggatggctcttcaaacttggcgtcctgggaatttgggcgggtatgatcggcggaaccgcagtgcagacgctaattctggccatcataaccatccgctgtgactgggacaaggaggtgaacaaaacgatcaatccctccacacagcccaagaaaacgatcaaa

SEQ ID NO: 13589 - DNA, 1198 bp, Oryza sativa
  Clone ID: TFbOSC410031j.C1.o6.np
caccgccggatcgcgctcgccgtcctcgtgacgctgctcttgtcggcgttccgcccttgcctggcgcaacagagcaacgacgacacgagcaaacaccaccggagcgccacggccggcgggttcacgccgaccaccgtcgtcgtgctcgtggctctcatcaccgccttcgtcctcctcaccgtgttctccgtcctcatcaaccgctgcgcccaggcgcgcgctcccccgcgccgggcgttccgcagcacggcgtcccatcagcccgtcggcggcgccgccgccgttgtcccgcgcctcgcgtggcctcgacaaggaggtcgtggaggcgttccccacggcggtctacggcgacgtgaaggcgcgcatggcggcgaagtcggggccgctcgagtgcgccgtgtgcctcgccgagttcgcggacagcgacgagctacgggtgctcccggcgtgctgtcacgtgttccacccggactgcatcgacccctggctcgccgccgccgtcacgtgcccgctctgccgcgccaacctcacggcgccaccggtgtcgctcgccgccgccgagagctccgacctgacggcgccggaggaggcggtgcaggaggaagagtcggaggagctcgacgaggcgtccctgatggccaccttcacgccggaatccgtcatcgacttcggcgcgacgcacgaccatgaattcgacagagcagggtaccctcactaccggaggacgcagtcggccatggacgccgcgccggaccggcacacgctgaggctaccggagcacgtcatgaaggagctcgccgccgaccgcaggcaccggcgcgccgcgagcctcgccgggtacccggacagcgtggagaggacgccgaggacgtggacgcacagcgcgacgccggacgccgcggcgctggcgaagttcttcatctggcactgcaggaatcgctgcagcgggaagaggaaggcgaaggagaggtgcagcgggatgaaccagacggagacgcggccggccatcgccgacagctccggcggctgacccgtcaggagcagcacgtcctcggcgtagatgtacatgggcagcagcagcaccgcgcacgccagcagcacgatccacgaacgctgcatgtacacccccatcatgtggtacttcttcgcgccgaacgcctgcccgcacagcgtctccagcgcgctcgccatgccaagc

SEQ ID NO: 13590 - DNA, 783 bp, Oryza sativa
  Clone ID: TFbOSC412577j.C1.o7.fg
atggaggccgtagcagtgcacgccagcttctcgtcctactcccctccggtggtcgccggcggccgcgacgacgccggcagcagcagcagcagcaggagcatgtcccgcctgccggctcgcgtcgccggcgccgtagctcgcggcatcgtcaccttcgtcttcgccacagtgggcacgatcctgggggcgatcaccggcgggctgatcgggctggcgacggagagcggcatggtgcggggcaccgggatcggggccatctccggcgcggtggtcgccatggaggtcgtcgactcctccgtcgccatgtggtgctcccacgactccgggatctggagcgttctctacgtccttgacgtgatctggagcctcctgacggggcggctggtgcgggagaaggtggatccggcggtgcagaacgcggtggacagccagatgaacgccgccgacgcgcccttcagggagagcgcgccgacgctggcggagatgttcgacaccggcatccccggcgtcgccgccgccgccacgggcatgccggcggacgccatcgccgcgctcccggtcaccacgttcgccgccgccgccggcggcgacgaccgcgccggctgctccgtgtgcctccaggacttggaggacggcgagcgggcgcggaggctgccggagtgcggccacacgttccacctccgctgcatcgacagctggctgctcaggcacgcgtcgtgccccctgtgccggcgcacggtggtcgccgccgccgtcgccgtcgacgacgtcgtcgtcggctga

SEQ ID NO: 13591 - DNA, 1176 bp, Oryza sativa
  Clone ID: TFbOSC20834j.C1.o2.fg
atggcggcggcggcgagggaggcggcggagagcccgaaccctaggtcggcgccgcggcgtgcggcggcggcggcggccaaggacgccagcagcttcctcagcccgcgtttccggtcggcggccgcgcaggccgggtgggacgaggagtcgctcctccacgcggcgctcgtcgtcgaggacacccccgtccgcgagtcccgccgcaggaggcgggcctccaccacctcctcctccgccggcggcggcgggagcgccggatctaacactaggaagcggaggtcgtggaggcagccgccgggatcgatcccgccggtggtttttctgctcgacgacgacgagaagaagccggataccacggcagatggcaagaaggaggtgaaggaggaagaaaagaagaccgtcgtcgttggggagaaggaggcctgttccgagaaagcagcggcaaccagcgagctgccctgtatggatcgcctccgggaggagctgtcttgtgctatatgtttggagatctgcttcgagccgagcaccacgccttgcgggcacagcttctgcatgaaatgcttaaaacatgccgcagctaaatgtggaaaaaggtgtcctaagtgccggcaattaatcagcaattcaagatcttgcacagtcaacacagtgctctggaacaccatccagctgctatttcctagtgaaaccgaggcaaggaggacttcaatcgcttcatcctcggaaaccaacgacgacttggcgcaacaaatctctcaaagaagtaacagcatggcacaaggtggcataagaagcagcagttccaatggcatcggctacatcacgcagcgcagcacaagaagcagcgctaccaacaacaggagcttcacaacaacaggcagcagaagaagcaccttcgtcgcacaggagggcagcagcacagcaacagggagaggctttgtccgggcttcgcagctggtccctagtgccagggtcgtctcagtgagatcacaccagtctgatgacgcggcattggcgtacaggctgcagcaggaggagttcatgacggctttcgagagcgagggcgagaggcagccacctcggagcagcagcagcacggtgtccgctgctcgagcgaatctgagagctatggcctcccgggccattcgtctccgagctcgtggctggcctgtctag

SEQ ID NO: 13592 - DNA, 594 bp, Oryza sativa
  Clone ID: TFbOSC900034j.C1.o2.fg
atggaggtggatgcctccgcggtcgcaagagcactaccaagagatttccctcccatcgagaacttgagcttcgaaggcttcccccgttatactttcaagatcggcaaccggatccactgcaccaacttgatgtatcgcccaggtagtcggacgctattaacgcaggaagaagctcatgagatcattcgcgagggcttgaggtctgacattcgtcggggccgcatacaactgaacgccgacttcttgcagcagcttgttgatcaggttcgcgatcatattcttcagcgtcagcgccgtggcactgccactgccatggatggagtagtggaggtggaggatgcgtacaggaacggtgggttcggcgctatccccgcgtcgagcaaggccatggccgagctgcaggaggcgatggcaagcgacgccagggaacgcgggtgcgctgtgtgcctggaggatttcgaggcgggagagaagctgacgaggatgccctgctcgcattgcttccatgcgacctgcatcttggattggctccgcctcagccatcgttgcccgctctgcagattcccgatgccaacccaagaccaatcttactag

SEQ ID NO: 13593 - DNA, 600 bp, Oryza sativa
  Clone ID: TFbOSC900071j.C1.o5.fg
atggaggtggatgcctccgcggtcgcaagagcactaccaagagatttccctcccatcgagaacttgagcttcgaaggcatcccccgttatactttcaagattggcaaccggatccactgcaccaacttgatgtaccgcccaggtagtcggacgctattaacgcaggaagaagctcatgagatcattcgcgagcgcttgaggtctgacattcgtcggggccgcatagaactggacgccgacttcttgcagcagcttgttgatcaggttcgcgatcatattcttcagcgtcagcgccgtggcactgccactgccattgccatggatggagtagtggaggtggaggatgcgtacaggaacggtgggttcggcgctgtccccgcgtcgagcaaggccatggccgagctgcaggaggcgatggcaagcgacgccagggaacgcgggtgcgctgtgtgcctggaggatttcgaggcgggagagaagctgacgaggatgccctgctcgcattgcttccatgcgacctgcatcttggattggctccgcctcagccatcgctgcccgctctgcagattcccgatgccaacccaagaccaatcttactag

SEQ ID NO: 13594 - DNA, 489 bp, Oryza sativa
  Clone ID: TFbOSC401236j.C1.o2.gm
atgatgatgtcttcgtcgtcgtcggcggcggcgggatatgacggcgagctgggtccgtcggcggcggcgcaggccgccggggttcggcggaaggcgctgcgggcgatgccgacgatggtgtactcggcggcgggcgggccgagcccggcgtgcgccatctgcctcgccgacctggagcccggcgagcgcgtgcgcgtgctgcccaagtgcaaccacggcttccacgtccgctgcgtcgaccgctggctcctcgcgcgctccacctgcccgacgtgccggcagccgctgttcgccacgccgccggtccggccgttcctcgcgcctctccggccggaaggcttcgtcacgccaagcaatgtcggtggtggagccgtggtgctcggcacattggccatggtttccgcggtgctggaggaggaggaagatgacgatccctgcagcaccggaggaagacgcagcgccgggagccgggccgagctaaccgtttga

SEQ ID NO: 13595 - DNA, 477 bp, Oryza sativa
  Clone ID: TFbOSC900293j.C1.o4.fg
atggcgttgagtttgggggaggtggctatgctcgtggttgacgtggcgttcgtcctgtgccttatcgtggcgatcatgtgctgctgcgaggacgaccgccgacgacctcggtcatcatctcaacgggacgcccaagtcggaggacgggtggtgatgctgcgggtggtggaggcgcccccgggccagcagcgagtggcgccggcggcagcgaaggcggcgctgccctacttcccgtacgcgcaggcccagggcaggacgtcgtcgtcggagacgcagacgctggtgtgcgccgtctgcctggaggagctcaggcacggcgagctgtgcagcgaggtgccggcgtgccgccacattttccacagggggtgcgtcgggtcgtggatgaagaagagcgatagctgcccgctgtgcagggtgaagatctcgtcgtggattgcagggccgaccgaatcgccgacggctgctgacgcagtgtag

SEQ ID NO: 13596 - DNA, 747 bp, Oryza sativa
  Clone ID: TFbOSC401206j.C1.o18.fg
atggtcctgtgctccatgcgcaaatcgttcaaggactcgctcaaggtgctcgaggctgacatccagcatgccaacaccctggcctcggatttctcgagggattatgacggggcttgcctccagatgcggatgtcgtacagccccgccgcgcagttcttcctcttcctggtgcagtggacggattgtagccttgccggtgctcttggcctcctcaggattctcatttataaggtttatgtagatggaacgaccaccttgtcaactcatgaaaggaaagcgagcattagggaattctatgctgttatatttccctcactcatgcaactccacaagggtatcagcgatgtcgatgaccggaggcagaaggcaatctgtactgagagatacagaagaagagatgaggatgagagcaagaggcatgtttctgagattgatgtcgagagagaggaagagtgcgggatttgcatggagatgaataacaaggttgtcttgcccaactgcagccatgctatgtgcatgaagtgttaccgtcaatggcgctcaagatcccagtcctgccccttctgccgtgacagcctcaaaagagtaaattctggtgatctgtggatgctcacagatgaccgagatgtcattgacatggcaacgattactagagagaaccttaggcgcctgtttatgtacattgagaagctgcctcttgttgctccggacaacatcttctatgcctatgattctcatgtaaaataa

SEQ ID NO: 13597 - DNA, 768 bp, Oryza sativa
  Clone ID: TFbOSC900263j.C1.o18.fg
atggtcctgtgctccatgcgcaaatcgttcaaggactcgctcaaggtgctcgaggctgacatccagcatgccaacaccctggcctcggatttctcgagggattatgacggggcttgcctccagatgcggatgtcgtacagccccgccgcgcagttcttcctcttcctggtgcagtggacggattgtagccttgccggtgctcttggcctcctcaggattctcatttataaggtttatgtagatggaacgaccaccttgtcaactcatgaaaggaaagcgagcattagggaattctatgctgttatatttccctcactcatgcaactccacaagggtatcagcgatgtcgatgaccggaggcagaaggcaatctgtactgagagatacagaagaagagatgaggatgagagcaagaggcatgtttctgagattgatgtcgagagagaggaagagtgcgggatttgcatggagatgaataacaaggttgtcttgcccaactgcagccatgctatgtgcatgaagtgttaccgtcaatggcgctcaagatcccagtcctgccccttctgccgtgacagcctcaaaagagtaaattctggtgatctgtggatgctcacagatgaccgagatgtcattgacatggcaacgattactagagagaaccttaggcgcctgtttatgtacattgagaagctgcctcttgttgctccggacaacatcttctatgcctatgattctcataggatgttccttgtcgtaggatgtggctaa

SEQ ID NO: 13598 - DNA, 1593 bp, Oryza sativa
  Clone ID: TFbOSC410012j.C1.o1.np
atgaactgtacaaaaggagggggatttccccttttgttttgcgcagtcatttgtctcatggcccaacagggggcttgcaatgtggtgctaatagcgaataacactaccttgtcatttgatgatgtcgaggcaacttttactccagaagtgaaagattcaggtgtaaatggtgcaatttacgctgtggaacctctggatgcatgtagtccattgagaaagaaagcagccaatggtcctgtttcaccatttgcactggtcatacgaggtggttgccaatttgacgataaagttagaaatgcacagaatgccggatttaaggctgtgatagtatatgatgatgaagacagtggtgtcctggtttcaagtaattttacagtggctgggagctcgtccgggatctacatatatgcggtattcctctctaaggcttcaggagaggttttgaagaaatattcaggtcaaagtgatgtagaggtgtggatactaccagtatatgaaaactcagcttggtctatcatggcaatttctttcacatcactgcttgctatggctgctgttctagctacttgtttctttgtgaggagacaccagataaggcgggacaggggaaggattcctgtaacccgggaatttcatggaatgagcagtcaattggttaaagcaatgccaagtcttatttttacaaaagtgcaagaagacaatagtacatcatcatcttgtgccatttgcttggaagactacagttttggagaaaagctaagagtgttgccttgtcgtcacaagttccatgcgacttgtgtggacatgtggttgacctcgtggaagacattctgccctgtgtgcaagcgagatgcaagtgctggaacctcaaaaccccctgcatcggagtccacccctttgctttcttctgttattcatctgtctgctgaatcaacagctttgtcttcttttcggtcaacggtggcagtatctccccctaggccaataagacgtcatccttcatcacagtccacatcccgcgcttactccatttccagtgccccccgcaattataaccttcaaagatattacactaactcaccttatattagtacgagtagaagcaatgtagatcttgcaaatatgtcatcacaatggtctcacactccgcaccaagcatccatgcattctctaagaagtggccatttgtctctaccgatcaacatcaggtatacaataccacatgtttctcgttctgactatggatctgccagcctgggtttatcccatgattcctgttctcaccatggatctccgagttattatcatagctctttgggccagcaacgttcttacctgatgcaccgcaccgagtcagggccaagcctgtctactatggtgctccagtcgccacaatagagtcagtagcagtacaatggcgaatcaggagaagtctatcagctgcggtttaactcgatcattacgtcaggcctatgtacagcattgtcttgattctgatggaagcttgtctgctgtgacatcggatcagtcgctaccaagatgctgattgatcttacgaagttcactgtttcatgagcatttgtgcaagcccct

SEQ ID NO: 13599 - DNA, 687 bp, Oryza sativa
  Clone ID: TFbOSC400622j.C1.o98.fg
atggccacggcgccgcgcgcgaggcgcctggccgccgccgacgtgcagccggccacgccggcggtcggcccagcgtccggcgggcggccccagttcaacctctcgtcgggcgcggccaccgccgtggtattcgtctccatcgtcctctgcttcatcctgctctgcacctactgccgctgcgccaggcagcgcgccatcgccggcgcgcgcagccgcgtcatgcgcgagatccgggagcgcgtcccgggcgtcctcctcctccgccccgccgccgccgccgccgcgctgcccgtcctcccctactccgccgccgccgccgccgcgggcgccaagaaggggccgctcgtcgaggactgccccgtctgcctcgaggccttcgccggcgacgacggcgtcaaggtcgtccccgcgtgcggccacgtgttccacgccgcctgcatcgaccagtggctcgccgtgcggaactcctgccccgtctgccgctgcgccgtcgtctgctactacgccgaccgcgcgagggacacggcggtggtggtcgacgacgacgacgacgaccaggaggtcgtcctggagcgcgtggttgcgatgatcgaggcgatacgagaagaacagagggaagaggaggcggcggcgaggcgcgcgccggcgagcgatggcgggggaggcgaggggttgatgacgtcatga

SEQ ID NO: 13600 - DNA, 1410 bp, Oryza sativa
  Clone ID: TFbOSC16299j.C1.o4.fg
atggcgacggcgacggcggtgtactacgcgttcagcagcagggagcagttctacccggcgatggtgtacctctccacctccaagatctgcttcgtgctgctcctcaacacgggcctcgtcgccatgtgcgtcgcctggcagctcgtcaagcggctcttcctggggacgctccgggaggccgaggtggagcggctcaacgagcaggcgtggcgggaggtggtggagatcctcttcgcggtcaccatcttcaggcaggacttctccgtctccttcctcgccatggtcgccgcgctgctgctcgtcaaggcgctgcactggctcgcgcagaagagggtcgagtacatcgagaccacgccctccgtgcccatgctgtcgcacgccaggatcgtctccttcatgctgttcctgctcgtcgtcgactgcctcttcctgtccaactcgctcaggtcgctcatacacaagcgggaggcgtctgttgcaatcttcttttcgtttgatgacatgctaatggaaggtcaatgggagaaaaaggcagtgtatacattttacttggagctcatcagtgaccttgtacacttgtctttgtatatgctcttcttcatagctatcttcctgaactatggtgtcccactgcacttgatacgtgagctgtatgagacatttcgcaacttcagaatccgtatcgcggattatgtacgctacagaaagataacttccaacatgaatgaaagatttccagatgccacagcagatgagctcaatgcgagtgatgctacatgtattatttgccgtgaggagatgaccacagcaaaaaagctgctttgtgggcacctgttccatgtccattgtttgaggtcatggttagaacgccaacacacttgccctacatgtagagctccaattctgcccccagataatgggcgtactgcagcacgtccgcatggagttcatcctggagttcagcctggtaatggcacaccaggttcagaacgagcagcaggtgagaacataagcaggcgccaagcaaaacttgaagcagctgcttcggctgcttccctatatgggagatcctttgcttatcctccagcgaacaatttgaacaggtattcaactcctccacagtctacatcaaatggtccacaatcaggagaagcaagtacttccaatcaatcgccaaaaggccatgcaactgccgatccttcagcgcctactttttatgcacgtggtgctgttagttcagtgacaactaccagggaacttgaaagttcactgcagaaggcatatgaaaatgctataaagagccagatagagaggcttatgcaggctgcatgcaaatttctggatatgtctgttgtaaacacatctttaactgcactcaagttacatgcttggtatgagccattgggttag

SEQ ID NO: 13601 - DNA, 913 bp, Oryza sativa
  Clone ID: TFbOSC16389j.C1.o1.fg
tgacatgctaatggaaggtcaatgggagaaaaaggcagtgtatacattttacttggagctcatcagtgaccttgtacacttgtctttgtatatgctcttcttcatagctatcttcctgaactatggtgtcccactgcacttgatacgtgagctgtatgagacatttcgcaacttcagaatccgtatcgcggattatgtacgctacagaaagataacttccaacatgaatgaaagatttccagatgccacagcagatgagctcaatgcgagtgatgctacatgtattatttgccgtgaggagatgaccacagcaaaaaagctgctttgtgggcacctgttccatgtccattgtttgaggtcatggttagaacgccaacacacttgccctacatgtagagctccaattctgcccccagataatgggcgtactgcagcacgtccgcatggagttcatcctggagttcagcctggtaatggcacaccaggttcagaacgagcagcaggtgagaacataagcaggcgccaagcaaaacttgaagcagctgcttcggctgcttccctatatgggagatcctttgcttatcctccagcgaacaatttgaacaggtattcaactcctccacagtctacatcaaatggtccacaatcaggagaagcaagtacttccaatcaatcgccaaaaggccatgcaactgccgatccttcagcgcctactttttatgcacgtggtgctgttagttcagtgacaactaccagggaacttgaaagttcactgcagaaggcatatgaaaatgctataaagagccagatagagaggcttatgcaggctgcatgcaaatttctggatatgtctgttgtaaacacatctttaactgcactcaagttacatgcttggtatgagccattgggttag

SEQ ID NO: 13602 - DNA, 472 bp, Oryza sativa
  Clone ID: TFbOSC461j.C1.o4.gp
cgggacggcgatgttgaacgtgtatatacagtgaccaatttgggccaattgggcacccgtcaatacattcgccacaacaagctgatgagtcactagtcactagccgttcgccggaaaatatccggagagatcagatcgatcagcgagatattttttagaagggattggcgccaaagaggccaggcaggagcccagctagctacgaagactactggagtagtatatcttttgtctctcacatcatgctacgaccacggcgatggtgtcgctgtccggcggcggcgtgctcccgccgccgccgatcacctggcggcggcacgtcgggcaggagccgtgcgagaccagccaggcgtcgacgcaccggacgtggaacccgtgccggcaccgcggcagcacgcgcaccttctcgccgtccgcgaactcgccgaggcagatggcgcacacgtcggtctccgccgtctcctccccgccg

SEQ ID NO: 13603 - DNA, 1320 bp, Oryza sativa
  Clone ID: TFbOSC400542j.C1.o6.fg
atgggggccgcgcgtggcggggtgcggcgcgtccggcgggaggcgctcgtggcgtgcatgacgtgcccgctctgcaaggggctcctccgggaggccaccgccatcaccgagtgcctccacaccttttgcaaggagtgcattatggagaaaatagatgacgaagaagtcgatcactgcccagtatgcaacattgatcttggctgtgatcctgaagagaaactcaggcccgaccataatgttcaagatatcaggaataaggtttttccacttaaagtgaaaaaggttggtgctcctaaggctccaactgtgacattgccagtaaagagaaaacagaggtcactttcttccttggttgttgacactccgagggtggcagtacagactggtttgacaggacggagaaccaaaactgcgagaaggacagcagtctcccatgtaaactctcctggtaataatggaaccatcaagctagcaaataaatctgaaggtcgagatcataaaactcagaaaatctcagcagcacaatctgccaagatgacaaaaactggcaataaaaagaagaataatactgatgtagatgtcacaatccagtcatcttctgaagataggaaggatgatcatacaattgacaaggaagatctcaagaagcctttaaatagcttggttgacactgcaaacaggacgaaattttttagatcaggtcctaaaggccaggctgccaaggaagacaaaataaaaaactcaattaagttactggcagaagatgacacagaagacaaactggtagttactggcagaaaggttatgccatgctcaaataagttaaaagttaaagaggaaaataatcgcagtccttcacaatctgcatcatcgaaagataaaaccacctcagactatgagctgaggaaaggacaacatgctgattcacagcagggacagattggttctacaagaactggtgctttgcatgatggaataactagaccagtatggtttttgcttgtcccttcacctgaccagaaacaagatcccaggctgcctcagctaccaacatattacgtgagaattaaagatggaagtctgcagacttccttgatccagaggtacatcatgaataagcttgacctagcaagtgaagatgaggtggagatcacatgccatggcgaggcaatctccccctcgaccacattgcaaggcctgctcgagctgtggctgaagagctcgccggtggagcaggtccaggcgtcgctgggcgctcaagccaaggagttcgtcatggagctcggctaccgccggccacagcggcctccttcctcttag

SEQ ID NO: 13604 - DNA, 501 bp, Oryza sativa
  Clone ID: TFbOSC405090j.C1.o6.fg
atgtcgtcccacgaccccagcagcgccaccgcggcggacgccgtcgccggcgggagctaccgcgtgtgcgacacggtggtgctcgtctgcctcgccttcgcctcctccatcatcgtcttcaccgtggccgtctgcttccgccgcgccgtcaccctgcagggctacgcggcctcggcgtcggcgtcgccgtccggccgtggcggcggcgccgccgccgcacccgccgctgtcggcggcctgcgcgggctggcgccgtccgcgctcgccgcgatccccaagttcgcgtaccggaggggcgccgcgggcggcggcggcgggtgggcgcagtgcgcgatctgcctcggcgtggtgcgcgacggcgaggccgtgcggcggctgccggagtgcaagcacctgttccacgtggagtgcgtcgacatgtggctgtactcgcacgccacgtgcccgctctgccggcgagacgtcggcgccgccgccgccgcggccggcgacaaagtctag

SEQ ID NO: 13605 - DNA, 1629 bp, Oryza sativa
  Clone ID: TFbOSC421348j.C1.o9.fg
atggcggtacctggacccttgaagcagcagttcagaactgattgcactgagtattttctctggagatatccatttgatggaggtggaaggaaagagaggctagtcaatagccaaaagttatttatgcatcctaggagtgatccagctaacggagctggatcgtctggctatgtgggtaacacaatgagatcgaatgatcttccgtcttcaagttatgctggccaagcttatggtcagcagaatagagcccccatccatgcttcatattctggtcatgcacctgctggaagctctagtggtagctatgcaccatacaatactcaacatatgcctgcttcaagctatccacacggatccgaggataatttcattccaagttcccatgtggatggcagaagggttgcattgaagagaagaaatcccatcattcatcctacagatggattcggtgttggaaattattatgctggcagttcttccaatactcagttctctcggcccatgcctccaaatcctattccacctcctgaatcctgtgttcgaatgccctcacacttgggttcgaaccactggaatgatcaccgctatgttaatcatgaaggatctcagaggaatgtgaggggaagacatgatcatagtactatccatttggaacaaagtccagctgcagcttgcccgtcaagcagcatcaatgtgccaccataccatccaaatgcaaatggtccttttggaagtgcaccagtacaacgtgacagagctcctttatctgtgcatccaagaattcttcctccagggcctgatggtagtagcatagcattcagagagaggccatactatcctgctccacagagcaccaacataagtgcacctgtgccaacgcttcctatttcttgtgacagtgcaccatttgctcatggtgggtacgcccctagatcagctcatcgtaacaacttacgcacttatcctcctccagcttttgcatcttcttccaaccctggagcagtctcccatgagccagctattcctagctatccacctgctgcccctagctatccacctgcaacctctgcagcatcatcaagtgtccagccatttcatgctgaagctgctgcacatttgaggcatccaaggcatgtatctgtagggggcagtggtagtgcaaggagtagaaggatgagggattcctatcatggttttcatcatttgatgattgaagacaataacttgggaagatcagcagctgagcggtttatgatgctggatcagttagttatccatgaatcaagagaagcattcgatcctcactgggacatgagactggacattgatgacatgagctatgaggagctgctggctttggaagaacgcataggccatgtgaacactggcctcgctgatgagaaaatttctggctgtgtgatggaggtagcctgctgcagcagtagtcatttgcaggatgatcaggacaatgaaagatgtgtaatctgcctggaggaatacaagcatgaggacacacttgggaggctgaaatgcggccacgggtttcactgcaattgcatcaagaagtggctgcaggtgaagaacacctgcccagtttgcaaagctgctgccgcagatgaaggcagctga

SEQ ID NO: 13606 - DNA, 672 bp, Oryza sativa
  Clone ID: TFbOSC8255j.C1.o5.gm
atggaggtccgacggccggccggcgatgagggggcggcgacccagaagggaagggcggcgggcggcgggagcacggaggagcaacaccagcgtcttgtgccgcgtccacaacggcgtgccagcgccggcggccggcaagcaacaccagcgtcttgtgccgcgtccacggcggcagccgcgaccgcggcgtgccagcgccagcggccggcgagctaccgcagctcgcagaagggcaccggcgaggagctcgccggagcgccactgccgccgctttgcctcagggcccttatcaagggcttgatcgccgaccacggcgaggccgcgccggccgtgcacgcacacgcggccaagctcggcctcgaccaccgcctcgccgtccgcgatgggctcgtcgagctctacctcgcgcgcgtcgagctcgcctccacgtgggcgctcttcgacggattccccgccggctggccgggacgtcgtttcttgaggatgcccgtgaagaagaacgtcctcgtcccggccgccgccgccacgtcgcggccggccgtcggacctcctcgccccggcaacgacctccccaccgccgggcggcctgcccaatccagagagaagagtgggagagagagaagggaggaaaggagaggaagggagaggctggtcgctgacgtggcatcctga

SEQ ID NO: 13607 - DNA, 1017 bp, Oryza sativa
  Clone ID: TFbOSC900291j.C1.o18.fg
atgtcgtcgtctccggcgcatgctcagcgcttctactgccaccagtgcgaccgcaccgtccccatcccgccgcccacctcccccgacgccgacgtcctctgcccgttctgcggtggaggcttcgtcgaggagcttggggaggacatcaaccccaaccccaaccccaaccctagccccttcctgccacaccaccccttcttccccttcgcctccccatccttcgacctccgcaaccctagcgacctcgcggccttcttcgggcccccctccccctccccctccccctccccagccgccaggcacttcgacccctccaacttcctccatgatcacttcaccggcctcctctctggcggcgccaccatccagatcgtcctcgagggctcctccgcctccctccccctcgggggcgccgccgccgggcccggggggatcagcctcggcgactacttcgtcggctctggcctcgagcagctcatccagcagctcgccgagaacgaccccaaccgctacggcacccctcctgccgccaagtccgccgtcgccgcgctccctgacgtcgccgtctccgccgacatgatggccgccgatggaggggcccagtgcgccgtctgcatggacgacttccacctcggagctgccgccaagcagctcccctgcaaacacgtcttccacaaggattgcatcctcccctggctcgaccttcacagctcctgccccgtttgccgcttcgagcttcccaccgatgaccctcaccacgcccacccaacccttggatctcaccgccccgccgcacccgcctctgcctctgcctctccctctccagctccaccacctaggctggctgagagaaggttcaggatatcgctgccatggcctctccgtgctgcgtttggcggccaggcggagagcagcaatcctaccaatcaggatcctgttggtggttctactgatgcttccggttctggcaacaacaatgcaactggaggtcatcgtggctacgatgatcttgactga

SEQ ID NO: 13608 - DNA, 702 bp, Oryza sativa
  Clone ID: TFbOSC18908j.C1.o3.fg
atgtcgtcgtcaaatggcacgacgacatacttgccgggaggagaggcggccggcggcggcggcggcggcaactccggatgctgcagcaccacgacgttgttcggcgcgttggccgcgtcgttcgccctgagcttcttcctcatcaccatcttcatctgccttcgagcactccgcgttgctcgtcgccggcgtgatcgtcccctggtcatggagcaggagcagcggcggccgacgccgcctaggttcggcctagacgccgccgccatcgcgcgcctcccgtcgttcccgtacgtgcgagcccgtgacgacggcgaggtctcggactcggcgtcgtcgtcgtcggtggagtgcgcggtgtgcctcagcgccgtcgacgagggggagacggtgaggcagctcccggcgtgcgggcacgtgttccaccgggagtgcatcgacatgtggctctcgtcccgcgcctcgtgcccggtgtgccgcgggaaggccgcgccggccgacgagctcgccgacgccatagtcgcgcgcatagcggtgacgcccgacctcgtcgggccacgcgtgtctatgtccgtcgtcgtgccggttgagatgctgaagggtgaaatggtgggcgcgtcgtcaacgtcgcgtgccgcgtcggcgccgccagagcagctcgatgcgcgagcgcctggcccggaaacggacttggagagtaaatag

SEQ ID NO: 13609 - DNA, 639 bp, Oryza sativa
  Clone ID: TFbOSC16946j.C1.o2.fg
atggaagtcgtcgtcgctcgccggggcgtcgtcgtcctgcggctgcgccacggcgagccgccgcccagcgccgccgcgcggtctggcgggcgctgctcgaggctgctcctcctgtggacgttcgccgtcggcttcgccgccgggctgttcatgttcgccagccacgtcttggccgccgtcgccgccgccgtgctcttcgccgccatgtgcctgtacacgtgcctgtgcctgaacaacgcggcgccggaggaggaagaggagcagcagcagcagccgcctgttctgctgcttcccggtcaggcgctgcgcgtcgccgtgatgccgccatcggtggggcggctgcagcagcaggaggtcaacggcggcggcggcggcggaggcctcaggcaggaggacgtcgaggccgccatcccggcgttcgagtacagtaagggttcgggcggcgcggcggaggcggagcagtgcgccgtgtgcatcggagtcgtgcggcgggggaagacggtgcggcggctgccggcgtgcgggcacgcgttccacgcggcgtgcatcgacgggtggctccgcgcgcacgccacgtgccccgtgtgccgcgccgacgtcaaggtcgccgccggcggcggcggcggagcgccggtgtag

SEQ ID NO: 13610 - DNA, 534 bp, Oryza sativa
  Clone ID: TFbOSC405090j.C1.o5.fg
atgtcgctgtcgtcgagctccaactcgctgccgtactcgacggaccagggcgggtacagcacgcacgacacgctcgtcctcctcggcatcggcttcttcgccaccgccgtctccgtcctcatgatcgtgctctgcgagtgcctctgctgccgccgccgccgccgcggcggcggcaccgtcgtctacgtggcggccaggccgttcttcctcggcggcggcgggctcagcgcgtccgccgtcgccacgctgccgtcgttcgtgtaccgcagagaagagtgggccgaggcggcgccccgcggcgacggcagcggcagcgggcgcggcggcggcggtgggtgggcgcagtgcgcggtgtgcctgagcatcgtgcaggaaggggagacggtgcggcagctgccggcgtgcaagcacctgttccacgtcggatgcatcgacatgtggctccactcccactccacgtgtcctctctgcagggccagcgtggagcctcttggcaaggagactcctctcaaggatcaggcacctccagtgtag

SEQ ID NO: 13611 - DNA, 1257 bp, Oryza sativa
  Clone ID: TFbOSC900340j.C1.o12.fg
atgttgtacccggagcggccgagccgcgtcaacgggacggccaccgtcgactgctcggcctacccgctcgactgccacccggtctgcccaggcggcagctgctacgagatcgccgagcccccgccgccgtcgccggtggtcccgcgcgtcgacgtggccgtcgacgaccaccacctccccgtacgcctcctcctcaccgtctcactcctctccgccttcctgttcatctcgctctctgtctccacgatcctgctctaccgccgccgcgtcgtcctgcgccgccggcgccgggccgcgaccgcgccgctccccggcgacgacgggttcggcgacggggatgaggaggcggggggcggcggcggggatgtgcaccacgtgtggtacatccgcacggtggggctggacgaggccaccatcacgtccatagccaccgcggagtaccgcgccggagttgggtggggaggggactgcgcggtgtgcctcggcgagttccgcgacggggagttggtccgcctcctcccgcgctgctcgcatccgttccatgcgccttgcatcgacacctggctccgcgcacacgtcaactgcccgctctgcagatccccagtcgtcgttccctccgatctccccgccacggctaccgaaggtgaggcggagggtggtgggcaagcggaagagcaccaggtgtttgatgaaatctcgctatcggaatcacgtgccgatgtctccgaggattctgacacctcttcggacactcaaagtgaggacacagcagcttcaccagaggatggtgggagggtgatgcccaagccaatacggcgctcggcgtccatggactcaccgttattcctggtggttgtgcctgaagcgcaggacgatgccatgcggggtgatcgaaaatttccgaatggtcaagagatgaagttattcagcgtgaaagagaaggatgcaacagggacgtcttcttcctcttgtcaggcagggcggtttgggattggcagatcgatgtcgagcagtgggcaggggttcttcttctcacggaatgggcgctccagtagtgctgtgttaccactatttaggaaggattcaccagatcaaggtacctcatatcagctcttccactttcctcgcttctttataagtatcagttttggagcccaaagcaagatatgggatcactatatcaacattctgatgtgtcttctcttaaagctctattccaccttccaaattctgttgtccactgactactttggttga

SEQ ID NO: 13612 - DNA, 840 bp, Oryza sativa
  Clone ID: TFbOSC24709j.C1.o1.fg
atggcgtcttctccggtgtcgtactggtgctaccactgcagccgcttcgtgagggtgtcgccgtccacggtcgtctgcccggagtgcgacggcggcttcctggagcagttcccgcagccgccgccgcgcggcggcggcgggagcggccggcgcggggcgatgaacccggtgatcgtgctccggggagggtccctgtccgggttcgagctctactacgacgacggctccggcgacgggctgcggccgctgcccggcgacgtgtcgcacctcctcatggggtcgggcttccaccgcctgctcgaccagttctcccggctcgaggcggcggcgccgcggccgccggcgtcgaaggcggcggtggagtcgatgccgtcggtgacggttgccgggagcggggcgcactgcgcggtgtgccaggaggcgttcgagccgggcgcctccgcgcgggagatgccgtgcaagcacgtctaccaccaggactgcatcctgccctggctctccctccgcaactcatgccccgtctgccgccgcgagctaccggcggccgcggcccccgagtcggaggcagatgcgggactaaccatctggcgactcccacgcggtggattcgccgtcgggaggttcgccggtgggccaagggagcagcttccggttgtctacactgaactggatgggggcttcagtaacggcgtcgggccgaggcgggtaacgtggccggagggcgacggccatgtcgatggcggcgaaggtcggattcgccgtgtatttaggaatctgtttggttgttttggtcggagcagtcggccggagagttcatcatcgcagtcccgtagtggctga

SEQ ID NO: 13613 - DNA, 1026 bp, Oryza sativa
  Clone ID: TFbOSC900024j.C1.o21.gm
gcgcggatggcgtcttctccggtgtcgtactggtgctaccactgcagccgcttcgtgagggtgtcgccgtccacggtcgtctgcccggagtgcgacggcggcttcctggagcagttcccgcagccgccgccgcgcggcggcggcgggagcggccggcgcggggcgatgaacccggtgatcgtgctccggggagggtccctgtccgggttcgagctctactacgacgacggctccggcgacgggctgcggccgctgcccggcgacgtgtcgcacctcctcatggggtcgggcttccaccgcctgctcgaccagttctcccggctcgaggcggcggcgccgcggccgccggcgtcgaaggcggcggtggagtcgatgccgtcggtgacggttgccgggagcggggcgcactgcgcggtgtgccaggaggcgttcgagccgggcgcctccgcgcgggagatgccgtgcaagcacgtctaccaccaggactgcatcctgccctggctctccctccgcaactcatgccccgtctgccgccgcgagctaccggcggccgcggcccccgagtcggaggcagatgcgggactaaccatctggcgactcccacgcggtggattcgccgtcgggaggttcgccggtgggccaagggagcagcttccggttgtctacactgaactggatgggggcttcagtaacggcgtcgggccgaggcgggtaacgtggccggagggcgacggccatgtcgatggcggcgaagtcgacaacagggtagttttcctcctcgagttcgtgcccgatgagatcaaagatagcgctttcgtctctcctgacagtatccggagacaccgcaggggactagccgtgcctatctccgaagtcgatatccggcgtcttgtcttgacgtatgttgtggcttctgttgttccctgtatgttgactgtggtgggatccgacaaggccttatcggctctgggcatccccagccgaagtttccttaggttcctcggagtccttgtcaagacggcgtaa

SEQ ID NO: 13614 - DNA, 2091 bp, Oryza sativa
  Clone ID: TFbOSC900134j.C1.o9.fg
atggggaggaggacatggcagtggcacgccattgcggcgctcggcgtcgcgtgcgcggccgccgccgccgtggccgccgataggagagccttctcggtgacctcggccgccggcggcggcgccgcggcggcggcggcggtggtggcggcgacgccggaggaagtgggcatccttcggaaggtggccaatttcttgtggcagactgatggcaactcgtaccaccacgtttggccggaaatggaattaggatggcaaatagtgctgggatcactgatcggattcttcggcgcggcattcgggagtgtgggcggcgttggaggtggtgggatctttgtgccaatgctgactttgatcattgggtttgatccaaagtcatctactgcaatatcaaaatgtatgatcatgggtgcagctgtctcaactgtctactacaatctcaagcttaaacatcctacgttggacatgccagtgattgactatgacctagccctgctgatccagcctatgctaatgcttgggatcagcattggtgttattttcaatgttttattccctgactggctggtcacagttctccttattatccttttcctaggcacatcaactaaagcttttctgaagggtgttgagacatggaagaaagagacaataatcaaaagggaggctgcaaaacgattggagcaaaccagtgaagaaccagaatatgcaccacttcctactggaccaggcgctgtagctgatgcaaaaaggccatcagatgaagcggcatcacttatgaagaacatttactggaaggagtttggccttcttgcatttgtgtggatggcattccttgttcttcaggtcacaaagaactacacagctacttgctccagttggtactggatcttaaaccttctccagctcatgttcttattcatccctaaaaaatggaaaccactcaaaattacatattcaaaatctttcacattgtatggtattaagatcccagtatcagttggagtgactatgtatgaagcgctgggcctgatgagcgggaagagagttctatcgtcaaagggaaatgaacagactacactgaaatttcaccagctctgcatatactgcttcttcggtatcactgcgggggtcgttggtggtctgctaggtctcggaggtggctttatcatgggtccactgttcttggaacttggcatcccaccccaggtttcaagtgcaacagccacctttgcaatgatgttctcatcttcaatgtctgttgttgagtactacctgttgaaccggttcccagtgccctatgctttgtactttgtcattgtggcattcatcgctgccattattggccagcatgtggtcaggaggttgatcaattggttaggacgggcatcgctcatcatcttcattttggctttcatgatctttgtcagcgcaatttctctaggattatccttggagatcactggagcaaagggtgagaagagaaccttttgtgttttcctccagggagccatggaaccatcatctctgtcacttcggctcaaagcagccatatatgatctgttcaacagtaactcattgcaaacatatgtgccattcagaatccgccatatcaacggtggcggtaacccgaggccgagacaagaggaccccggactcaccgatgccgagttcaagaaggcgatggagcagctcaacaagcaggcatataggtccttagaccctcataagatggttgaatcaaacagaggaggcagaaaccatgcaaagagtgcaagatccaagccagctccaaacaacacggaagaggagaaagcatgtaccatatgtttggagacattcctggctggggagcaggtggtggccacaccctgcaaccacatatttcaccaagagtgtatcaccccctgggtgaaggggcatggcaactgcccggtgtgccggttcgcgctatgcgagaggaacaccgtctccgacaacagccagagtggcgttggagaggttgaggtagatctggacctgctggagatgatgagggccatggaggagatcttcagccgggtcacattctcaaacttcatgccatacaactag

SEQ ID NO: 13615 - DNA, 1152 bp, Oryza sativa
  Clone ID: TFbOSC400939j.C1.o7.fg
atggcatcctctgctcctgcttgggtcccctacgagccaacgagagattgctctcaagggctgtgcagcatgtactgcccccagtggtgctacttcatcttccctccgccgccgcccttcgacgtcgccggcaccagcgccgacgactcctccggccctgtcttctcccctctcgtcattgcaatcatcggcgttctggccagcgccttcctcctcgtcagctattacaccttcatctccaagtactgtggcaccgttagctccctcagggggagggtcttcggctcgagctccggtggcgctgcttatggcggcggtgccggtagcggcggccgccacggccacgggcagtcgaggagccacgagtcatggaacgtctcgccgccgagcgggctggacgagaccctgatcaacaagatcacggtgtgcaagtaccggcgcggtgatgggttcgtccacaccaccgactgctcggtctgcctcggcgagttcagtgacggggagagcctccggctgctacccaggtgcagccatgccttccaccagcaatgcatcgacacttggctcaagtcacactccaattgccccctctgccgcgccaacatcaccttcgtcaccgtcgggttggcgtcgccggagccggagggctgtgctccaggcgagactggaggtgacaatacacacgaggtggttgtggtgatggatggcttggaaaatctttgtgaagagcagcaggaggcagtgagcagggccagcactgccgatgatgatcacgatgcgaaggacgtcgcagaggggatggaggaggccaatggcgcagccgagatcagagaagaaggctcgccgccaaagaggggcgcgtcgtcgtttgatcttcaccgtgacaaccgcatgtgcatcgccgacgttctgcaggaatccatggaagacgagctgacggcagccagggagagtggcctcctcgcaggcggcgctggcacgtcaagacggtgccatggcgagaacagcaagggaaggggaggccgcagccgacgtgcattgcagctgcaggacgccatggaggctctgccggggaagagattgccctccggtgggagatcctgcttcagcagcaagagcggcaggggaaaagattcagatcatccaatgtga

SEQ ID NO: 13616 - DNA, 1095 bp, Oryza sativa
  Clone ID: TFbOSC900225j.C1.o18.fg
atggctcgccgcgacggcgtcggcggcgacggcggcgcgtcggcggcggagcagcagcggagagtagcgctgcgtgtgctgctgtcccgtgcggaggcttcctcgccgccgccggcgacggtggaggaggaggcgcagcgggggaggagcggtggtggtaacaaggggctcgcgtcggcggcgctgcgcgggctcgggtgcacgtcgacggcggcgctgcgtgcccacgcgccggcttcggcggtggaggtggcgagtagctcggagcggtggcacgggaggcggcggcggaggaaggtgcaggagaggcggagcgcgaggggcggcggcggaggaggaggaggaggcgtggcgccgcccggccccgcgccggcggcggccggggacgtgtggtgcacgtgcgctcccgggataccgttcgccgccgaggcgtcgtcggtggactgcgtcgtggtggcgcgccaccaccacgcccaccacacggcggcggcgatgggctccggccgccgcggggaggcggagcggcgccacagagagaggccggccgctcctcgagctcgaagggtgaccatgcgtgagcacatatcctcgtcgctcatggactcgccgccgttccccgacatgccgctcctcaacgccgacctgctaccaccaccaccctccggccgccaccgccatggataccgccacccccacgtcggcgccgccgaggaagagatcatgatgttaagaacacggctattatggggaagattcggtatgcatgatcagcaccaggattggcgactcgacgttgacaacatgacatatgaggagctgctggatcttgaagacagaattgggtatgtaagcacagggttgcatgacgatgaaatcgctcgcagccttaggatggtcaagtattcagcattcaaccccaagcattttgcaacagaagtagaaaggaattgcagtatttgtcaggaagaatttgaagcaaatgaggaaacagggaggctgatctgtggccacagctatcatgtgcaatgcataaagcagtggctttctaggaagaacacctgccctgtctgcaaaactgttgtatcgaagacatga

SEQ ID NO: 13617 - DNA, 2811 bp, Oryza sativa
  Clone ID: TFbOSC826j.C1.o13.fg
atgtctgaccatcgaacacacgcgagcgactgtcatccagttgccagccaaccagatgttcagtgcctagtttgcacaaggccgtttactttggatgctcaggtgaccgatacctttgaagctttagccatatgcagggactgcaagatgacagtactcaatgatgatgaaagagatgaaataaccagcacttatcggcagaacacacggaggaggcagatatccaggactgcaagcattgatttcctggaggacgcattcttgcaggagttttctcagctgatcgacttagcaagaagacaaggtcgtgaaacggatattgattcttcgtcggtcgcgccgcaacatgcatcgtttaattcaacaccaagccaatctcaaagatggcatgcttcagatgatgagagcgatggccttaattatgttgattctgtgtttggtgaaattgaatctgccatcagtcttggtgactatggtggagattcagatacctccatagaggaacatagcgtgatgacaaggaggaggatttccattcaacttgacaatgacagctacatgaacacagatactgatattgatcccatgaatgctagactggatcagtgggattcagatgaccaggaagatgtggaagagtctggttttgatgaaatagtcaacaccatgacccagcaccagcagcaatcacatgatattcagctaagtggattgagtgaggacgaatctgaagatggtgtatggaattggagtgtgagtgtacgtcaaagagcaaatgtgaccaacttgctagatgacatggaagagccagaaatgaggacaacttttgtcgggaatccagatgactatgttgatgcaaggcagtttgagatgctccttgagcaatttgctgaggacaacgattccagaagaggagctccaccagcagcgacatcctttattgaaaatctcccctccgtgattatctctgcaagccatcagacaaatggtgatgttatttgtccagtctgcaaagacccaattcctaccagagctagagcaaaacagctaccatgcatgcatctttatcattcatcgtgcatcttgccatggcttagttctagaaatacatgtcctgtctgccgatatgagcttcctacagatgatgcagagtatgaaaggtccaagcaagccacaaccaatgtaagagacattcaggttgtggaagaaatttctgatgaacaagaggtccaggtaactcgtcagatggctgctggtgtgatcgaagagactaatacaagtgaacacaatgttcgtgttgatgagcaaccaaacagtgcacgcaggcgcagtggatggctttttattgctgctgctccagtttgcttctgtcagaattctacccagtgtccagtggagagcttagctctgttctacttgtgcaacatcctatggctgagggctgtgaagataaggaagaagttgaggaggcaaggcataaggggtcccaagcctacttttctgtacggcaacacaaaggagatcaaaagaatccgacaagaactcaaattttcacagaagcaaggcaccaacaacttcatctccaccctcttcccacactttctcctctgtcgggaaacttatggcccagtgtttctatactcaactggagctctggagatactacaagtttctcacccagatatggtgaaggatataggccggtggacaccatcagagcttggtaagcctaattatctaaagaaatctcgcaaggccctctttggaggaggtttatttacagagaatggtgatgaatgggcctatcagaggaagataattgcaccagagttcttcatggataagattaagggtatgatccagctgattgaggatgcaactgttacagtgttagaagcatgggaggatatgattgacgatgtgggagggtgtagggaaatagttgtcgatgattacttgcggaacttgtcagcagatgtaattgccagggcttgctttgggagtagcttcacaaaaggagaagaaatattttgcaagcttaggcagctccaaaaagtaattgctcagcaagattcgtttgttggtctgtctgcactgtggaaatacctgccaaccaagagcaaccaagaaatacagatgctggatgaacaagtccgcttactgatcctggatgtcgcaaaggaacaacaccactaccaagactcacacaacagtcttgtcaacgccatcattgatggtgcgcaggatggtcgcagcgctgcagaggctgaggactttatcgtcggaaactgtaagaccatctacttcggaggtcacgagagcacggcggtcaccgccatctggtgcctgatgctactcgccacgcactctgaggcaatggaggtgacgatggtgatccaggagacgcttcggctgtacccgccggcgtcggtgatgatgcaggaggccctgacggacgtgaagcttggcaacatcgaggtgcctcgcggcaccatcgtgcaggtgcccaggctgatgctgcacctggacaaggaagcctggggcgccgacgccgacgagttccggccggaccggttcgcgaacggcgtgacggcggcgtgcagggcggcgcacatgtacgtgccgttcgggcacgggcccaggacgtgcatcgggcagaacctggcaatggcggagctgaaggtggtgttggccaggctgctgacaaagttcgccttctcgccgtcgccgaggtaccgtcactcgccggcgttcaggctgaccattgaacccgggttcggcttgccactcatggtgacaaagctgccatga

SEQ ID NO: 13618 - DNA, 2055 bp, Oryza sativa
  Clone ID: TFbOSC421431j.C1.o19.fg
atggatcagcagaatttactgcccagcaaccccaccgcagatgaacagaatttacttccaaatactctagaggatgatgattacccacattatttacttggtagtcatgaggtggaaatgccaaatggaagcgtgattggtcagcaaaatacaagcttgaacttatgggattcagctggatctagctcgatgggctgtgtagctgatcatgatagtctttttgaggccaaaagggaacattttgctcctgctttgtctatccgagctcccttaattattggagggagaagacatgaaggcagtagttcattgccttcacagagcttaaacttagaccttaatcttaatcaggctgatcagtttgattctgaggatgttgatatgattcagagtaatggacaaccagggataaacgcttttcctctcaacaggggcctttccattcctgagcatgttctgcgccatacaaattcttccagtgctacaggaaatccttcacaggttgcaagcttttctgatggaatgacaggccaagaagttaacctgtttggtgggcatcgttcatcttgcaagagaaagaatattgatgggagtcttgcagagtcttctgccaatggtagttcacgtaataatcagcgaaataatattatactggaaccttctccatccagtcatgaaagcacttctggtttaactgcacctgcccctacaaaccatgttttttcatactctcctgtggaacagctaaaccagaataccaatatgtctgcaaatgctatgttgtctgatcattattcactatatggtgatcatgagcgtgagagatttctgaggaatacccggatgagaacaagccctaatgagtatgatcaatcatcgtccaatctcttgcctgaaggaagtctcaggtgttctgtttatcagcctactcagcaacagtctttgtttattccagtacaacctagagcatcgagctcttcaacaagttctcttagtcggccttatgtgcctgctgtcactcaattctcacaaaatttgcaccgtgctccatcaagtggcaattttggttcgagaatagggatttttcctagttctgctgatacaacaaaccagttatcttcacaagatcccaacaggagctcggtgagaggcaattttcctgagccccttctgttaggttcttctctgtttccttctgactcggcagaattgctatctatgccgggaggcagaagcaaccaacaaaattccagctccacaattcgaactgctgtaaatataggagctcaacagattgctgggttaaatgcatcccagcctacttcaagctcaaggggttcggttgatattgttaggagatccttgcaggctgctagcgttcctcagtccagaggttcaagcattacatcacagcagcaacgtgggcattcatccacatcacatgagattcgaagccatcaacctggatccagctctcgtgccaatcagcagcattatgtcagggctgttcctcactctgtagataggcaaaactcgaattacttggacctgcagtcttttatgcaaagcattgctgcttcaagagacggaattaggacagtctcagagtctgccaatcaacttgtgcatcttcgcaatgttgttgaacaaattcgtcagggaagaggtggaaggtttgaggatcctaattttgaacgtgcactttttgcaaggcgtgccagtttaattgacagacatcgtgacatgcggcttgatgtggataatatgtcatatgaggaattgttggcacttggtgaacgcattgggtatgtaaacactggacttagtgaggataaaattaggactggtttgaagcaatggaaatatgtgagcataccgattgaagaacctctaactggtgttgaaccatgctgtatttgccaggaagaatatgccgaaggtgaggacatgggcagactagactgtgggcatgacttccacaccgcatgcatcaaacaatggctggttataaaaaatctgtgccctatctgtaaaaagacaggactgggcacttaa

SEQ ID NO: 13619 - DNA, 1497 bp, Oryza sativa
  Clone ID: TFbOSC414513j.C1.o15.fg
atggcggaagaagccgacgagacaaccgtcgccgcacgaggcatgcatgccaggagtcgtcgttgctccaaggacttgaccttggagaatggagacgcagagggcgcgcaggggtgtgatgatggtggcgtcaagtcatcggcgatggcgagcgaggagcgcgaggctgacaacattgtgccctccgattccgcgttcccggaggtggagctggccgaggacgacgccgtggtgtgctcccgggtcaccccggacggcggcggggaggtggccgcgtggtgcgagattaggcgcggcggcggcgatggcgacgcgtcgtcggcgacgattcggaatctgagaggcgagcccctggagacagggaagaggcagagtggtcatggctcggatgcaattattgtcgatggaagagtgatccagcaagaagcagttgacatcaaaccggggagtgaaattgtttcaggaccccagaaagatgggcatctgttgtacacctttgatataacaggcctgaatgaccaggacaaaactaatatcaagattgtgctggatattgagaatgcaaagtgcagcatatgcttaaatttgtggcatgatgttgttactgttgctccatgcctccacaacttctgcaacggttgcttctctgagtggttaagaaggtcttcagctaattcgcgtgataaaagtcagagtgctgcctgtccacaatgtaggacggcagtgcaatcagttggtaggaatcacttcctacataatattgaagaggctatactgcaagctttttcatcgctacagcggtctgatgaggagattgcattgttggagtcatatgcctcggtcaagacaaatattgcatggcatgcattcatcccttttccatggtcttatgctggtgcgatgattcttagatccaccatggggataaacatctgtcagagggaggttttggggaaacagaaaatccagtcaaggaagcgccgtttgccacgttcaaatgatgaagctaaccatactaaccatgctgattttctatgccctcaatgtggtttgggatgtgatagggcattttgtggagcttattggtgttcccaaggagtgaattcaagtcagcataatccaatctgtgatcaggaaactttcaagatgatctctcagcgccatatctctagtgttcctgacacagtacatggaggcaatcaatacgagaaagatgtaggaagttttaacatgatcttatactatcatattgctccttttataccccagatagtagtttcacatattacagaaagatgtatacagcaatcaggcaaagcattgcaagctataatctcagagtggatagtgaagtttgacaataaggagcttgatcgctcaaggctgcagctgaaccatgttgatgcaattacttctaggacatacgtctgcaaccaatgctacagcaagktcatcgatttcctgctctactggttccgtgtatcaatgccaagaaat

SEQ ID NO: 13620 - DNA, 225 bp, Oryza sativa
  Clone ID: TFbOSC419672j.C1.o5.fg
atgtcgcgagatgtcctcctgggcctcgcgctgacgaaggcgtgcgacgcgaggcaggaggagtgcgccgtgtgcctcagggacttcgaggagaaagacatgctgaggacgatgccgtgtaaccactccttccacgagatctgcctcttccgttggctcagcgaaagctgcctctgtcctctctgccgctacgcgctgcccaagcagcagcagatccgtttgtaa

SEQ ID NO: 13621 - DNA, 504 bp, Oryza sativa
  Clone ID: TFbOSC4300j.C1.o1.fg
atggggatggcttcttttactcgtcagcctttctactgtaaatccttggcttgtcatcatcaacaaaatccggcctctacaattgttgcaatagacaaaaatctggatacatccactcctgacacttaccgagcaccacctacacctttgccttatgatgttggtctagtgttgaaagataaccctgatttggagaagacaggcatcaagaggaaaattcatgaacataaggagtccttaatgatggatgataatgagtcattgcaaaaatgtgtctctgaagataagcctgatgaggaggatgtttgcccaatctgtcttgaagtttttcgttattcaccagaatatgatgaagaaaatccccgctctatgactaaatgtgagcatcattttcatctttgctgcatacttgagtggatggagcggagtgaaacttgcccagtttgtgaccaggggaagttggtagtcgatctgaagctaaagaatacaaattttgatgtttga

SEQ ID NO: 13622 - DNA, 1042 bp, Oryza sativa
  Clone ID: TFbOSC900381j.C1.o6.np
ccccttgaaggaggagcccttagaacttgggcacctcgatggccgacggcggcggcggcggggaggccgggtccggtggctcggcgccggtctgcagcttcgtgaggaagccgccgaagaacatccggaagcgcccgaccgcgcccgcgggctccgacgacgacgacgaagacgggtccggcgccatcgccgccgcgcgcgccaagaaggcgccgtcgtccaccagcaagctcttcttctcctccgcggacggctcgtcggagccccgccggttccagtacgagtcgtcgcggacgatccaggcctccaccgacagccgcgccaccgccacgctcgagacggagacggagttcgaccgcgacgcgcgcgccatccgcgagcggcagctcaagcaggccgaggagtccctgaagaagaacccctccgctcctgcctccagctccggctctggctccggggaggtgtacaaggggatccacggctacacggattacaaggccgggttccgccgggagcacacggtgtcgtcggagaaggccggcgggtcgcacgggccgctccgcgcgtcggcgcacatccggctctccgctcggttcgactaccagccggacatttgcaaggactacaaggagacagggtactgtggctatggcgattcctgcaagttcatgcatgacagaggggactacaagtctggatggcagatagagaaggagtgggaggaggcggagaaggcccgcaagcgccgcatcgctatgggtggggatggtagtgattacgaagcaggggaggaggatgacgatgatgatgaagaagcgttgccctttgcctgctacatttgcagggagccttttgttgatccagtggtcacgaaatgcaagcactatttctgcgagcactgtgcattaaagcatcactcgaagaataagaagtgctttgtctgcaacaaaccaacactcggcatcttcaacgcggcacaggagatccgcaagaagatggcacaagacaagaagcaatatgaaattttaaaaaagagagttta

SEQ ID NO: 13623 - DNA, 1029 bp, Oryza sativa
  Clone ID: TFbOSC409503j.C1.o3.fg
atgaggtgtcctttctccatcttaaattcggtccgtggtatgaacccaagattttcctccccctctatcctggtttctgcgacaactcagaattggattgttcgtcgtctaatacagcaaggcagccagttggtgtgggtgggtgccacaaataatgcagaatggcagccacaaccaggatgctccaaagtggctggtccctgtcttgttcgccatgaacatgaaatgcattggaggaaagctctgttgatagaaacagcacacaaacacataatggaggatcaaaagcgattgagagattttgatttgctgcaggcactcagtgtggtcttgtttgtggaaaaagatatgcgaataaggttagaggttgatcgctcggtagatggtactgatggccgggatgcttcccggagtggagtgcgcgcggcggcgacgtctccggcagggcggcggggaggcgccgtgcgggacgcggcggccgtcattgtgcctgacaatcatagatcagatattgaatttgaaatcgcggtatttggaattggaattatgttgcagcagcagaggagcgcgtgcgaggagcagcagcccgggtggtggacgctggacagcaacgtgcgggaggcgaaggagaggctggaccagaagctgcggagccagagggaatccgccgtcgtcgtcgtcaagaggcataacaaagcgcaggtggcaggaacgagcagtgacggcggcgagcagtcaacggcaactacggcggcgccgcagtgggaggtgtacacgaggaaagaagggcggcggcggatgtggttcaggaggttggggcggaggccgacgccggaggaggaggaggagtgcgcggtgtgtctagaggagctgcgtgccggggaggcggtggcgcacctcccctgcacgcaccgcttccactggggctgcgccgtgccatgggtccagaccgcctcccgctgccccgtctgtcgcgccgccgtctacctcacctcaccggcgccggcggccagcaacaactacaactag

SEQ ID NO: 13624 - DNA, 978 bp, Oryza sativa
  Clone ID: TFbOSC900024j.C1.o9.fg
atgagcttcgtgttccgggggagcagaggtgacatcgaggccggaggcttcccggggttcgccccggagcgccgcgccatgcggattcatgcgggtggtcggccggtgaacagcaacctggcttttcttgtcactgttcttatgttgttcatggtactgaactcacaccagatgtctccgaactttttggtttggctggttttgggtgtgttcctaatggccaccagcctaaggatgtacgccacatgccagcagctccaagcgcaggcgcaagctcacgctgcagctgccaacggcttccttggacacactgagctgcgggtgcatgtcccgccgaccatagctctcgccacacgaggccgtttgcagagccttaggctccaacttgcgctacttgaccgcgagttcgatgatttagattatgatgcccttagggccttggatgcagacaatagccctcatgctccttcgatgagtgaagaagaaataaatgctcttcctgtattcaaatacaaggttcaggcacatcagggaagtgcctctttccgaaaaagtgatggaccatctcaaccatctgtttcttctactgaatctggcaatgagaaaaagcaggatcgtttcaaggctgatgcaactgacaacaccctggaggatgagttgacatgcagtgtttgcttagaacaagtcgttgtgggtgatctattgagaagcctaccatgcctgcaccagtttcatgcaaactgcatcgatccatggttgcgccaacagggaacatgcccagtttgcaagcaccgtgtaagcgatgggtggcatggtgaagcagatgcttctaacatggttgtgatatttttggttgacctgtaccctgttcagtatgaactcacatacaatcctttttactctgtttccgtggggaaattggcgtattatgggtgtttaaggctgaagatcagtagaggatttaagatccaagagtag

SEQ ID NO: 13625 - DNA, 501 bp, Oryza sativa
  Clone ID: TFbOSC18908j.C1.o5.fg
atggcgacggtgggcgccgtggacggcgttgaagttgtgagcgcactgatcggccagtactacgacgggctggcgctggagctcgtggtgttctccctcgccatcgtcgtcctgcggtacgccgcggtgctctacgcgaaccacctggtcgacagcctgagcgagctccaggcggcggtcggcgccgggatcggcggctcgtcgtcgggaggcggcctcgactccgccgccattgcgcggctgccctgcttcgtgctccctccccgccgcggaggtagtgcggcggcggcggcggcggagtgcgcggtgtgcctgggcgccgtggaggaaggggagacggtgcgcgcgctcccctgctgcccgcacgccttccacgcccgctgcgtcgacgcctggctgcgcctgcggccgacgtgccccctgtgccgcgccgacgtgccggtgccggcgaggccgacagctccacgacgcaggcacgtgcctcgtggcacagtggagtga

SEQ ID NO: 13626 - DNA, 556 bp, Oryza sativa
  Clone ID: TFbOSC413688j.C1.o3.hg
atcacccccgggtttctctgggtacgcccccccccttttcgggaaattttgtttattggaccaccgcggcgcccaaaagacaagtaggggggtttcccttatacaaaacccggggtgttcgaatcgcccttctggagaaacatgttgcggggggcctttggtgttcttggccctccccggtcccgccctgggggtgaaggggcggagacgacaaactggcggtaatcgcggcgccccccgcgtccgcggccgggggggggggggcccaagcctggcgaacagtttccgaaacagtttcaggccgcaaagtttcggccgccgacaaggcgggggcgcgggcgcgaccaattgccgtgtctgcctcgcgcggttcaagccggagtcggtggtgaaccgcttcccctgcggccacttcttccaccgcgcttgcctcgagaagtggctggattacgaccacgccacctgcccgttttgccgccaccgcttcctccccgccaccaccgagtccccctcgccgtcgccggcgacggcgaccccccatttcgcccggatttag

SEQ ID NO: 13627 - DNA, 804 bp, Oryza sativa
  Clone ID: TFbOSC400547j.C1.o23.fg
atggaggtcgcggccgcggaggacgcgctggaggagagcggcgtggcggtgtacctccccaggcttctcgccggcgtcatctccggcgctctcaccggcctcttcgctctcgctggggccttgaccggagcggtgaccggcgcgctggccggaagggcttcagacagcggcgtgctccggggagctggattgggggcgttcgccggagctgtgctctccattgaggtcctcgaggcttctcgtgcttattggtgctcggaccggctgggctctcatggcacatcctccatggtcagcatttcagattttggtcatgatgatctgtatgatatttttggagattgttcatccaaagggctttcacgggagtcactgaataaattaccacactatgtggtcactgaccaaacacggaactcgtttggtgaagacctctcttgcactatctgcctgcaggatattgtaaccggtgaaacggcgaggagattgccgaattgctcccacactttccaccagccttgcgtggacaaatggctcgttggccatgggtcttgcccttgctgcggctgtgcctcctccgcctgtgcgcgtccgtttcgctcgccactgtttggctatggggaggagaaagagaaaccggggcagtgcgcgtacgagaaagttgattgggttcctgatgttgatggaggcggcagcatcctagtacagcgtcgcatctcatcagagagtaggcgagcagcagccgccaactgctggatggtcgtagtcgcggctcagaatctttgcccaccttggcgctgctga

SEQ ID NO: 13628 - DNA, 2253 bp, Oryza sativa
  Clone ID: TFbOSC401537j.C1.o14.fg
atggcttcgtcatcaaatccatcaaatcttccctgctctagtgatggtgtatgcatgttatgcaaggtgcttacaacagaggtagagcagctgcgttgtagcacctgtgctacgccatggcatactccctgcctctccagcataccgccccttacagatgtggcccactgggtctgtccagattgctccggtgatgtcacagccagctacccgccatctgatgttgttcgtccggagagcagcctcatcgctgcgattcgtgtgattgaggctgatccggtgctgtccatccaagagaaggctcgtcgtcgccaggaacttcttggccatgccggtgatgcaggggctgcaataactgaagctgttggggaaaacgtagaggacagtgagagcaacaatcctttgtctatgctgaacaagaacatcaactgctcattttgtatgctgcttccagagcgacctgtcactacaccatgtggccacaacttctgcctgaaatgcttccgaaggtggattgaaaatggtaaaagagcttgtgtgatctgccgagcacctattacacaaaaagtagcacaagatctaagaattaacttggcactagtccaagctatccgcatggccaaggctgcaaacaatgctagcacaactggtgaaacaacggtttatcattataaagaaaatgaagataaacctgacagagctttcactactgaaagagcaaagagagctggaatggcaaatgcttcaagtggacaaatatttgtgactattgcaccagactattttggtccaattcttgaagatcatgacccaaggaggaaccgcggtgttcgagtcggggaccattggaaagatagaatggaaggtagacagtggggtgctcatttccctcatattgctgggattgccggccaatctacacatggggctcaatcagttgccctctcaggaggttatttagatgatgaagatcatggagagtggttcctctatactggaagtggaggaagggatctaagtggaaacaagcgaacaagcaaggagcagtcttttgatcagaagtttgagaagctgaatgctgcattacgtgttagctgcttaaatggctatcccgtgagagttgtacggtcttttaaagagaagcgctcaccatatgctccagagtctggtgttaggtatgatggaatctataggattgagaaatgctggaggaaaactggagttcagggtacattcaaagtgtgcagtgatgaacatggagaccatccaaggccattaccagatatcgaagagctgaaaaatgcaattgatattactgagaggaaaggaaacccagcatgggattttgatgcaacagatggatggaagtggatgattactccacccatcagcaggaaggctgtcgtaactggagatcctagaggcaagaaaatgcaaggagcagcaaggcatacaaataacttgtcaatgagagaaaggctgttgaaagaattcagatgctccatatgtaggaacgtgatggaagagccagtgacaacaccgtgtgctcacaacttctgcaagaaatgcctgcttgggtcatatgataatctttcccttacagaggagagaagccgtggtggtcggaccctccgggcacgaaagattgttaaaaagtgcccttcttgtccaagtgatatcgctgatttcgtacagaatcctcaggtaaaccgtgacattatgaacgttattgaatcactccaaaaagaagctgagaaggaagatcatgctagggtgagtggagaaggcagcagtgcagcacttgtagattctgatgatgaaaatgacactgcttgggagaaccaagatgatggtaatctggatgagggaggttgcaacaatcctgaggacatgataactgaatctgttgatttgaattctgttactaatgttgataatactgaaaacaaggtggaagttcagcagcctcacaagcgtaccgccggtgccgggaaggggaaaggtggcaaatgggctaggacaagctctgcaccaggtgatgcagatgccaggaatgttgtgacttcaactgaaacattggatggaatagctgctgagaatgtggctgatttagtacaaattgaggattgcactttcactggtgtggaaagagccgaccccaatgcgttagaagttgatggcaagaatatgattccagacttttcagaagctgagaaggttaaccctaaacaggatcaagaagttcttccatga

SEQ ID NO: 13629 - DNA, 1086 bp, Oryza sativa
  Clone ID: TFbOSC407908j.C1.o13.fg
atggcgtccgccgcctccccgccgcgctccggcgacgcctccccgtcctcccctctcctcccttccccgacgtcccccgaccgccgcagcggcggcggcggaggcggaggacgcctgcttccggggctgcgcggcgcggcgcggttcctgggccgcacggggagccgccgcctgatgcgggagccgtcggtggcggtgcgggagacggcggcggagcacctcgaggagcgccagaccgactgggcctactccaagcccgtcgtcgtgctcgacgtgctctggaacctcgccttcgtcgccgtcgccgccgccgtcctcgccgcctcgctcccggagtccccctcggtgccgctccgcgtctggctcgccgggtacgtgctccagtgcctcttccacgtcctctgcgtcaccgtcgagtacaggcggcgccgggaggcgcgcggcggcggctttggggcggaccagggggctgcggctgatggggatttcaagctcagtattgtgaagcacctggagtccgcaaacacgatgttttctttcatatggtggatcattgggttctactggatatctgcaggtggccaagctttgtcccatgatgctcctcaactttactggctctccattgtgtttctggcatttgatgttttctttgtagtcttctgtgttgccttggcctgtgtgattggcattgctgtctgttgctgcctgccttgcattattgctatcttatatgctgtaactgatcaggaaggagcatctgaagaggacatcaacaacctgtccaaattcaaatttcggacaatgggtgatgcagacaagctggttgctggaattgcagcacctgtgggtggagtaatgactgagtgtggcaccaatcctcctgttgaacacttcctttctgctgaggatgctgagtgctgcatctgcttgtgtccctatgaagacggtgcggaacttcgagaactcccctgcaatcatcatttccactgtacctgcatagacaagtggcttcacataaatgcaacatgtcccctgtgcaagttcaacatcatcaagagcaaccttggtccagaagacgtctag

SEQ ID NO: 13630 - DNA, 783 bp, Oryza sativa
  Clone ID: TFbOSC900241j.C1.o6.fg
atgccatcgtcatcgtcatcctcggtcgccgctgccccttctggcagcaatggcacccgccgcgacggtgggagcgggagcgtcacgggctgcctcccggctgaccaggcatgcttcgcgctttcgtcgtcggccagctcgccaggctacctgcacgcctcggccacaacgacgcgtcgcgatgcttctgccaccgtggcgcgcgcgtgctgcaccaccgcgtcgtacgtcgtcgtcctcgggatcagcttcggctccctcctcgccatcctgctcatcctctgcatcatccggtggtacctcgtgtggaggtcggcgcgaccacggcgggacgacggcgccgcggatgaggcggttgggtcagccaagaagcggtcggctgggctggatgacgacgccatcgcggcgctgccggtgttcgcgtacaagcaaagggaggagggcggcggcggcgcggtgggggcagcagaggaggaggaagaggaacgggagtgcgcggtgtgcctcgccgtgatggccgacggggaggcggcgcggcggctgcccagatgcatgcatgtcttccaccggggctgcgtcgatgtgtggctcagggagcactcgacgtgccccgtctgccgcgccgaggtggttgttaggccggccggtgcggcgcgcgttgagaagttgccggagagcagcgcgtcgcgggcattgacatcgccggtgccggcaccggcgccgaggccgacggggacagtggtggacgacggcagggagagggacctcgaggcgcagcagtag

SEQ ID NO: 13631 - DNA, 438 bp, Oryza sativa
  Clone ID: TFbOSC18110j.C1.o2.fg
atggcgacgtcgagcgagtcggtgaaccagttgaaggacgatggtacggaggagatggacgtcgacgactacatcggcggcggcagcggcggtggcggcgaggcgttgatcgggatgaagacggtggaggcgccggacgacggcagcaactgcccgatttgcttggacggcggcggcggcggtggggagaagacgacgacggaggcgtgggtggagacgccgtgcgcgcaccgcttccactcgcggtgcctcgagtcttgggctcgggtgaagctagggacctgccccatgtgccggcgcgagctgacggcggcggcggcagcggcgacgacgacggccggagaggatgtgcatgtgctggtggccgatccgatggtggcggatccgctgcaggcgaggtggaatttgtttgttcaacggtcaactgatggtttctag

SEQ ID NO: 13632 - DNA, 2631 bp, Oryza sativa
  Clone ID: TFbOSC21837j.C1.o7.gm
atgccgccggcggccggcgaaagcggcgacgacgtcgtcaggctctccttctacgacgtcatgttcgtctccatgatgccgatccagcgtctcttcttctacgagggcgccgcgctcccgccgttcccgtcgctcgtcggctccctccggtcatccctcgccgccgccctcgccgccttcctccccctcgccggcaagctgacgttccgcgcggcgctcggcgacgttgtgctggattactccgccgccgccgtccccccgggcgtcaagttcgtcgaggccgagtacggttcatccgacgagatcagcgccttcgacgccatgcgtcgcctcgccggcgacgtcgagcacaacgtggaggcgttcatggagctcgtgccggagcttgaggtggagcaacttccggccccggtgctcgccgtgcaggtgaccaggccggcgttccggaacgacgacggcgacgacgcggtaggcgtcgtggcggtcggggtgtccgtgcaccacgcggtggctgacggccagtcgctgtggcagttcatgaaggcgtggtcggcggcggcgatggtgggctcgccggcggcgccgggcctcctgccgccgacgtttgaccgggcgttgattcgccatcccagaagtgaagagctcgccagcaagttccttcaattgagttctccgactctacctgaggtgaagctatcccgtgtggcggctgacgtcatcaagggccagcggacgaggaccttccttctccgcgccgaccaaatcagatcgctgaagcgtcgcatctcgcgacgcatcgccgccggcgagccaccgcgcgagacggcgtctccagtaacagcctacgtcgccatcgcgtcgctggtctggacctcggtcgtccgcgccaagccgcacgacgccgccgacgaggcctacctcatggtcaccgccgactgccgccgccgcctccgcccaccgatcgacccggggtacttcggcaattgcgtcgcggcgtgctacgcgcgcgccaacgtgggcgccctccgccgcggcggcggcgacaacggcggcgacgacgaggggctcgcgcgcgccgcggcggcgatcggggcggcgatccgcgagcagctggaggacccgctcggcggcgacatcgaggggtggctccagttccacctgagcctcccggcggcgaggctgacggcggtggggtcgtcgcaccggttcatggcgtacgagacggacctcgggtggggcgcgccgagccgcgtcgagctcgtgtcgccgttcgcgcgcgagctggtgatgctgctcggcgcggcgggcggcggcgtgcaggtgtccgtgtcgctcgacgaggcgcacatggatgccttcgagaccagctgcatcaggatgagcaccctagtgcgagtcctcgccgtctcccatgtccaccctgacgaggcggccgtcggagccgcatggccgccgccgaacaccgtcgagctctctttcttggacagcttccaagttgcccgcggagcgatccagcggctcttcttctacgagggcgacgacctcccgccattccagtctatcgtcggtgccctgcagtcctccctcgccgccgcgctccccgtcttcctgcccctctccgggaagctggcctacctcccggagtccggcgacgtcgtcatcgactactccccggacgccgtctcccccggcgtcaggttcgtcgaggccgagtactccggcagcgtcgacgacatgcgccgcctcgccggcgacgacgagcaccagattgaggcgttcttgcagctcgtgccggagctcgaggtgagcatgctcccggccccgcttctcgccgtgcaggtcactaggcctagagatgacaacgtcggcggcggcggcgccggcggcgcggtggccgttggtgtggccattcaccacggggttgccgacgggcagtcggtgactccactcccgatgggggtcgacatgtcgcagcagagaaggagaaccttcttgctcaacgccggcgagatcgaatctctgaagcagcgcatatcggagagcgacgccggccgcgagcagctgcgcaaccggctgtccacctacgtggccatctcctccctggcgtggacgtccatcgtgcgcgccaagtccctggacgccgccgacaaggtctacttcatggtgagcgcggactgccggcgccggctgcgcccgccggccgacaagggctacttcggcaactgcgtcaccacatgcgtcgccaaggccatctccggcgacctgtcggccggctccgacgacggactagccggtctcgcgcgcgccgccgcggcgatccagagggcgatccgggagggtctggaggtcccgttcggcaactcggagcgctggctcgacggcgccacggcgacgaccccgccggtgaggtcgttcacgaggtcggggtcgtcgcaccggtacatggcgtacgagacggacttcgggtggggcgcgccgagccgcgccgagctggccaccgtgtacggcgaggaggtggtgatgatgctgggcgcggcggacggcggcgtgcaggtgtcagtggtgctccgccgcgcgctcatggatgcgttcgccaccaacttccggcggcagctggtggcgtcgacctga

SEQ ID NO: 13633 - DNA, 1599 bp, Oryza sativa
  Clone ID: TFbOSC400832j.C1.o5.fg
atggcggggagatgcgccggcggcggcgacggcggcggcgagggcatgctggcgcggctgcggagggcggcagccaggcggatcgggctctcctgcgcctccttcttctcccacgccgccacctccccttccccgcctcccaagaccatctcatgctcagcactgaatgcgcctgcagacagcactgatgaagaccaggaaaagctggaggagcccactagcacaagaatggctgacaagaatctctgtgcaatatgtctggagcccctcagcaccggcagcgttgatattgacaatggtgacaggccagcaatcttcacatcacaatgctcccactccttccacttcctatgcatcgcctccaacattcggcacggcaatgttacatgtcccatctgccgtgcacagtggtctcagctgccgcgtgacttgaaggtgccaccattgctgcagaacaaccagtctgacccaatcctccgcatccttgatgacaacatcgcgacatctcgtttcaacagaaggtcatccatccgtgctgcccggtacaacgacgatgatccggttgagccttacaccttgaccgagcatgtggatccatgccttcgcttcgctctgatcccatccccagtggcggctcaccatcatgctctcggacattacccttgtggccgtgtgatgccactgcagcagcattgccagtacagcagctcctccatgctctcaccgccacagattgcttcaccaagtgggcagaggcgcgcttacctctccgtcagtctcgcgccacagccagccatggacctagttctggttgccagccctaatgggccacatctcaggctcctgaagcaggcaatggcgctggctgtcttctccatgcgcgcaattgaccggttagccattgtcacaaatgccaccactgcaacccgcgccttccccttgcgccgaatgtcatcccatggaaagcgaatggcattgcaggtcattgaacacctctgctgtgttggtggtactgatcctgtaggggcattgcagaagggcctgaagatactagaggaccgggcgcaccagaacccaagcagttgcattcttcacctgtcagaccatccaatccgaagctgtttcggggtcgacatgaaccgtttcaacatcccggttcaccagttccatgtcggcctcggtttcggggtgcagaatggctttgtgatgcacgagtttgaggagctcttagcgcggttgcttggcggtgtcataagcgacacccagctcaggattggcgagcacggtggagtggtgaggctaggtgagctgaggggtggcgaagagaggaggatcccgcttgacctggtgtcggactgcggcttcatacttgttggctatagctatctggaaggtggaagggaggatcagttcaggacaggcgaagtcgctgtcggtttcgaagagaaaggcgataaccggtactgcggggtcagggatgccggtggtctgagtatcggcggtgagaggaggagcagctgctgcgccgagagatgggactaccttgatccgttcatggcgcggcgatgggcgaagcatttcaatgtgtatagggcctga

SEQ ID NO: 13634 - DNA, 629 bp, Oryza sativa
  Clone ID: TFbOSC900165j.C1.o19.gp
aaagaaagaagcacctcgacattccttctatttactttatacttaaacaaagggaaagcattgcatacttacatttgcatgcgagtatatacatagatagcacggcaaaatcctagttaatccagatcaccctttcttaaatttgagaggagttattaattaatccacatcatctatgagcacacgcggaagaggaggaatcggatccgtgccgcgttgctccgggccctcgccgtcatcgtgggcccggcccatgaccagcacgctcagcaccacgcgcctccccctcatcaccaccctctccccatgcaccatcgccaccaccacctcctcctcctccgcctccgccgccgtcgccggcggcatctcgtgccggcacagcgggcagctgccgtggatccccagccaccgctccacgcactcgccgtggaaccggtgcccgcacggsatctccttcctcctcccgctcccgcacgtctccctggactcctccccgtcgtcgaggcagatcgcgcagtcggacgcctcctcgccgtcgtcatcctcctcctcgacctccctcagcgccgcgatcgatgccctggacgccggggccacgccgccgccaccgtcggcgctggcgctgccgt

SEQ ID NO: 13635 - DNA, 756 bp, Oryza sativa
  Clone ID: TFbOSC900112j.C1.o20.fg
atggaactcccgtggctggatctgcccttcacgctgctgacgctgctgctggcgacgcggctcgcctacgactactacggcgtcgtcgcggccaccttcacggggagcttctcgctccagatcttcctcttctactgcttcgcgcgctggtaccgccacaccatcgccgcccgcgccgccgcagacgccgacggggatggcggcggcggcgcggtggcggatgaggaggcggcgccgcccgtgctgatcccgctgctggagggccggggcggtggaggcgggggcgcgggcgcggcgtcgtcgctggcgaaccggtgcttcgccgtggtgttcatggtgttcgtgccgctggtcatcgtggtgttcgagcggagccaggccgacgtcgtggcgtacgcgctctgcctcgccaacatcctcgtcatggtcgtctggctctcgcccgacgccgccgcggaccccgcgtcggcggccaagtcgttcctccgcctcagcgacgacgaggacgaaggcagctgcagcggcagcggccacggcgccgccgaggacaagtgctgcgtctgcctcgccgggatgcgggaggcgcaggcgctccgcgacctcccccggtgcggtcaccgcttccacgccaagtgcatcggcaagtggctcacggcgcacccgacgtgccccgtctgccgcaccacggccgtgccgccgccggcgccgctgcccgccagcggcgaccatgccgacgacgccatcacccctgtctag

SEQ ID NO: 13636 - DNA, 504 bp, Oryza sativa
  Clone ID: TFbOSC900112j.C1.o18.fg
atgctgtacctcgccggagcacgctgggtgctcctgctcctcgccgcggtcacggtcctcctctgcctccagctatcggccagggacaacgccgtcgatggcgccgccgccgccgccgctgccgcaggcccagctcaaacagctgatctcccgctgcaacagccggcggcgctcccgcgcgaggcgcccgcagaaggtgatctgcgtgggcttggcgcgtcgtcgtcgccggtcttcgtcgtcgccgtcctgccggcgtacgcgtggaggaagaaggccgccgtcgacggcgacgacggggacggcgagtgcgcgatctgcctcggcgaggtgcggcgagggcaggtggtgaagcagctgccggcgtgcacgcacctgttccacgcgaggtgcatcgacaagtggctgatcacgtcgcaggggacttgcccggtgtgccggactccggtggactccgccgccgccgccctgcaagccgtgagagttgccgatcagccaccgtag

SEQ ID NO: 13637 - DNA, 1686 bp, Oryza sativa
  Clone ID: TFbOSC401716j.C1.o92.fg
atggacgccgatgaggccgcggggagtagcaggaggatggatctgaacctctaccttggcctcccacgcgccccgcgcccgcgccgctccgacctcggctccgacctcgccctcagcaccccgatgccctcctccccgtccttctccgcagcctccgtcgacgcgccgccgccaccgcccgagctgtcgcatcccccgtactccccctctcacgccgacctttcccctccgctgcaggaggtctactccctgtacaaccccgacgacccgcctgcttccgagacgcacctgccgccgtatgcgccgcctccggctccggtggtctcggagctccctgacgacctcgagtttggcctccaccccccgccgccgctggtgcgtgccagcgaactgctaggttgggaggaccggccgtcttcgtcgacggcatcgtcctctttcctccctgacaccgcagcccgttactggcggcttctcgagcagactggaagcagatggctccgtgcgaggcggtttaggtcggaccttccgccactcagttctgaagcttacccagctgggcgtgatgctgccgcagtcccagtgctgcagcatgaaccgatgaatgatactgttgaacataataaggtagctgccgatggcgcggaagtaggcgcctccgaggaatcggaggagcagggcaggagcgctgccacatttgagtgtaatatatgcttcgatatggccagcgagccggtggtcacctcttgtggccatctcttctgctggccttgcttgtaccaatggctcaatgtttattccaatcacaaggaatgcccagtctgcaaaggcgaggtgactgaggcgaatattactccgatctatgggagagggaattcatgtttggatgccgagaaggctgtggaaggtgggaaacaaacaggtcctactatcccaccaagaccacatggaaatcggctcgaaagcttcaggcagcagtttcaccatttgcgaccgatctcaagaaggcttggtgaggctcatgggttattgtcatcatggaggcgccttctggaccaacagattatgaatactgcgagtaggtttgaaggtccgcctgaatcagctgtgcaggaaatggttgacactgctcacgctcagcacaccagtcgcctaagtagattggcgtcaaggatgagagcaagacggttgctgagagaagcagacaaccctaaccctcccgatggcggatccacttcccctgacagtggtttgatcagaaacaatgcatcggatccatccagaaatggtccgagctcattattaccagatggaattgactggttgcgtggacttacccttcttgggtatgaagacacggaaagatttgcatctgccatgagtgattttagaaggataactggaccaagccaatatggtgcatcggcttcatcatcgaatcctccaaatctcgagtcaacatttgacagaactcatgttgttgcagcaccttctgcagaccaagcatctaactcaagcactgctgcagtgatacagggggatgctggtatctctgagagtgcaggagaaccaagtaacgcggggtcatcaagatccctgaggaggagagggaggagcagtgccctgggttctttggatgctgatggcgggggcctccaacggaacaagaggcgaaggataaactga

SEQ ID NO: 13638 - DNA, 600 bp, Oryza sativa
  Clone ID: TFbOSC405090j.C1.o7.fg
atgtcgtcgacggcggcgggcggcgcgccggggccggcggcgcagcgtcatggcggcggcggcggtggaggggggtgctgcagctcaggcgtgacgctggagctcgtcggcgcgttcacggcggtgtgcctggtgctgtacggggtgatactctacttcaactacctgtacgtgcggtggagcggccgcgacggcgtgcaccggacttcgggcggcggcggcggcggagggcgtggagcggcggcgaggaagaggggcggcggcggcggcctcgacaaggcggcgctggcggccattccggtgttcaggttcaaggcgtcggcgtcggcggcggcgctcggcggcggcgaggcggagtgcgcggtgtgcctgagcggcatgcaggacggcgacgcggtgcgcgcgctgcccgggtgcggccacgccttccacgccggctgcgtcgacgcctggctccgcgcccacggcacctgccccgtttgccgcgcgcgccccgccgtgccgcctcctccgccggcgaaaccaccctgcctgaaggcgccggagcccgccgccgccgccgccggccggcagccggtcgacctggagagccatgtatag

SEQ ID NO: 13639 - DNA, 2370 bp, Oryza sativa
  Clone ID: TFbOSC401785j.C1.o3.fg
atggatgccgcagctcttcagtatgagaaccagaagctggtgcagcaattggaggcacagaagtccaaaatgcgtgcattggaaggcaagttcaaggagctgagggatgagcaatgttcttacgacaatacattgatttgtttgaataaaatgtggaatcagctgattgatgatttagtgctgcttggggttcgagctggtggggatttaaacggtttgcaagcgcttgatcatgaagagatgtcagaagaatctcttgagtcatgtccttctgaggagatatttctcttcagactcttgaattccaggaatttcagaaataatgatgacagtagcctgtcaaaattagttgaggaagctcttgccttgcgctattcaacaacagttactctgatgaagtccctgcaagaggcttttgctgtacagcaggctagaagtgaatctttatcattagctttaaatggacagaactccagtgaagacgttattgtggcccttgaaaaccataatgattacttgaaagaagtggttgacaatttacgtcaagctgtgtctatcatcaacaggaagcacgaaaagtatctggatgagattgaggctttcaaaaacaatcaatcaagagaactacatgaagtaaagtgtctttcaggtgagctagaggaaagcatggcagagcttgaggaaagccgtcgaaagttggctgttctccagttgcaaacgggtggaggctcactgatgaacacatctgctcctaacggtgtgaacggtagtgtttcaactgataaatcttcagacaagggtatgggctggcgagatctgaaagatgctgttgaggaggctaagactcttgctgcaaaccgcctatttgaactccatgagactcaagaggataatctgatactatccaagcagttggaagatattcaggatcaattaaaagatgagaactatattgttacatcaaaaccatatacgattctcagtgaccagttacaccatctgaatgctgagatagagcgatacagggggttagttgaagtgctacaggccaaaattgaggacctggaacatgaaatccagaaacttatggctgaaaagaatgatcttgagatcaaggctgaggaagccttgcaagattcagggaaaaaagacttcaaggacgagattcatgttatggctgcatcactctccaaagagatggaattgttggacaatcaaatgaatagatccaaggatgcggcttctgaagcacttgcactacgtgaggaagctgactatttaagaactttgctagctaagaagattgagacactggaccaggaaaagcaggagttacaatttatagtggatatgctcggtaaagaatgttctgagtcgagggcaatttcagagattgaagaatcagaaaaccgagctcgcaagcaagctgaatatttgagaaaatgtttagaagagcataatcttgaacttcgagtaaaagcagcaaatgaagcggaaactgcatgccaacaaaggctttcaattgctgaagcagaactggaagacttaagggccaaagtggatgcatcggaaagagatgttatgaaactcaaggagtcaataagaattaaagaagctgaagtagatggccatatttctgaaattgagacaattggtcaagcatatgaagacatgcaaacccaaaatcagcaccttcttcaacaggttgctgatagagatgattttaacataaagctagtatcagatagtgtaaagatgaagcaagcctatggttcccttcttgctgaaaagaatatgctacagaagcaacttcagcatgtcaacagttcactggagtcatctaaactaaaaatcaccagtggtgaagagcagatgaagacctatgtagcacaagctatgaaatcttcttcagagaataggcatcttgcaattagccttgaaaggactatgctggaggtatcagatgcagagaaggagctcaagtggcttcggtccgctactggatctgctgagaaagaatatgagataaatcagaaaaaaatagctgagctaaaaatggagctagagcgtgagagaaatgagaggataaagcttgaggaagaatacgaagaggtgaaaaacgaagtcagtgagctaacctcagaaactgaagagactactatacagaagctccaagatgaaataaaagaatgcaaggctattctcaagtgtggggtgtgcttcgaccggccgaaagaggtcgtgatcaccaaatgcttccacttattctgctcgccatgtatccagaggaaccttgagatccgccaccgcaaatgcccaggttgtggcaccccctttggacagagtgacgttcgggaggtgaagatctga

SEQ ID NO: 13640 - DNA, 1380 bp, Oryza sativa
  Clone ID: TFbOSC422293j.C1.o1.fg
atgcttgcaaagccagaatcagtggacgctgttcaacaatccattaccacttacaaggccaaaattgaggacctggaacatgaaatccagaaacttatggctgaaaagaatgatcttgagatcaaggctgaggaagccttgcaagattcagggaaaaaagacttcaaggacgagattcatgttatggctgcatcactctccaaagagatggaattgttggacaatcaaatgaatagatccaaggatgcggcttctgaagcacttgcactacgtgaggaagctgactatttaagaactttgctagctaagaagattgagacactggaccaggaaaagcaggagttacaatttatagtggatatgctcggtaaagaatgttctgagtcgagggcaatttcagagattgaagaatcagaaaaccgagctcgcaagcaagctgaatatttgagaaaatgtttagaagagcataatcttgaacttcgagtaaaagcagcaaatgaagcggaaactgcatgccaacaaaggctttcaattgctgaagcagaactggaagacttaagggccaaagtggatgcatcggaaagagatgttatgaaactcaaggagtcaataagaattaaagaagctgaagtagatggccatatttctgaaattgagacaattggtcaagcatatgaagacatgcaaacccaaaatcagcaccttcttcaacaggttgctgatagagatgattttaacataaagctagtatcagatagtgtaaagatgaagcaagcctatggttcccttcttgctgaaaagaatatgctacagaagcaacttcagcatgtcaacagttcactggagtcatctaaactaaaaatcaccagtggtgaagagcagatgaagacctatgtagcacaagctatgaaatcttcttcagagaataggcatcttgcaattagccttgaaaggactatgctggaggtatcagatgcagagaaggagctcaagtggcttcggtccgctactggatctgctgagaaagaatatgagataaatcagaaaaaaatagctgagctaaaaatggagctagagcgtgagagaaatgagaggataaagcttgaggaagaatacgaagaggtgaaaaacgaagtcagtgagctaacctcagaaactgaagagactactatacagaagctccaagatgaaataaaagaatgcaaggctattctcaagtgtggggtgtgcttcgaccggccgaaagaggtcgtgatcaccaaatgcttccacttattctgctcgccatgtatccagaggaaccttgagatccgccaccgcaaatgcccaggttgtggcaccccctttggacagagtgacgttcgggaggtgaagatctga

SEQ ID NO: 13641 - DNA, 318 bp, Oryza sativa
  Clone ID: TFbOSC900044j.C1.o9.gm
atgggggtggtggagaagaccgatgcgagcaaccctgtgttcatcggagagatccgagtcggaggcgagctgagcaaggccatccaaggcctgcgtgaggtgacggcggccggcgcgagggaggaggagtgcgccgtttgcttgcaggatttcgtggcggaggagaagctgaggatgatgccgtgctcccacaccttccaccagcgctgcatcttcgactggctccggctcagctgcatctgccctctctgccgccgcgctctacccacacagcactacagcaggaggatgacgacaagcttgggtgcccggagctag

SEQ ID NO: 13642 - DNA, 594 bp, Oryza sativa
  Clone ID: TFbOSC400283j.C1.o28.fg
atggagaaggggggattcatcgcaatattcgtcgcctttgggctcatcaacctcggcttgcacttgtacgagagggcgccggggtggttggtgtggatgctcggcggcgtcaccacgctggaccgcgcgctgggcgactgctcgatgtgccggtacggcatggtggccggcgacgtcgtccgcacgctctcctgcggccacgtcttccacaaggactgcgactacagcgtcgacaaatggctccgcgagcacggcctgtcctgcccggaatgccgcaagaaggctcgcagcgttcgcgtgctgccgtggagagcgcggccgcagcagccgttgccggaggagcagaacccgccgccacaggagacgtctgcgtcgtcgtcgtcgtcgtcatcgacacacgtcaggattgctccggaggagccgggcgacctcgacctggaggctcaggaccagctgctaccgcccccggcgacaggttcgcccaagggcccggaggagcagcacccaccgcggccggcggcggcgacgtcgtcgagctccgccgacacctcgagtttggaggagccacttctgcggccatctgcgtcgccatga

SEQ ID NO: 13643 - DNA, 1038 bp, Oryza sativa
  Clone ID: TFbOSC400555j.C1.o10.fg
atggcctcatggccgacatcatgtaccaaggtgtacgagatcattcagttttcgcgctgcaaggaggaggcgagcgcaacatcaagcatcatcgaccacaggacggccaaagtcggcagacgagatgacggcccgaacatgtcaaaggtgctaagagctacaatacctgagaattcagttagtggatcatcagttcgaggaaagctgcgagaaatggagatggacttggcagtcgagcagtacggcagtataggtgcgtcctccatattaagtactctctccgtcccagaatatagcaacctagcatgggatgagacctatcctaagaccatgttatctgctctctctgcaacaaagaacaggatgtacaacaggattgctccaattgtggggcatgcttgggtaaatatttctgcgcaaaatgcaacttttatgatgacgatgcaagttgtgctaaatatgcattcctgtgacggagtaatgaaatatgagccctttttgataaatctcaccatcacattttacagaactggtggtgcagagaacttctttcactgtgacaaatgcggatgctgctacagctatgtgctgaaggattcccatcattgtgtggaaagagcaatgcaccataactgccctgtatgcttcgagtatctatttgactcaacaaaagacatcagtgcactgcactgcggacacacgatccatctggaatgcctatacgagatgagatcccatcaacaattctcttgcccggtctgcctgaggtctgcttgtgacatgtcccatgcatggcaaaagcttgatcaagagaacaccatccaaataactcttcactcaggttgcagcatcgccgatgccagtgatctatcagaagaaaatgatatggatcctatgcaacgactgtgggacgacatcgaacgtgcaattccacatattgggacacaagtgccccggatgcagctcttacaacacccggcagacaagagccgcccctgctgccgcgtgctccagagtctgaattctgaagaacagtga

SEQ ID NO: 13644 - DNA, 1248 bp, Oryza sativa
  Clone ID: TFbOSC419721j.C1.o5.fg
atgccgctccaccaccgccgggcgctgcactccaacgactgcgacgacggcggctacggctgctcctcgtggccgctgtcccctcctcctccgagcgtcatccttactcccttcgcttccccttcgccggcgccctgggcttgcccgcccgcttttcctgccccgtcgccgtctcctctccatggcgccgcggggggcaggagggatcagggaggataccacggctccccaccaggcggtggcggtgatgcggacgagcaccgccgacgcatcatcaaccttatcgtcgtcggcgccgcggcgctcgcgttcctctccatgatcctcctcgtcgtgatcgtcgccgtccggcggcggaggctgcggcggcggcggcagaggcagcaggcgctcctcgcccccgcggcgccggccgacgcggtggcggtgaacgtcgaggacggcggggatgacgatgcggagggagggggaggaggaggaggaggaggaggagtggtgcaccacatctggtacatccggaccgtcgggctcgacgaggcggcgatcgattcgatcgccgcgacgcggtaccgcgcgggcgctgggctcctcggcgccgccgactgctccgtctgcctcggcgagttccaggacggcgagctggtgcgccttctccccaagtgcggccacgcgttccacgtcccctgcatcgacacgtggctccgcgcccacgtcaactgcccgctctgccgctccgacgtgctaggccccgccgccacggccacggagtccggtggcggcgacaccggctccatgccacaagctgatccagtcgcaaacaccatagccgcagcccagcaagcggctgcgccgggcgatgcaatcttggaacgccaagaagaagaagaggaagcagaacaggaggaccaaggagcgccgccgcacatggaggaaaaccggcaagagcaatccagctcaccggatccattgccgccgccgcgcaacgtgcggcgcgcggcttccatggacgcggcgatcgtgtcgaccgccgcagaggtcgcggcgctagagcggctgccggaggcggctcctgaagaggagcagagcggcggcggcggcggcggcgacaagcgcggcggggctcctggcgcgtcttgcctgaaggtctcgagctccggccgcctgagcaacctcggcgccgccgagaggctcccgaggtcgttcttctcgcggcattgccgtgcccggagctcggtgctcccgctgtga

SEQ ID NO: 13645 - DNA, 1329 bp, Oryza sativa
  Clone ID: TFbOSC401685j.C1.o93.fg
atggttcaacccaataatgagcaactcaaccaacctctgcctttaggtcagaagttatttgtgcatgctggaaatgatgcagcccttaaaattggcccttcataccatgggaatgtggcaattagatcgaatgatcttccatcttcaagtcgagtggcacaatattcaggtcatagagttaaaaacacaggaaccttacataactcctatgttcactatcctgctggaagctctggtggccatgtatcctacaatcctcaaactgaacctgttataacttatccacatagatctgagggagaatttgctcgagggagttcccaaatcgacaacagaactgctgcagtgaaacgaaaaaatcctgtcatttatccagagtatagcatcaatggtgatggttattgtgccggtagctcatcaagtacccagttctctaattatccacagccagctccattttctgagtccttgcatcgtcaaatgcctccaagtgttggcccaattaattggaatgaccagagcttgcacatgtatttaaatgattatgtaggtgcctctggaatgcactctggagaaatgccttacactatgggaagcagcaactcatctgttcctgtcccaactttacaaggctcttcaagcagtgcaatatttgccagtggtgtctttgcacctaggcatgttcatggtgacactgttcctagctacattcatctgccttctgtagcatcctctagctctacagcgattccccatgaggtgatcattccgagctaccaacctgctacctctgcaactacctcaacacccatgagggccagtcagccattacctgtcagagctgttgcatcttctagacatgcaaggaatgtactcatagggcatgctaacagcggaaggaacagaagggcgagaagctcatactatggtattcagcctttgatgattgatgcacagcaattgataatgatgcaacaatttgctctccgcgaatcaagagaagcacaagacccccacagggccatgagactggacattgacaatatgagttatgaggacctgctggctttgggagaatctattggtaatgtctgcacaggcttggtggacgagaaaatctcaggttgtgtgagagaagtgatctattgcagttctgatgaacagcaaaatgatcaagatgatgggaaatgtgcaatttgtctggaggaatacaaagacaacagtttgctgggaatactgaaatgcaatcacgacttccacaccgactgcgtcaagaagtggttgaaggagaagaactcatgcccaatttgcaagtcggctgctgcatag

SEQ ID NO: 13646 - DNA, 579 bp, Oryza sativa
  Clone ID: TFbOSC400860j.C1.o33.fg
atggcggccaggaagcttctagagcagccgggcaccgccgcgccgccggtgctgggcggctccatcgccgacgacagggacatcgtcatcatcctcgcgtcgctcctctgcgcgctcatctgcgtgctcggcatcggcctcgtcgcgcgctgcgcgtgctcccgccgcggcggcggcggccccgacgcggccgccgccaacaagggcgtcaagaagtccgtgctccgcgcgatccccaccgtcgagtacgtctcccccggaggcggcggcaaggggaaggaggaggaggaggcggcggcggaggagggggagcagtccgagtgcgccatctgcctctccgacttcgagcacggcgacgccatgcgcgtgctcccccagtgcggccacgcgttccacgccgcctgcatcgacaagtggctgcgcgggcactcctcctgcccctcctgccgccggatcctcgtcctccagcttccccaaggcgagcggtgccagcgctgcggcgcgcggccagagccagccgccgcctccgcggtctggaagccgacacactacagcgaggtcccgcccttcttgccgtag

SEQ ID NO: 13647 - DNA, 1164 bp, Oryza sativa
  Clone ID: TFbOSC20771j.C1.o9.gm
atgcttccgggggtggagctggcgaggcggcggcgggtgcactaccacggcgacggggcggcggcgggggcagggtttggggagcaccaccacgggcactacaactacttccaccagcagcaccaccgtcaggcggtggcgagcgcggaggcgggggcgggcgcagggggcgaggtgagccccgcggtggcggcgcgcatccggctcgaggagaagctgcggggcgccgcggccgcgccctcgtcgtctctctcgagacaacagaacaaccagcaagagcagcagattcagctgcccactgaacccaggcctactcccaaacattcgatgaccatgctggaggcgccatcaacaagaaaagccccccgccgcgagatgaggaggacactttccaaggccgatctctgcgctgtgtgcctcgacgaagtgcgggagcgacaccagcgggtcaccaggctaccctgctcccacaagtaccactcggagtgcgtcctcccctggctggccatccaaccagactgcccctgctgcaggacgcaggccatgatcgccatgctgccagatggagcaggagcacaaaatggagatgggagtaggtgcagcaaggtgaggtgcgggatggggagctgcagcgagtcgagcgactacgtgttcgggttcgcgtgcaggtgcaaccccgggtggagccgctaccacctcggcaacctgcagttccccttcctcccatgcaccatcaactactcgtgccagaacgggtcgtcgtcgccgtcgccgtcgccgccaccgccacctcctccgccgccggcgatgccgtcgctgacgaacctctccatctacgacccttgcctcctccagtactgcggcgacggcggcagctgcgagaggtcgtcggagttcggccaccgctgcgcctgccacgacggcttccagaaccttctcaacgacacctcctacccttgctaccggcagtgttcgcttgggtcggactgctccggcctggggatcagcatgttcaacgggtcgcagccggggacggcgccgccggcgccgttctcgttcaccgtcaagaagtccggcgccgccgcctcctcccttctgccggccggcggcggcgtgctgctccacctcctcctcgtgctggtctcctccttcatgataggatga

SEQ ID NO: 13648 - DNA, 906 bp, Oryza sativa
  Clone ID: TFbOSC900339j.C1.o2.gm
atggccagccgctcgccgccgcctccgccgccgccgccgccattcccggacttagagacatgggattacttctttggccagtacgaccacccctcgtcgccgtcttcctcggccacggcgatgccgcatctgccactctcccgcgtatcgtcgtcgtcatcgttcgtctccacagagctggaactgccgccgcctccacccccgccgctgccgacgcttccggcaaagccactactccggcggcgcgtagcctcgccgtcgtcatcgtccttttccacagagctactgccgccgccgccgccgctgctacggcgggaaccctcgtcgtcgtcgtcgtccttctccactgagctgctgctgctgccgcctcctcctccgccgccgccgtttctctcctcggattacttcatctcctccgatcctgacacgccgccgcacgccggtggtccaccgacgtcttccatccacgactcctccttcgtgtcaggcccatcgtcgtctcgaccggcgctggccacggtgatcactgtcaccgtctccgacgacgcggcggcggcggcggcctgcgccgtctgcaccgacgccctccagctcgcgtcgccggcgtccaggctcccgtgcggccacctgtaccacgcccactgcatcgcgcagtggctgtcgctgcgaaacacctgcccggtctgccgccgcagcgtcccgatgcgtactgaggagaccgcgccgccatggtcgccgccgacggagaccgaccaagaggccgtgccatcgccgccgccgacgacgacgactgcgaccgatcaccggcggcggtctctgccgggagaacgccggatcaggaggatttgccgcaggttgcttaattacatggaaatcagccgtcagcggcagcaacacactgattga

SEQ ID NO: 13649 - DNA, 627 bp, Oryza sativa
  Clone ID: TFbOSC101188j.C1.o17.fg
atgagcggcggcggcgcgccgcctggggcgccggggatgatgacgccgggcgacggcaactccgtcggcatgttcagctccgaccgcatcggcgggttcggctacggcgtcggcgtgtccgtcgggatcctcctcctcatcaccaccatcacgctcgcgtcctacttctgcacgcgcgcgcccgtcaccgcggccgatgcagcggcggcggcgggatcgtcgcggcggcaccgcggtgggggtgggggcggcggcggcggcggcggcggggccgggcacgaacacgacgacgtcgagctcggcatcgacgaggcgacgctcaaggggtacccggaggtggtgtacggccagccgaggaaggaggcggcgaaggcggcgtcggcggcggcgacgaagaagggcggcgcaaccacgtgcagctgctgctcgatctgcctcgacaactacggcgacggcgacgtgctccggatgctgccggagtgcggccacctgttccaccgggagtgcgtcgacccgtggctccggcagcatccgacctgccccgtctgccggacgtcgccgctgccgagccccttgccgacgccgctcgccgaggtcacgccgctggcaatggcgaggccgtcatga

SEQ ID NO: 13650 - DNA, 438 bp, Oryza sativa
  Clone ID: TFbOSC964j.C1.o1.fg
atgctgttcttgaaagagctgcccatctggcaggcgttcgggttctccttgctcacaggagccctcgccggcagcaccctgtacgccgtgtgcgtcgtcctcctctgctgtgtcgatcgccaacgtcgacatgccggtgcgccgccgcccgatccgaagatctggctgccggaccacacgcaccatcgccggcagcgggatgaatcgtcggagtgcagcatatgcctgggggagttggaggagggggagaggtgctgcacgctggtggcgtgcaggcacgagttccacaaggaatgcatctaccggtggctcgccaaccacaacacctgccctctctgccgccacatgcccctcccccctgcttcatcaccaccacctgcgccgccgcctcaccatgcttctcctccttccaatgtaccgcctgctgctcatgtttag

SEQ ID NO: 13651 - DNA, 1368 bp, Oryza sativa
  Clone ID: TFbOSC401457j.C1.o8.fg
atggcggcggagtcgtcggctgctgctgctgcgggcgggggcgagaggaggggcccgatggatctgaacctgtatctcggcctccctccgctgccgccgcctccgggaaggctggatgtcgccgccgattacccgtcgctgctgctgaactccgccgccacggtggcgaacgagcaaaggggctcggtggtggtggcggcaccgcctccggcggcggcggcgtactcgccgtcgaacgcgctgtcagcgccggagcaggtgctggtagatcctgttgcagcgtggcttgttgatcccggtgagcagcagccggtgccgccgctcgagacgccatcgtacatggccagggcctcgtcgacgctgccacagatttttgcttgtgcagcgttggaaatgcttgtgcagaccggtggagcaatcccacctactggtcttataaggggagcagagattgctgctgcaagccgccctatgacgccggagaatcggctgcggaggttgatccaggtgagcgatcaacacggcgtcgggaatgggagggcggggactgggccagtgagccgcagccgacgggcgaatagcccggaagccgataatctggcgcgggccatccagaggtctcataattctcttgaggcatcaaggaggcagatgcttgatggtgatggcagtgatgccaccaagaaggatgacggttgcggatgcaacggcagcttcgaatgcaatatctgctttgaatcagctaaagatcctgtggttaccccttgtggccacctcttctgctggccttgcatataccagtggcttcatggacattcagagcactctgattgccctgtctgcaagggcgaggtgctcgaagtaaacgtcacaccgatttatggaagaggaggtggcgaggagaactcctccagaaatgatatccaaatccctcccaggccgagtgcgcagaggaccgagagcttgaggcagcagctgcaaaggccagacacaagaggaggcattgcaaacatggtgaggcggttgatgcaaaaccaagatatagtggtaggccaggcggcttcatctgcaccccggccaaggggtaggggtcgaaggcaggcaaaacaagatgcgccttctgcaccagcaacacagcagcaggtggtcaatgctgatgctgggagtggccatcaggctcctttgccccctcctgatgctaatggtgctgccccggctgctgctgtcgctccccaacagtcatcatctgtggagcaagcgtcgacttctagcaccgtgggtgttatagcgggagggccagcacaaggtaggaggtcaagagtttctgaatccacccctgcaaggaggacaaggaggaggcatcagtag

SEQ ID NO: 13652 - DNA, 744 bp, Oryza sativa
  Clone ID: TFbOSC900031j.C1.o15.fg
atggagctcgacgacgcgtctcgccacggattcggcaggatgggatttggatgcaagcactacaggaggaggtgcaggatccgggcgccgtgctgcaacgacgtcttccactgccgccattgccacaacgagtccacggttatctgtctcgtctgtgacaccgaacagccggttgcgcaagtgtgctacaactgcggcgtttgcatgggcgagtacttctgcagcgcgtgcaaattcttcgacgacgacgtgagatgccgatgctgcttgctttgcttctgctggatctggttgacagggaacacttccactgccaagattgcggcatctgcaggatcatgctactcggtcagcctgcgcgacaagcactgctgcatcgagaactccatgaagaacaactgccccatctgttacgagtatctgtttgactctctaagggagacgtccgtgctcagatgtgggcacacgatgcacctgcaatgcttccacgagatgctgaagcacgacaagttctcttgtcccatatgctcgatgcctatctttgacatggacaagttcttgagggctttggacgctgagattgaagcaaatatgctgcacatagattacatgggaaagggatggatcgtgtgcaacgactgcagggacacgacgcaggtgtacgcgagggtggcagggcacaagtgctgccattgccagtctcacaacacctgcagggtggctgccccggtgctccctgcttaa

SEQ ID NO: 13653 - DNA, 1335 bp, Oryza sativa
  Clone ID: TFbOSC400897j.C1.o19.fg
atggacacgtcggcgtccacctcgccgccgccgccgcgctctgtgctcagcaccatcgaggacaagatgagcccgggcgtcctcctcatcatcgccatcctcgccgtcgtcttcttcctcttcggcttgctcaacctgctgatccagaacctgctccggatgcgccgggcgcggcggcggcggcggcgcgtgggcgacggcggcggcggcgtcggcatgggcagcccgacggcgttccagggccagctccagcagctgttccacctccacgacgccggcgtcgaccagaccttcatcgacgcgctccccgtcttcgtctaccgcgccgtcgtcggcgccgggctccgcaaggacgacccgttcgactgcgccgtgtgcctgtgcgagttcgccggcgacgacaagctccgcctcctcccgacgtgcggccacgcgttccacgtgccctgcatcgacgcctggctgctgtcgcactccacgtgccccatctgccgcggcagcgtcctcgccgccgccgccgccgccgacgacgacgacgactcgtcggcgtccaccccggtagcgcggcgcgtgctcgactcggagagcctcggcgagacgttcgccaacaatggaggtggggacagcgaggggtcttctcccaaggcggcggcggcggaggaggaggaggtcgtcgaggtgaagcttggcaagctcaagtgcatcgacggcaatggcaatgccggcgacctcgccgtcgtcaaaggcaccaccaccagcaacgatggcgacatcggcggcggcggcaggggagatcttggacagagacggtgcttctccatgggatcctacgagtacgtcatggacgagcacgccgcgctccgcgtcgccgtcaggacgcccaagcggaggccgccggcgaggtcgaggtctcgccgccggctcgcgctgtcggagtgcgacttcgcgggctccgcctccaagaagggcgcgtgggaagcggcggtgatagaggccgcgtcggcggacgccgcggcggcgaggctgaacagggacagcttctccgtgtccaagatctggatgacgtcagccactaggaaggaagatgtccggacggcggcggaattggccggcggagggaggcgtgcggcgtcgttccggtggccggcgatggccgaggccagcaagaagcatggcgggatcaacgacgagcgccgcgacgtcgaggccggcggcaatggcgactcgtctctcgccgacgagcggccgtcgttggcgaggacggcgctgcagtacatcgtcggcggcggcggcggcgggcggcagcagagcagccgagttggaagccattcttga

SEQ ID NO: 13654 - DNA, 618 bp, Oryza sativa
  Clone ID: TFbOSC21837j.C1.o18.fg
atggcgtcgtcgtcgtcgtcgtcgtttgccatggacgacggagaagcttacctccgcgacatgacggcgatcaccgagttgctcgacggcgacatgacggcgatcaccgagtcgctcgacggcgacatgacggcgatcgccgagttgctagaccaggcccgttcctacagcttcgcggaccttcagtcacatgatccgccggcggcggcggcggcggccgtcaacgacgacgacgacaatgtatccgggctgatgatggcgatgatgaagacggtggatgcgccggccggcggcggcgacggcggcgactgcccgatatgcctgaacaacggcggcggcgaggagtggaaggagacggcgtgcgggcaccggttccacgcgcggtgcgtggcgaggtgggcgcgggtggggaggaaggggatgagctgcccgatgtgccggcgagacatgatgtcgccggcggtggacttgctggtgagggatatccgggccttgtacggcgacgaggagcttagtgatgtgcgcgagctgctcgaggacggtctccggcagctcgagattagcagctcgatcgccggcggtgcggaagaagcagcatatagagcttcccaggcttaa

SEQ ID NO: 13655 - DNA, 1680 bp, Oryza sativa
  Clone ID: TFbOSC418082j.C1.o3.fg
atggcgccagctcgagtccacagcaatggccgcctcctcatgcttctcctcctgctcgccgtcgccggctttgcggcggcgcagccgagccaggacaatcctccggcgggctactacgcgaccaacttcagcccgtccatggccatcgtcatcgtcgtcctcatcgccgccttcttcttcctcggcttcttctccatctacgtccgccactgctacggcggccgcggcgactactcgaccaccccgctgccccggtccggcgccgcgcggtcgcggcggcagcgcgggctcgaccagtccgtgctcgcgacgttcccgaccatggcgtacgccgacgtgaaggcgcacaagtccgtcaagggcgcgctcgagtgcgccgtctgcatcagcgagttcgacgacgacgagacgctgcggctgctgcccaagtgctcccacgtcttccaccaggactgcatcgacacgtggctcgcgtcgcacgccacctgcccggtctgccgcgccaacctcgtcgacggcgcgtccgagccggcgagcgatgtcgccgccgagctaccgacggcgcccgctccgcgcccggaaggcgcgacgccgtccgaggcagcagcgccagggggggaggcgccggcggcggcggcggcggcggcggtggtgatcgacgtggaggagaccgaggaagagaggatcataagagaggaggcggccgagctaacgcgcatcggcagcctgaagcgcgcgctgcgctcgaagtccggccgcgcgcccgccgcgcgtttcccgcgctcgcattcgacggggcactcgctctcctcctccgccgcggcgagcgccggcgccgagaggttcacgctgcggctgcccgagcacgtgctccgggaggtcatcgcggcggggcagctccagcgaacgacgagcctcgtggcgttccgcgccggccgccaggggagcacgcgccgtggcctcaggtcgggaggcggcggcggcggcggtgaaggcagcagccgcgccgggagaagcgtccggctcggccagtctggacggtggccgtcgttcctgccgcggacgttctcggcgaggctgccggcgtggggatcaaggtcgacgcggaggggcgacggcgacgggtccagcaagggcggcaggactgccggctccggcgccggcgccggcggcaacacgacaacatgctcgccgcggatctcctcaccgtgctcgccgcggacctccccaccagtgccgccgcacctctttgtcatggaatgctacctcggcggcgccgacgcgtgcgccgagctcaccgagaacggccaactgctagtgatggcaaagaggctgggggaggaggggctgatgcaggagttcgctagtagggtccggctgctcatggacccggcatggacgacgccgtggaggcggccgggaggagaagcggggcacgccgtcgatgcggcggcggaagaggaggaggacgccggccaccgtactgcggcgggatccggcggggacgaggaggacgacgatgctgacaaggaggagaggatcccgtcgggaagagcgggcacggggcacgccgatgctgatgaccaccgggagaagggagagaacaggggaaataaggagaggaggctaacgtggataaccctaacatgtagggcccacggtaactcagccgccacgtag

SEQ ID NO: 13656 - DNA, 1791 bp, Oryza sativa
  Clone ID: TFbOSC403595j.C1.o4.fg
atgcccgccgccgagagctgccactcccgcagcctctcgtggctcgtcaagtcctgcatccccgccgaccccgcccgccacatcgccgtccccgttctttgccccaccccgcaaccgccgcctccctcgtcgccgccggcacccccaatctccaccctccccgacgacctcctcctcgagtgcctcgcccgcgtcccccgcgcctccctccctccgctccccgccgtctcccgccgcttcgccacgctcctcgcctccgacgccttcctccacctccgccgcgcccacgcccacctccgcccctccctcctcgccctctccgtctccgacaacggttgcgtcccgcaggcgctgctccggtttgaatcctccgtgcccgtgctcgaggtcgccccgctgccgttgcccccgaccctgctgcattgcggcggctctgtgttcgcgcatgcccgcgcggtcgtgctgggacgggatgtcttcctcatcggccgcggggcgacgctgcgcgtcgacgcgctcaccggcgccgcccgcgcgtgcgcacccacgctcttcccgcggaagaagttcgccgcggccgccgtgggtgatcggatctacgtcgccggcggatccgcgcgcaccgcggcggtcgaggagtacgacccggaggtcgacgcgtggcgcgtggtcggcgaggccccgcggcggaggtacgggtgcgccggcgcgagtgcgggaggcgtgttctacgtcgccgggggcgtcgcggtgtccggcgagggcgcgcgggcgctcgaggcgcacgtgtgcgccgggtcggtggacgcgctgcacgtcgcgtccggcacctgggcgcgcccccgtgcgctccccggcggcggctgtgtcgtgggggcgtgcggcgtcggtgaccacctgtacgtagtagccagccacgcggtggagctctccttctggaggtggtccggcgccaccggccgtggcggtgacggcagaggctggggcgggtgggtggcgctcgaggcgccgccgatgccgagggggtcggtggggctcggcatggcggtgcgcgtggcgatggctggcctaggaaccaacagggtggcggccgtgctccgccttaaattttgtcacgccattttcaactcatacgccgcacgcatcgcagctcgttcgtgccactatccagctgcaagctccacttcactgcagccgcagtctccatctatcccatttgatttgcccacgctgctgctacgaatgcacgcgtccatctccttcgccctcgcgcccgcatcttcgcccgacgccgcctccttcgcgcccaccgcagcggacgtcggcggcgctgtgtgcctcggctacggcatcgccatcgccgtcggcgtcctcgtcttcatctccaccgtcatgctcgcctcctacatctgcgttcgggccaaggctggagcagctgccgtgctcctcgccgacgacgacggcggcggcgccccggcagcgtccgccgtcgtggtgctaggcctcgacggcccggccatcgacgcgctctaccccaagctcctacacgtcggcgtcggtgacgacgacgacgcgtgcgcgggggcgcagtgcgccatctgcctcggggagttcgtagcaggcgacgcgctccggcgagggcacggctgcgggcaccggttccacgcggagtgcgcggagcggtggctgcgggtgagcgccacctgcccggtgtgccgcgactcgccgctgccgtcgccgatggccacgccgctcgcggaggccgtgcccctcgccgcgcacgctcgatga

SEQ ID NO: 13657 - DNA, 966 bp, Oryza sativa
  Clone ID: TFbOSC414138j.C1.o13.fg
atggcggcggtggcggccgtgttcctggcgttcgtgctctgcttctacatattcgtttgcgccaagaggtacaggggcggcgcgccgccggcggagggcggggtggcggcgaggctgtggttcttgcttggaggtggcggcggcgggggaggcgcggcggggtcaggggacgccgcgtggtgctacgacggcgggctcgacgaggcgtccatggcgaagctgccgtgcagggtggtggggaaaggggaggaggcggtggactgcgcggtgtgcatcacggagctcgccgcgggggagacggcgcgcgtgctgccgcggtgcggccacgggttccacgtcgcgtgcgtcgacatgtggctcaagtcccactccacctgcccgctctgccgctgccccgccgtcgacgagccgccgcccgccgcgccgccgccggtggtggcgccgcccgaggccgacccggagtcccccaacttccccaccaacgtcctcttcttcggctcccaggacgagttgcttcgaattgaaaagaaattagttgacctgggaggtaagatagttgagttagcagcaagcatggttttgcaaagcagttggccaaacaagcagcaaacagcaaagccagcgacttcaaagaactggaggaatggagatagtccagctaatcacttgcaaattactagtagtagtgatttgctgtgtgacgccacaggaaaatatattttttttgtgagaagaaaatttcgctactccgcgttcacaaaatcaaaagattctttcctcattcatatgagattaagttgttgcatggaaatgttccaatttcagtcgcatcctgacacagaaagaatgatcctcgcgatatggggtttgaaactgacatcggctacggacatcaagtacctgctccgttgggtatggactataatcgacacaaaccgagatgagcagctagtagcagaaatgtag

SEQ ID NO: 13658 - DNA, 963 bp, Oryza sativa
  Clone ID: TFbOSC412751j.C1.o3.fg
atggcggcgggggcgacgctgtcggtgctcctcctcgtcgccggcgtggtgctcatgctcgtgctgcacgtcgtcgtcgtcttctgggcgctgcgccggggcgtgttcctgcgcggcgcgttccgggtggaggagcgccgggaccagcgggccgccggcctgacgcccgacgagatcgccgtgcttccctgccacgagcgcaaggaagacggcggtggcggcggcggcggcgagtgcgcggtgtgcctggaggcgttccaggcgggcgaccggtgccgcgtgctgccgaggtgcgagcacgggttccacgcccggtgcgtcgactcgtggctgcgccagagccgcgtgtgccccatctgccgcgccgaggtggaagtgtccggctacgccggcaagccggccgcggcggtggccgaggcaagtcaggcgaccacgctggagatcgttactgaaagattgggaggcacagaacgcctcgaggtctcaaatgtgtgtgaagtccatccgcttgattcggttgatcgcatgaaaggagacaactccaacgtcttcctcgtcgccggcctctcgctggtggtcgtcgtccatgtcctcgtgctcctatgggcgctgtggtggggatacggccgctcgcgcctcgccctcgcccgcgcccgcgtcgtcgggcagcacgacgtggcgcgcggcggcctctcggcggaacaggtcggcgagctgccgtgccacgttgtcaaggagggtgccggcgagtgcgcggtgtgcctggaggcgttccgggcgggcgaccggcgccgggtgctgccgaggtgcgagcacggcttccacgcgcagtgcgtcgactcgtggctgcgcgtgagccgcctgtgccccatctgccgcgccgaggtggccgccagccgcggcaaggaaggtgacgcgccggtggccgaggccgcctccttggagatcgtcgccgaacgatag

SEQ ID NO: 13659 - DNA, 2310 bp, Oryza sativa
  Clone ID: TFbOSC400839j.C1.o11.gm
atgtggccggtcagaccgtgctactctgcaacggctagaaaattagccgttgtagtgctgtcagagggccccatcggcctggccggtcagaccgaggttgagtggccggtcagaccggccttggctcggtcagaccgccatcggctcggtctgaccgactacggctcagtcggctttgtatcggccatcccgagcagcaccatcccggcctccacggggccggctgaacgcctgaacacactgatatactttgcactaggatcacctaggttagatttagtcgggtggttctatttgggattgatgaacgacattgtagatgaaagggagaggggtttagataccgaccggttgaggtgttcgtggaggaagaagcgccggacatcgtcgttgtcgtcgcagcttgacgtggacggcggcgacggtgtgcttgacggcggcggttgtcgttgcagcggtggtcgtgggcaatcccggcgaggtcgtggcgcggcgtgtgacggggacccaccagccattaggctgggcgcccccgatcagggcgcggtcaaggtccgttgtgccgttgggcccgacgggtgggagatctatctaacacacatcaacaaagaaaacgaggacagtcgggacagacagacaatcgacgcgtgcacactgtccgtcaagcctacagctgcgtgcgttctccccagccacgcacgacacgaggttcgcaagtccaacccacgcgccgacgcgagacctactcgaaacacctggacggcccggatcccccgcccgcgcccggtcacggacgccaagacgccatctcgtctcgtccattccaacccctccaaacccaaaccccccaattctgaccgcgcgaaccgcgactcgcgccaccaccagaccagacgacacgacacgctgcgccccaagtcatataccgcccgccgcgacctcgtccaacaaacgcaacgcaaacactcgctcgatcgccacatgccgacgcctcgtcctcgccaccgccaccatgcgctcccgctcgcgctcgcgctcgccgcgccgctgctgctgctagccgcggcggacgggcagccgaacgagtcgagggacaagaacaacggcggcgggggaggtgggttcatggcgcccagcggcggaggcggcggcatgggctctcagtcgccgagcttcagcgcgcccatggtggtgctcctcgtggcgctcatcgcggccttcttcttcatcgggttcttctccatctatatccggcggtgcggcggcgaggcctccacggggccgaccatcccggccgcggcgctggcggcgctgtcgcggcaggagcagcggagccggcggcagcgcgggctcgaccccgccgtggtcgagtcgttccccaccatgaagtacgccgaggcgagggagctccgcgacggcggcaaggacgccgtgctcgagtgcgccgtctgcctcagcgagttcgacgacgacgaggagctccggttgctgcccaagtgcagccacgccttccacccggactgcatcggggagtggctcgccggccacgtcacctgccctgtctgtcggtgcaaccttgcgcccgacgcggcggcggcggaagcgaacgtcgtctccggcgaggtggatggggagcagcaggaggaggaggtggtggtggccatcgacgtggaccgcgagggcgaggaggaggacgaggagaggcggagggaggcgatggagctcgagaggatcggcagccagcgccgcgcggtgcggtcgaggtcggggcggccgctgccgctgccgcggtcgcactcgacgggccactccctcgccacgacgcggctcggcgacgccggcgacctcgagcggttcacgctgcgcctgccggagcacgtgcgcagggagatggtcgccgccgccggcgaggagagcctgcgccgcaccgccgtccgggaaggccgcgtcggcggcggcgcccggagcgcgcggatcgggcggtccgaccggtggccgtcgttcatcgcgaggaccttctcctcgaggatcccgttctggtctgcgtcgaggagggtactcgacgccgcggaggccggagctgacgccgccgccaccaccaccaccacgacgccaacgtcaacggcgaggaccaagcgtgacaagacggccgccgccgcagatggctccgtgagctcagccaagggcagcgtccgcttcgactgtctcggcggcggcggcggcggcggcggcccgagcaacagagtcgtcgccttcgccaacgacgacgaggaggatgacgacgagaagccaatcgcccggcaagtttga

SEQ ID NO: 13660 - DNA, 480 bp, Oryza sativa
  Clone ID: TFbOSC900212j.C1.o9.fg
atgaaggtggccatcgccggcaacgtcgtggtggcggtgctcttcgtcgccgtcatcgtctggcggctcttcttcttcgggggtagagatcgagccggcggcgcggcggcctccgccgccgccgatgcggacggagagtcgtcctccgccgggagctcgccgtgcgcgtcgcctcgggcgggcggcggcctggggagagaggacctcatggcgctgccggtgtacgtgcacggcgcgtcggcggcggcggacggcggcgccaaggcggaggagtgcgcggtgtgcataggcgagctcagggacggcgacaccggccgtctcctgcccaggtgcgggcaccgcttccacgccgagtgcgtcgacaagtggttccggtcgcacgccacatgcccgctctgccgcgccgccgtcgccgccgcggacggcgactccggcggcgagggcgacaccaaggtagcggttgtgcagcaagacgtgtag

SEQ ID NO: 13661 - DNA, 725 bp, Oryza sativa
  Clone ID: TFbOSC410532j.C1.o3.hg
gggctggggctgcgcataacgcggacgtgggcgcacaacgggcgggtcgtggggacactgcgccgggcgcacatcggaaaccagaactcccccccaaaaaaagaaaagacaattctccccccgccggcggattttttgggcccggagcgcggtccctcccggtcggggccgggggcggcaaaacaagggcccccgcccccggcctgccgcagggaacacccccggcccccccgggacacaggacgggaaagggagggcgccacgggcggcggcgccgggaatgcgccggcgcgggcgcgcgtctcctgtcgctcggcgtgcaggcggcggtgatggccgccgcgctcgcgctgttcctccttttcgccgcggcggccgccatcctgctgctccacctcgtcgtcgcggcccgggcgttccggaaccagcgccacggcggggccgggaggagccggtaccgcgtcccggagacctcgtacacgccctcccgcgccggcctctcccccgcggacctccgcttccttccctgcttcgccgcgtccgcctccgcctccgcctcgccggagctatgcgctgtttgccttgaggccgcgtgcgcgggcgagcggtggcgcgcgctgcccgcctgcggccacgcgttccacgccgcctgcgtcgaccggtggctcgccagggcggccgcctgccccgtctgccgcgcctccgtctccgcctccgcgagctga

SEQ ID NO: 13662 - DNA, 1143 bp, Oryza sativa
  Clone ID: TFbOSC401894j.C1.o36.fg
atggcgacgcctcgctccccgagcacccgcggcgacgcgctccttgactcggcgcccctgctcggcgggggcggcggcggcggcggcggccggcgccgagggggcgcgctccgccggccgtcgctccgcggcgcggcgcggctgctgcggcgcggggggcggcgggcgatgcgggagccgtcggtgctggtgcgggaggcggccgcggagcacctcgaggagcggcaggcggactgggcctactcccgccccgtcgtggcgctcgacctgctctggaacctcgctttcatcaccgtcgccgccgtcgtgctcgtgctcagccgtggcgaggactcgcccatgccgctccggacctgggtcgccggctacgccctgcagtgcgtcgtccacatggtctgcgtcgccatcgagtaccggatgcgccgggggcagcgtgacagggccccggcgtccgccgacgaggaaaggggaagtgacgggtcgtcttcatctagcgatgatgatgtcacggaggacgatcgccgtggtagctgcaccgattgcgtcagtattgcaaagcacctggagtcagctaatacaatgttctccttcatatggtggataattggattttattggatatctgctgggggtgaggatgttatccgtgatgcacctcagctttactggctttgcatagtctttctggcatttgacgtgttctttgttgtattctgtgttgctctggcttgcatcattggtattgctgtatgttgctgcctaccttgcattatagctattctctatgcggtttctgatcaggaaggagcgtcagaagatgatattcgccaaattccaagatacaaatttcggagaacagatgaacctgaaaaacaaactgctgatgagacaggaccttttggtggaataatgacagagtgtggcaccaatcaacctattgagaaagtactcgcacctgaagatgcggagtgttgcatttgcctttcggcatatgatgatggtgcagagctgcgtgaacttccttgtgggcaccatttccactgtgcctgcattgataaatggctgcatatcaacgcaacatgccccctgtgcaagttcaatatccggaaaagtggcagtagcagtggaagtgaagaagtatga

SEQ ID NO: 13663 - DNA, 1350 bp, Oryza sativa
  Clone ID: TFbOSC23746j.C1.o3.fg
atggcgcagcagcagaagaagaacgcgcacgtgccgaaattcggcaactgggacaatggcggcaacgtgccgtacaccgtctacttcgagaacgcgcgcaagggcaaggtcgccgccgccggcaagatgttcaaccccaacgaccccgtcgacaacccggaggccttctcctcctccatcgccgcgccatcgccgagccgagcccctcctcctccgccgtcccaccacgagcgcgccccgagcgacgcgccgccgccgccgccgccggccccctacgccggcggctcgccgtaccaccgccacgccgctggtggtggcgagacgccgccggcaagaagaggaggcgggcggacaagcggcggcggcgggtcgtcgtacagcgtcgagcactcgccgtcgccgtcgccgctgcacccctactccgacagcgggagcggcagctacggcggcggcctcgtcgccaactcccgcgccaagggcggcggcggcggcgccccgcgcggcaacgagacaccgacgagggggtcggcggtgccgcggttcggcgactgggactcgaacccggcgtcggcggacggctacacgcacatcttcaacaaggtgagggaggagaagcagaccggccaggccgccgggaagccggcggcggggctcggcaagggcggcgccgccgccgccggccacggcaacgccgccaagcgataccacgacgacgacttcgcctccacggttattccaaatatcataagaatcatgagtactgcaagtactgcacgctctaggaagcgagcccatgatggatccagacaaaaagttgatgttataaacttggaaacaactgctccagtggtgaacactgggagccagcatgaggctctgatccttaggggtacacggacctcacccatcgatgttgaagctctagatgataaaaggaggagcagaaaaattatgaggcgctctgtggctgtagtggatccggagaaggatactggtccgggaggttatggcgttgctggagctatattttcccggggcagaaattttcagggtgctgtacatgttatatgcctttctccagatagggaagaagggaccagcaagccgaaaaatgtggcccaaaccagtacgacgcatgccaaggttgctccaaaggaaccaacctttacctgtcctgtgtgtctgaacaaactggacaagccatccacgacaaattgcggtcatatcttctgcgagaaatgcatccaggcatggctcaaggctcagaagaaatgccctacttgtaggaagagtctagggatcaagagcttccatcgtgtttacctccctactcctgctgattatgattaa

SEQ ID NO: 13664 - DNA, 1398 bp, Oryza sativa
  Clone ID: TFbOSC405088j.C1.o5.gm
atgacgagagcaagccgagcgtcgctgctactgttttgcttcggcgggggagatgatgattacgagtgccgggcgtgctacggggtctccgtggcgtgcgtgtcgctgctcctgttctgcgtgctcgcggcgtcggtcagcgtcaccaaggcctgcgccgtggcggggctcgccgtgctgctgttcggcgtgatcgggtggttcgtgccgctgtgcggcgcggggggcccgcccgcgcgcgccggcgccgccgcggggggcggggggcggggagcgggcgccgcgggggtgacgcggtgcgcgtgccggctcgtcggcgcggcgctgatcgccacgctgccggcgttcgtgttcgagggccccgcggagggcggcgccggcggaggcggcgggagcaagcacggcggcagcgtgctgtgcgcggtgtgcctggaggacgtggcgcgcggcgagacggtgcggcggctgccggcgtgcggccacctcttccacagggactgcgtcgacatgtggctgcactcgcacaccacctgcccgctctgccgctgcgaggtcttgccgcggaaaccggcggcgaaacctgccccgccgccgccggcgcaagccgccgaatcgacgtcggcgtatgcagatcccgatgcgttgccgccgccgcgaatacctcgggccagaaaccttaaaaccggccgcgccgcggggccgacgccgacgccgagagcgcgcacccggcgcgccacgaccgggctgcagatgtttaacggcgaacggcgcccggcggcgagccagcgcggcggggatggtgggtacctcgcgtgctactccgtcgtcatggtctgcgcgtcgctgctgctgctgtcggtgctcgccgccacggtgagcatcgccaaggcgtgcgtgttcgccgcggcggccgcggtgctgttctgcgccgtcggctgcgtctcgcggtggtgcggggatgccggcggggctccggcggcgctgccgacgacagcagcggcggcggaggaggcgcgggcgagggcgcccgcggcggcggcgtgcgcgacgtgcgggctcgtcggcgcggcgatcgacgcgctcccggcgttcgcgtacgcgcgccctgcggccgacgacggcggcggcggcggaagcaagtcggggaggtgcgcgctgtgctcggtgtgcctggaggacgtccaggccggcgagatggtgcggcagctgccggcgtgcaggcacctgttccacgtgggctgcatcgacatgtggctgcactcgcactccacgtgcccgctctgccggtgcaacgtctcgccgccggcgaccatcgtggtgaaagccacagccacgtcgacggccaccgccgcggcggcggcgcagcagctaccggctgacacgttgccgccggtgtga

SEQ ID NO: 13665 - DNA, 552 bp, Oryza sativa
  Clone ID: TFbOSC5323j.C1.o1.fg
atggacaccgaggaggcggttcacctcgtggtcgtcggggtggtggccgtgggggcggtcgtcttcctcctcgccgccgccgcctcgggggcgtgcggttgcgccgccgcgttcccggccgcccggtggaggaagagggcgcaggtgggcgacgacgacgacgatgtcgagagcgcgctcgggggcgccaccacggtcacgacgtacgagcaggcggcggcggcgtcgtcgtcttcgccggcggcaggggcagcggcggagggagcggacacgtgcgcgatctgctgtcaggaatactccggcgccgacaaggtgcggcgggtggtgcggtgcagccatttcttccacgcggggtgcgtcgacggttggctccgggagaagcggaattgcccgctgtgccgcgccgtgctgtcgtcgttgccgccgcttcccaaccctggctgccgccgcggacgagccgccccgccgtgtccgccgccgctgccgccaccgttgtcgtcggctaattacttatcaggattttgcagatctcattttgttttggattattga

SEQ ID NO: 13666 - DNA, 729 bp, Oryza sativa
  Clone ID: TFbOSC18908j.C1.o1.fg
atgttgacctgctcgtctactaacccaagccttgtcgggcgcgccgccggcggcgaggtcggaggattcgtggagtcagcagcagagctacaacttcagcgggcgcgtgctgctcacggccgtcgtgatcctgttcgtgatcgccgtcgtcttcgccgtcacccgcgtcttgctgtactacctcgtggtgcggtccggcggtggcggcggaggccgtcgtcgtggcggcctggcaggggggatcttgcggtcgttgaactcgctcggcgtgagcggcgccgcgggctggacgcgtccgcgctcgccgcgctgccggtcaccgcgtaccggaagaacggcggcgggggcggtggtggggagggctccaaccgcggcgggcctggcgccaccgccgccgactgcgccgtgtgtctgtcggagctcgccgacggcgagaaggtgcgggagctgcccaactgccggcacgtcttccacgtggagtgcgtcgacgcgtggctgcgctccaggaccacgtgcccgctctgccgggccgaggcggaagtacccaaggcgagggcttcggcggcggcgacggcgacggcgcagtcgtcgtcgtcgctcggtgacggaggaattaccgtggtcgtgaccatacacggcggctctgacgaagccggtggcaggtcaacggcgttgactggtcaaccgggatcctcgaactctcctagctgcgaggctgcaaggaattga

SEQ ID NO: 13667 - DNA, 714 bp, Oryza sativa
  Clone ID: TFbOSC401369j.C1.o9.fg
atgtcggatacagccttgtcgggcgcgccgccggcggcgaggtcggaggattcgtggagtcagcagcagagctacaacttcagcgggcgcgtgctgctcacggccgtcgtgatcctgttcgtgatcgccgtcgtcttcgccgtcacccgcgtcttgctgtactacctcgtggtgcggcccggcggtggcggcggaggccgtcgtcgtggcggcctggcaggggggatcttgcggtcgttgaactcgctcggcgtgagcggtcgccgcgggctggacgcgtccgcgctcgccgcgctgccggtcaccgcgtaccggaagaacggcggcgggggcggtggtggggagggctccaaccgcggcgggcctggcgccaccgccgccgactgcgccgtgtgtctgtcggagctcgccgacggcgagaaggtgcgggagctgcccaactgccggcacgtcttccacgtggagtgcgtcgacgcgtggctgcgctccaggaccacgtgcccgctctgccgggccgaggcggaagtacccaaggcgagggcttcggcggcggcgacggcgacggcgcagtcgtcgtcgtcgctcggtgacggaggaattaccgtggtcgtgaccatacacggcggctctgacgaagccggtggcaggtcaacggcgttgactggtcaaccgggatcctcgaactctcctagctgcgaggctgcaaggaattga

SEQ ID NO: 13668 - DNA, 318 bp, Oryza sativa
  Clone ID: TFbOSC21790j.C1.o1.gm
cgtcacggcgtgcgcgctgaaggcgcggccctggacgccaagcagctgggcgcgctgccggtgttcacgtgggggtcttcttctccggcgacggcggcgccgaacgccgccgtgcagtgcacggtgtgcctcggggagatggaggacggcgagctggggaggctgctcccggcgtgccgccacgtgttccacgccgagtgcatcgacacgtggctcgccgtgagctcaacgtgcccggtgtgcaggacgacggtgggggcggcggaggatgatgagccagcggcggctccggtcgctggcgtgtcgccggcgagctag

SEQ ID NO: 13669 - DNA, 486 bp, Oryza sativa
  Clone ID: TFbOSC401978j.C1.o3.fg
atggtggtcatcctggcctccctcctctgcgccctcatctgcgtcgccggcctggccctcgtggcccgctgtgcctgccgccgccgaggcgccgctaccaccaccaccaccactactactacaccggctgctacatcccctgcacccaaaggcctgaagaagaaagccatcgacgcgctccccaccgtgtccttcgcactcaagcagcagcagcagcaggcggagtgcgccatctgcctggctgagttcgccgggggggaggagctacgcttgctgccgcactgcggccacgccttccacgtctcctgcatcgatacgtggctggggacccacgccacctgcccctcctgccgcgccaccgtcgggactagtacattattcctccctctccccggccgctgccggaggtgcggggaggtcgacctgcccacgctgcacgatttctccaccgccaccgccaccgcccaccacaacacacctccctag

SEQ ID NO: 13670 - DNA, 2424 bp, Oryza sativa
  Clone ID: TFbOSC400058j.C1.o5.fg
atggagatggagatggaggacaacaaggcgccctcgccgccatcacctatggagtccgacgtcgctggggagaagcgcaagagggaggacgatgcatcctcctccgctgtacttgccgccgccaacaacaccggcggtgcccagcaccccatgtggaagaccagcctctgctccttcttccgccgccgcgccgcctcctccgccgacggctgcagccacggcgactcctgccgctacgcgcactccgaggaggagctccgcccgcgccccgacggcacctgggaccccacctccgaccgcgccaagaagctccgcaaggtcgccgccgacgaggtggaggaagaggtggtcaccattgacgacaaggccctggacaagtgcctcgtcggcctcccgaggggatgggccaacgacaggctcaagactttcctccaagacaaggcaagaactaactactcctccattcttcctcctgctctactactaggaatctcgtatgcaacagcgaagaagaagaagggaatgactgttggttttgtaacttttgaaaatattgaacagctgaagaatgctatcgaggtacttacagagaaccaatctggtggaaaggaaataaagatagcagatgccaatcgtagatctcatcaaaagctgcacacagaaaagcctgtatctgacaatggagtgacaacagaaaatggtactagtgttgatgttcctcctggggagacatctgcacctgaagcagcaatatcaaataaaaaaagtgtccgcgatgcagttactccccttgcccacatgtcttataatgatcagctagagcacaaaaagaattctgttgcgcagatactgaagaggcttactcgcaatgctaggaaagcttgccctactggcattccccttccagattgggtttttaaatccaaagaaattggtggtcttccttgcaagcttgaaggcattctggagtccccagtgattaatggataccgtaacaagtgtgaattctctgtgggattttctttggagggaaaaaagacggttggatttatgcttggaaattttagggaaggtgtgactgctgttgaggaacctgtggactgcccaaatgtctcagaaatttcctgcaaatatgctctgatgttccaagactttctgcagtcatcaagcttgcctgtgtggaacagagttgataattgtggattttggcgtcaattcacagttcgggagggaagatgtcaagctcaagctgttgcacagaatgcagaaaaccaaatatcagaagtcatgcttattgttcaggtttgctccacaggtgttgatgatgcagtaatgaaagatgaatttgacaagttgaccgttgccctgcaacaaggagcagcaacatgctcacctccattacctctaacaactatagtagtgcaagatcacaaaggaatttcaaatgctgcaccagctgattgtccattgatcccactattggtgccaaaagtagatcaatcagaaggtacagtggataaaacaagaatccatgaccacatcggtaatctgtggttctccatatcaccaacagcattttttcaggtcaatactctcgctgcagaaagattgtatacccttgctggtgattgggccaacctcaattcgggcacattactttttgacgtatgttgtggaacaggaacaattggactgaccttggcacaccgtgttggaatggttgttggaatcgaaatgaatgaatcagcagtttctgatgctgagagaaatgcgctcattaacggtgtatcaaattgtcgctttgtctgtgggaaggccgaagatgtgatggggtctcttctcactgaatatcttggttcaccgcagcaggacattcctgtttctgaaggtgcagtaagtggtactgtgaaagatgaggaagttattgacagttctaagaatagtggcgaaaatttggacagctcaatgcagaaaaatgacaatggcgaaagccagcagctcggggatgcaccagctgattcttcctcttctgccatagatgagataaaggggaattccaatgatagggttggcaatgggttggaaggcagccatgatgaatacaatgaggttgctggagaagatattcatggggaagcatcattgatcaatgagtctgttgacctgaaagtatcggactgtttggaggacagaaagacatctgatgatggttcttccatttctaacaatgatgtgactgcagctactgcatgtcagttcgaagacattgttgctattgtggatcctcctcgtgttgggcttcaccctactgatcaagcttacacactgaatttgataggtgatcaaggcattgaggactcatccacgaattcgacgtctagtgtaaaccccaaaagaggacagggagttgctgttttcatttaa

SEQ ID NO: 13671 - DNA, 1092 bp, Oryza sativa
  Clone ID: TFbOSC418263j.C1.o1.fg
aaatttattcatgcaatttctcctactccagcatctaccatgtccagtgttgatattcacgcaaggcctccaaatactactttatccccatatatttctccagcaaagtcagttcctgttgaagaaactccaaagcgtcctgctgaggatgctgatttgcaatactggcgttacgatgtcaagaagcaaagacatggtgaagccggtgggaatcgtctatgtttcaaatttacatcatcaggatcctgtcctcgagggagtaaatgcaattataggcatgatgaggaggccagggagcattacaataggaatgtctgttttgatttcttaaacaaaggaaaatgtgagaagggtcctgagtgtaggtttgctcatagcctttctgatgagggtgctgttagggatacaaaaccacgtagcgaacgaagacgtgttgagagcagttgctggttctgcttgtcaagtccagatgttgaatcacatcttgttatcagcattggagaaggttactactgtgcacttgcaaaagggccacttgttccaaaccatgttctagttataccagttgagcactgctctagtacactaaagatgcccgtggaagctgaggcagagcttgggagatataaggatgctctggccaagtattttgagaaacaaggaaagatagctatatacttcgagtgggtttctcagcagtcccgccatgcaaaccttcaggctgttccagtaccattgtctaaagcatcaagtgttaaaaagatattccatttagcagcacagagactgggatttgaattttctgtagtgaatccagatggtgatgctaaccgcgccagggaattgttaagatcagagtgtgacagcaaatcaagcttgttttatgttgagctaccagaaggttcagtgcttttacatttggttgacagtaatgagaagttccctgctcagtttggccgtgaggtgttggctgggttgctaagcatggcagatcgtgcagattggaggaactgtaaggtttctaaagaagaagaaatccagatggtggatgattttaaacaagggtttcgtgagtttgatccagctgaatga

SEQ ID NO: 13672 - DNA, 2355 bp, Oryza sativa
  Clone ID: TFbOSC400591j.C1.o19.fg
atggaggaaccctcgcccgtcccgcccgcggcggctcctgcctccctcgccgccgcgccgcccaccaccgatgtcctctctcgccggagagcccatctcgacagcgcctcctaccgcgcgctctcccggctcttctcgcactgcctccacctgcaccctccgcggcacgcggcacgccccgacgcggaggtcgagcctgccgccgccgccgccatccctcccggcggctccggcgggcttccccatggggattcgccgcctcctgcagacgtgggaggcgatcgggggaagaacttagaggtggaggtggctctgggaaaccatgctccgcacgagacgccttcgacttcggcgtccccggacgccgccgtgaaccctaccaccgatcccggcgtggtgccgcaggggacggaggagggtagagtcgctggggtcgagcgggtggagggtgtagaagaggttgttttcgccggaggcacttccggggaggctgatgccgatggcgatgagttgggggctggggctggactgatgggggatgacgaggctttgaggtcgatgcaggcttgcttagacggggaggatagtgaattggtgattgaaatggttggtaatgacaatgagcaattgcaactcgatgcgatgatgaacaacttgtcagggttgattgatgatgctagtgcctgtgtaatgtcggcgcagagctgtggagtatctggagataaactgcagagtgatgacagagtagctgaggaggtgaaagaattgggagctgggattggcaatgacagatctgtgtgcagtttagatcatgggtcactggatggtggtggtggttttgaggaaggagagattgagggcgacacgcagaatttagatgcagatgattctggcaattcagagcttcaagatgatgtggaattggaagaggattttgatagcagaaggatagaggaggatgggtcatgtggccatgacttaaagagcaatttgcatttgatacctcaaaaaggaaatggcgacactgcacggaacatgctatgtaatagcaagggtgattctcaaatgcatgttgccagggcgcaagcagtcagttatgatgaagttctcgattggaatgagacacctttgcctgatgataaggctctcaaacatggaaacacaagaaagcgcaccttgacagaggagagaaaagctaagaagacgaaaactaaacgaattaagagagcattgcaacgggaagccgaaggggtgaaaagactgaaacttcaaccagttataaagcctaaagtggtgaaggtttgccacttctacttgcatgggaagtgccagcagggcaatttgtgcaagttctcccatgatacgacacctttgacaaaatctaagccctgcacgcattatgcacgtggttcttgtttgaaaggagatgattgcccttatgatcatgagttgtcaaagtacccttgccacaattttatggaaaatggaatgtgcatcagaggtgataaatgcaaattttctcatgtgataccaactgcagaaggtccgtccacaccagatgcaaagaaatctaatgcgtcatcagtacctgaaaaagcaaattgccaagagcaaacaagtcgtcagaaaacttcaacagtatacagtggtgaacctgcaacctctgttcctatcaaacatcattccatccttaaaaaccttgctggcatatcaggaaatgctcaaaaggatgttgtgtccactgagaagcataagaatccaactggtggtccacatcagaactttggaagacctcaacccgcagacgggaaaaaacttggcaagcacaatggacatagatcagctccactgttggatgaaaaagactcatcaaaacaagctaatctacatccatgttcagaaccaaagaaaaatagtttgcctaccactgctgcagtgcccagctcacatacttggatgttgttcagtgatgaacccgtgcccatgagattgtgcagcattttttgtattccgcacaccagttttattgctgtaactccatcttgcaagttgcaactgctgatgtggacttattttgcagaacttggggcaaatatttactgtcagattttgaagattggtaactatcaaatgaatgcacttctgttcaatccacaggcatacaacagcaaatcacaattcctaatcttcattagtttgcagcagcaagaagccaacagtgcagcaaaagggagtatgcccgtgtgcatccatcagctcgttttaagtatgttcctcaataaagatttgaattggaaagttggtgtttatctctttgtttgggattatgaaaatgctaagcgccatatgacttag

SEQ ID NO: 13673 - DNA, 4170 bp, Oryza sativa
  unsure (1)..(4170): unsure at all n locations
  Clone ID: TFbOSC400657j.C1.o8.fg
atgagtcggcggcaggagatttgccgcaacttccagcgcggaagttgcaagtacggagcgcagtgcaggtatttgcatgcctcccctcaccagcaacagcagcagcagcaggcgaagcccaacccgtttggatttggcaccggaagcaggcagcagcagcagccgtcatttggctcacagttccagcagcagcaacagcagcagcagaagcccaatccttttggttttggggtacaaggtgccaatgcccagtcacgtaatgctcctggtcctgcgaagccttttcaaaataagtgggtaagggacccctcggccccgacgaagcaaacagaggcggtgcagccaccgcaggcgcaggctgcccacacctcctgtgaagaccctcagtcatgcagacaacaaatttctgaggattttaagaacgaggctcctatttggaagcttacttgttatgctcatctcagaaatggcccttgcaatattaagggagacattagcttcgaggaactaagagctaaagcctatgaggaaggaaagcaagggcattctctgcaatcaatagttgagggagaaagaaatctacaaaacgcaaagttaatggagtttactaatctgctcaatagtgcacgtccatcacaaactccaagctttcctactatgagttccttccctgaagtgaaaaacaactcatcattcggggcttctcaaaccaatggaccacctgtgttcagtagtttcagtcaaattggagcagcaactaatattggacctgggccaggaaccaccgcaccaggaatgccagccagtagtccttttggtcatccaagctctgcaccacttgctgcccctacttttggcagttctcaaatgaagtttggagtttcgagcgtatttggaaaccagggttcaggtcaaccatttgggagctttcaagccccacgttttcccagttcgaagtctcctgcttcctctgtccagcacagagacattgataggcaatcacaagagttgcttaatgggatggtaactcctcctagtgtgatgtttgaggaatctgttgggaacaacaaaaatgaaaatcaggatgatagcatctggttgaaggaaaaatgggcaattggggaggtgtgggatactttcctcttggtcattttcgaagttctgtttgctagaaatgtttgctcatttacaacttttgttcctgctatggaagttattggaataagaaacagtattgcaatattgagtgattggccgggagattggtccggcctcgagaaatttcacgacttgccactgaatatgcaagcttttgaaatttaccatttaattcatgtgacttttgaaatttgtaccgaaatgcgaatttcttcgccctaccacttcggtccatctgaagaaattgacagatggtgcaaatttatgtctatagttgcaattgttcacactttctatgggaacctgtggatgagggatggcgtcttcataacggaaattcaagacaggtggcaagacaaaatccaattggacataatggacaatatattagtggtatgcaagtccacattagctgacgatgaatcagctagtgaggtatcttcagggagtgacagtgacagtgattgcattcttggagatgattgcccatcagatgatgatgaagaggctgcacagatacacaagcgttttaaagaactgaaggagaagttaaagacaggaaaagtagataagttggatgatgttgtttttgaagctggtgctgaacaagatggtaatgacaccccatcttttgatagcgatgatgaagagtcggtagaagaggttgcaagcgatgaagaggtttctgctagaaaactcatcaagtatccaaggttcaaggagaagcctggtgttccaacatttgaattaggaatgacgtttagctgcaagaagcagttcaagaaagctattacagcatatggtttagctgagaggaaggcgatcaactttgtcaaagatgatcctaagagggtgagggcaagatgtgactggcctagctgcccttgggtttgcctactgtcaaaaaactcaaggactgacggttggcagatagcaacactagaaaattctcatctatgcccctctagaagagataacaagctggtgacttcttctaggattgctgagaagtatggcaagtttatagttgcaaatccctcatggaaattagcacacatgaaggcaaccgtacaagaagagatgtttgctgatgttaacatctccaagctgaagagagccaaatccattacgatgaagaaagctataaatgcagctaagtggcagtatcaaaagttgtataattatcagctggagctacttagaagtaaccctggaagcactgttgtggtggatagagaggtagatatggatccacctgttttcaaaaggatctacatatgcttagatgcatgtaagaaaggcttcctagctgggtgcagaaaagtgataggacttgatggctgcttcttcaagggagcaaaaaatggagagctcctttgtgccataggaaaggatgccaacaatcagatgtatccaattgcatgggcagtggtgcacaaggcgaacaaggaagaatggcactggttctgtggattgttgtgcagtgacttgcaagttggtgatggatctggctgggtgttcatatcaaaccaacagaaggaaattattaatgctatggataaatgggctccacaagctgaacacaggatctgtgctaggcacatatatgctaacttgaagagacacttctatgacaatgaacaccagaagttttggaagtgtgccaaggctccgtgcataacgttgttcgacttggcaatggcagagctggtacaacttacaactcctgcagtacaaaccatcttgaataaccatccgcagcattggagccgagcgtggttcaggtcaggctctaactgtgacttagttgacaacagtatgtgtgagtccttcaataaatggattctagaggctaggttctttccaataataacaatgcttgaaacaattagaaggaaagtaatggttaggatccatgatcagagaactatatcaggtagatggaccacatcagtttgcccaaacattctgaaaaaaatgaatgtatatatcaccgagtcagctttttgtcatgcaacatgtaatggaggtgatagctttgaagtaaaacaccatgacaataggttcacagtacacctagacaagaaggagtgttcttgtagatattggcagctgtcaggattaccatgccctcatgcaatatcatgcattttcttcaagactaagactaattcactggatgagtacattgctgagtgttattcagtgaaagagtttaagaaaatctatagtcaatgcctggaaccagtagagggcatgagcagctggccagaagatgacaaagagccacttaatgctcctgggtatatcaagatgccaggagagaccagaagagaatccaatgaaccattaaaagccaccaaactgtcaaggattggctcaatcatcagatgcagcaagtgcaagcaaattggccacaacaaatccacttgtaataagcatcatggaggaggctctagcacaccagattctctccaagttgtaaatccagctgataatttaatgctctcaaacacacaacaaagctctaaacaaagcaggaaaagaaagtcacgtacagctgctaacaccaattctgcaagtcagtcaaggaaaacagtgtcttcaaagcaaaaggcactagtggaattgcatgcccattctcagggttctacaagtgcaacaattaaggtcacttctgggcaagcttttgtcaatgtttcaactcaagaatcagcaaagttcaagccaaagaagcttacacctgttgccagacttaatggcatattgatgcagtcaagaaaaccatctgggagttttggctccagctgttccagcatcaacaattttctgaagtcctctgcaggaacgacaaaaatgaaaatgaagatgaataatctggtgaaggaaaaatgggcaattggggagtttgtatgccatttatcagagggcattgattctggaagctatgttgcagctccagggtcaacaaaggacctctccaacaaccagaagaagaatacncaagagtga

SEQ ID NO: 13674 - DNA, 1275 bp, Oryza sativa
  Clone ID: TFbOSC6623j.C1.o1.fg
atgagtcggcggcaggagatttgccgcaacttccagcgcggaagttgcaagtacggagcgcagtgcaggtatttgcatgcctcccctcaccagcaacagcagcagcagcaggcgaagcccaacccgtttggatttggcaccggaagcaggcagcagcagcagccgtcatttggctcacagttccagcagcagcaacagcagcagcagaagcccaatccttttggttttggggtacaaggtgccaatgcccagtcacgtaatgctcctggtcctgcgaagccttttcaaaataagtgggtaagggacccctcggccccgacgaagcaaacagaggcggtgcagccaccgcaggcgcaggctgcccacacctcctgtgaagaccctcagtcatgcagacaacaaatttctgaggattttaagaacgaggctcctatttggaagcttacttgttatgctcatctcagaaatggcccttgcaatattaagggagacattagcttcgaggaactaagagctaaagcctatgaggaaggaaagcaagggcattctctgcaatcaatagttgagggagaaagaaatctacaaaacgcaaagttaatggagtttactaatctgctcaatagtgcacgtccatcacaaactccaagctttcctactatgagttccttccctgaagtgaaaaacaactcatcattcggggcttctcaaaccaatggaccacctgtgttcagtagtttcagtcaaattggagcagcaactaatattggacctgggccaggtgattgtgttactaatctactccctccgtttcacaatttctcaaatgaagtttggagtttcgagtatgttgctgaaagttgtgcatttactagcatattcgtagctgtgtatcatggtcgtattttggaaaccaggggttcaggtcaaccatttgggagctttcaagccccacgttttcccagttcgaagtctcctgcttcctctgtccagcacagagacattgataggcaatcacaagagttgcttaatgggatggtaactcctcctagtgtgatgtttgaggaatctgttgggaacaacaaaaatgaaaatcaggatgatagcatctggttgaaggaaaaatgggcaattggggaggtgtgggatactttcctcttggtcattttcgaagttctgtttgctagaaatgtttgctcatttacaacttttgttcctgctatgcttcatgacgatacaaaggaattatacaacaaacaagagaatttgcaagagtga

SEQ ID NO: 13675 - DNA, 837 bp, Oryza sativa
  Clone ID: TFbOSC415553j.C1.o1.fg
ttaaatggaggtgggaagaccacacattcggcagagtatccagaacggccggggcaaccagtttgtgagtactatatgaagaatggaacttgtaagtttggctctaattgcaagtatgatcacccaagggaaggctctgtgcaagcagtcatgttaaattccagtggataccctctacgctcaggtgagaaagattgtacctactatgtcaaaactggccattgcaaatttggatctacatgtaaattccatcacccagaaattggtggagtttcagagacacctaacatgtatccaccagttcagcctcagcctatctcttcctctcatccatatcaacatcttgctggctggcaaatggggaggcctcctgttttgccaggatcatttttatcaggctcatatccaccaatgatgcttccgtccacagtcgtaccaatgcagggatggaacccttacatttcacctgtgaaccaagttgcgtcagctggggggcatcaaactgttcaagcagggccgttttatggcttatcgcaccaagggccttctgctgcagtcacttatggcagtcagtatgcaccgttatcttcttcaaccatgccttcaagtagcagtaaacaagaacctgcctttcctgcgcgacctgggcaacctgaatgccagtattatctgaagacagggagttgtaaatttggatctgcatgcaaatatcatcatcctcagtatttgaatacacctaagtctaactgtatgctgagtcctcttggtcttcctcttcggccgcacgctgttgccaggatagtcagtccaaatgtatatcgcttgagtctggattag

SEQ ID NO: 13676 - DNA, 1431 bp, Oryza sativa
  Clone ID: TFbOSC422882j.C1.o4.fg
atggcggacgccgacgcgagggccccgcccaaatcggaccccggcgccacgccgatcgatgaggtctccggtggtgagaagctgccgggtgaggtggcggcggcggtgggggtggagggtgctgcggcggattcgaggccgcggttcccgaggcgacccggggagccggactgcacctactacgtcaagttcgggagctgccgctttgggatgaagtgcaagttcaatcatccggcgaggaagaagaagagtagggtgaaaggtagtaacggtggtagtggcagcggcgggagcaacagcagcagtaacaaagcctcctcgcctgatgatgagcagcaggctccaaaagaggaatacggaagctatgttccagatatttcacctgaagttgattctttgggatttgctgacaaggggagtgcgtctaacttagaaaactttaagaaatattcttatgagattatcgatgtgaagaagggaagagtggagccaaaggaacttaaggtactgaaggttgccaaagagaaaaggaaggaatttatttcagaaggtagttcccaggaggaatgcaagtattattcaacacctggaggatgcaaatttggtaaagcttgtaaatacctccaccgtgatggaaaagaagggaaaacagacgctgaaaaggttgacctgaactttctcggtcttccacttcgtccaggggaaaaggagtgtccctactacatgcgtactgggagctgcaagtacgccactaactgcaagtttcaccatcctgatccttctaatgttgcttctaaagatccacagttggagcatgagaatggggatgctccacagcaagatgttcaaggatcatcgtctcagccaaatgcttcaatttggcccgatcagagaacagtgaatgagcatcatgttccgtttatagctccatctccatcgtacagtgcagggatgcttcctcctcaaggaatgtatccacctcctgaatggaatgggtatcatcaggttccgttgaatccatattatcctcctggagtccctttccaacattttccagctgctcctataaatcatcctatgtacaaggcaccagaaatacctggacatcagcaggttccttccgaggaatacccagagagacctggccaacctgaatgtcagcattttgtgaagagtggtttttgcaaatttaggatgaagtgcaaatatcaccacccaaggtcaccggtgcctccagcaggagctcttagccctcttggcttgcctataaaacctgatcagcctgtgtgcacatactatggtcgctatggggtctgcaaatttgggccagcttgcgcatacaatcaccccttcaattttagccctgtacctgcagcgggacctcctctcctccctgctcaatacccaactccaggaaactacactctctga

SEQ ID NO: 13677 - DNA, 2157 bp, Oryza sativa
  Clone ID: TFbOSC27392j.C1.o3.fg
atggccgcccccgccgccgacgacgacgaccaccgcgccgccctgccccgtgaggaggacgacggggaggaggaggagggatcggaggaggaggtggagagcgacgacgaggaggaggaggagggggaaggatatgactggtcggaggaggacgaccccgaggccgcgagcctcgccggcatctgcgaccccgacgcgggctcctacgacgaccccaccttcgaccccgccgccgacggtgacctcgaggtggacgccgtgctgcggtccaggatggcccggatgtcactctcctccgcgcgcaaggacaggaaaggatcgcggatgccgaagatggggaaggaggagatggatcttctagccatggtggacaagctgatgcatggtcagttctttcttcgattgccattgtgtgactgtgatatctccaacaatgtgatgcaaactgatggccagttggagaaactaaaggtttatgaatgcaaagcatatttgaggatgcacaagctaagattgtcaggcaacaaggaagtgctcctaactcgcatcagaggacaaattgagtatgaactatatcctttatgtaatctgtccttcttctttatatgttacttgtcaactttgttgatattttgtaatgcaaatgaactgcttttgtttgaccactttcttgtgcttcaaaaccagggtgaaaactatgggagaggtgattcatgcaaaggtgatgttgtggtctttgagcaaaatatttacaaaaggaaaaaaggagctcctcgtggtgtcaagggtcatttatgtggtcaaaggacaaatgcaggtcgaataatcaaagaaagctatggcactaagaagcaacagcacacgttcactccatggcttgatgaagaggaaagaaacagagccctccaagaaaaacatgcaagagggtatgtggcacgtaagacaagggaagtcaggattaaggacaaagagaatgaacggatgaggagattaaataggaacaaggaaaacaagagcaaaggacaggacaacatgaataaaaaatcatctcaagcggtttttccgcaacatacggtgactacgaatactgttcagaaaagagctgagaagataattccttcactccaacatggtgaatctgggaactcaagtcagcaacatttatcatcaaagcaaactcccacagagcaattgctccattacctgccacagttccctcatcctcaacaacacaacgaagtgcttctccaaaagggaacatcaagaactagcacaacgcagctcattaaccatcaggctccttccctccaacatgccgtaaaagtggaaacaacacagcagcagcagcagcagcagccgccaaaatcaatcaagcctgctcctatacagcaaagttctgcatacccacagcagtatcccaaacatcaacaccacaatcaagcgcttccgcgggttcctccttcgcaagagcaaagggctgcagtatcccaaacatcagctgccagacaagattttaccaatcaccaggctcctccatccagacaacatggaggatcagagaacatgaggcggcaggagatatcttcaagacctactcctactcctactccacagcaagcagtctcttacacacagcagcaacctcctaatcatcaatacaggaatgaagcgttttggcagcagggcgggacaagtacttcaagaacaggcttcatggatcgtcagagtaacaattggggctctacagaccatgataaaccagccttccagcctttcactcagaaggcaaagacataccaacatggttccaatggctctggtcatcaccaggctcgtgtcgatcgcgaaacgcatcaacctctcaggtcaagaaaccaggattaccattgggaggaccagagttatcatcaccaacagaaccatcatcagaattattatggtcacaggcaaatgtctcaagatcagtatcatcaccaacagaaccatcatcagaattaccatggtcgccagggaatgaacggaaaccagtaccatgacaggcagaatcataaccagaatccccagaggtttcgaccatggaagccatgcttcatttatcaacaacagggatggtgcccgtatggggaaaactgcaaatttatgcatgatttgaggtag

SEQ ID NO: 13678 - DNA, 2160 bp, Oryza sativa
  Clone ID: TFbOSC411215j.C1.o5.fg
atgcctcaggacgatgactggttctgggggcgcccgactcccgtcgtcgtcggcgacggcgagacgacgtcgaagccaaagccgccggtggcgggaaagacgaagaaggtggaggagcagcacccacggcgaccgggggagccggactgcagctactacgtcaagttcgggagctgcaagttcggcatcagctgcgtgtacaaccacccggatccgaggccgcagcatggcgccgacgacaagaagccggccgagcagttcccgcggcggcccggcgagcccgactgcagctactacgtcaagttcgggagctgcaagtttgggatgaattgcaggttcaaccaccctccccgcatgccagtgccaccacaacaagagtatttctctgggaatgcatgccactgccaccatattgaaggcaaaagtaaagttgagcaagtaaagctgaacgttcttgggcttccacttcgtcctgggacagggttgtgctcatactacatgaaccggggaatctgcaaatttggcactaactgcaagtttgaccacccagatccaggctcagatcatgagaagtgggtcgtttcaagtaatgccaatcaagtttcctctcaggtgaacatttactcggtgcttgaccatggagaatcgaatgagcatacttttacctccgaagaagtccatcagccagggattccaagttttcaccaacgaatcagttacacaagggaccaacttctccaactttgtcagaatgtcgaagtgcccaaggacatcttaaaattttgtcaagatattaatgttgaactgaatggtgaagataaaatttcgggatttggagcagagaaagatcatgtgagcatccttcccttctcatatgtcatcatggcagaaatcgtttgtgctgctctgattaatgttcctcaaagatgcaaagtcttgtatttcatagtacaaactccatcatataaacggtttgacgcgacagacagccgtgactggcattcatggtctgcacaaactaattgggaacagaaattttgggacaacttctctgaagcaaaagaaccctattctttaggttggaagcaagagaaatttaacaagcctgaccaatcaagcttccactttgattctaaagatcagagaggcattatctctggcaaagatgaagttctgaaaacattgaaaagtatactaaacacattttcaccaaagatgttcgatcttcagaagggccagctaatagaaacaagaatctctagcgctgatattttgaaggatgttattaatcttatatttgaaaaggttgttgctgagccagccttctgttcgacgtatgcgcaactttgcacatatctaaatcaaaacctcacaccattccctcctgaagactgtgattgtgaagaaattacgttcaaacaagcactgtcgaacaaatgtcaagaaatattcgaaagtgctcacaccgtatgttctgagattggcaaattgattggacaagaccgagagatggagcaacgggataaagaaagggtagtgaaacttgaaacactgggaaatattaatttcattcgagccctgctcaagaaaaagttgatcacaaataagataatagatcacattgttcaggcagtgatggattgttgtaagtttcgctttgaaccacttggaaaagttgatttgctaaatataatatttgaaggcatgctggattcagattcagcaggtgatgaatctaatatttgcgtcaatgctatgattggtggcaataaatcttccatagcttcaaatgatgtcgagatgactcgtaagaatgtcaataggcaaaatgaagaggcaatattacaaaaatcttatgatgaagtcccaaataacaaaatggatcctcagaaaaattatgcagatggagcaatcagttatctcattgagaaagagaagccaactaacttagaatcatctgtgaggatctgtcgaggaggatgcagtatttcagagataatggagttagttgttgatgcaggagctgtggaaggcagtgatgagcatttcatggctaccttattatttattaaacctgaatatagggaaatatttcttacccttgatacacgtgaaggaagacttgggtggctgaaaaggatgtacaaggtgaaggaataa

SEQ ID NO: 13679 - DNA, 719 bp, Oryza sativa
  Clone ID: TFbOSC32478j.C1.o1.gp
ggagaacctgtctgcacattctattctcgttacgggatctgcaagtttggtcctaattgcaaatttgaccatcctatgggaacccttatgtatggaagtgcaacatcaccaagaggtgatgtgtcatctatgcattatcagttgtcaccctcaccagggcatccaggaatattgcttgatggaggctctggaaggtctcaccgggttcctcagtctgattcccagcaaataccctctggcgatgggaatgccgagagagaggcatcataagccctcctcggcctttcctcatgctacctcccattcttgactcttcagtaattatctccaacaaattcaaagagctgaagctgtacaggtccttgtccatcctttttctgcttctctgaatcaccacacaccggtgcttcatcatgtatcacattcaggcaggaaaatgttcttgcttgcccctccccgccccaattcctgcatgccccgtgaaaataaatggggcaaccattcttatttatccctaccatatatacacacacaagatacactcacctcctgacactcggttcggcgaatgatgtgccttgatccctctgttgtagttatacaggtggcctgcagtggacaaagcttaccaaactgactgtattggggattctgtttcgttttgctcttcttcctttctaggcattggggagtaagcgcaagacttgctgcttgtgcaa

SEQ ID NO: 13680 - DNA, 1242 bp, Oryza sativa
  Clone ID: TFbOSC101178j.C1.o1.fg
gaggcgaagaaggagtacccgcctgacctgacgctgcccgacctcaagagcggactgttcagcaccgacgagttccgcatgtacagcttcaaggtgaagccgtgctcccgcgcctactcccatgactggaccgagtgccccttcgtccaccccggcgagaacgcgcgccgccgcgaccctcgccgctactcctacagctgcgtgccttgcccggagttccgcaagggcggctcgtgccgcaagggcgacgcgtgcgagtacgcccatggcgtgttcgagtgctggctccacccggcgcagtacaggacgcgcctctgcaaggacgaggtcggctgcgcgcgccgcatctgcttcttcgcccacaagcccgacgagctccgcgccgtcaacccctccgccgtgtccgtcggcatgcagcccaccgtatcgtcgccgcgctcctcgccgcccaacgggctcgacatggcggcggcggcggcggcgatgatgagccccgcctggccgtcgtccccagcgagccgcctcaagacggcgctcggcgcgcgggagctcgacttcgacctcgagatgctcgcgctggaccagtaccagcagaagctgttcgacaaggtgtccggcgcgccgtcgccgagggcgagctggggcgccgcggcgaacggcctcgccaccgcgtcgccggcgagggccgtgccggactacaccgacctgctcggctccgtcgacccggccatgctgtcccagctccacgcgctgtccctcaagcaggccggcgacatgcccgcgtacagctccatggcggacaccacgcagatgcacatgccgacctcgccgatggtgggcggcgcgaacaccgcgttcgggctggaccactccatggcgaaggcgatcatgagctcccgcgcctcggcgttcgccaagcgcagccagagcttcatcgaccgcggaggccgcgccccggcggcgcgttcgctcatgtcgccggcgacgaccggcgcgccgtccattctctcggactggggctcgccggacggcaagctggactggggcgtccagggcgacgagctgcacaagctccgcaagtcggcgtcgttcgcgttccgcggccaatccgccatgccggtggcgacgcacgccgcggcggcggagccggacgtgtcatgggtgaactctcttgtcaaggacggccacgccgccggcgacatattcgcgcagtggccggagcaggagcagatggtggcatga

SEQ ID NO: 13681 - DNA, 723 bp, Oryza sativa
  Clone ID: TFbOSC33167j.C1.o1.fg
atgtacctgcgtccggacatgatcacccctggaattgatgctcagggcaaccccatcgaccctgagaagatccaggccgacttcgaggatttctacgaggacatctttgaggaactcagcaagtacggcgagatcgagagcctccacgtgtgtgacaacttcgccgaccacatgatcggcaatgtgtatgttcaattcagggaggaggatcaggccgccagagcgctgcaggcgctgacggggcggtactactccggccgtcctatcattgtcgagttctcgccggtgtccgatttccgggaggccacctgccggcaatatgaagagaacagctgcaaccgtggtgggtactgcaacttcatgcacgtcaaggagatcggcagagacctgaggaagaggttgtttgggcacctgcataggtcccggagaagccatagccatggccggagccgcagcccgagcccgtaccattaccggagggactatgatcggaggagctcatcgcggtccagggaccacgacgattactaccgtggaggtagccacgattactaccgtggaggtagccggaggagcagcgagaggcaccgcagcagctacgacagcgatggcagcaggcggcggcacaggtccaggactaggagtcctgtcagggatggtagcgaggagaggagagctcaaattgagcagtggaaccgtgaaagggaggctgcacaagtgtga

SEQ ID NO: 13682 - DNA, 1273 bp, Oryza sativa
  Clone ID: TFbOSC14394j.C1.o1.gm
atgacgacaaagtttgcagatcttccaagggttgtgacatcggaaaagaaagaatatccagtggatccgtcccttcccgatatcaagaacagcatctatgcttccgatgagttccgcatgtactcatttaagatcaggccatgctcgcgggcgtactcacatgattggactgagtgcccgtttgttcacccaggggagaacgcacggcgtcgggaccctcgcaagtatcactacagctgtgtgccatgccccgactttagaaagggagtttgccggcgtggtgacattaccatccccaagagcctcggcaacagctacaatggagatggctgcagcaatgggcttgatgcctggttctccatcatcagtttcagcagtcatgtccccatttacaccaccaatgtccccttcaggcaatgggatgcccccttcattgggctggcagcagccaaatgttccgacactacaccttccaggcagcagcctcagtcgagccggctccgtacctcacttagtgcaagggatatgcctgctgatgattactccctgatgcaggatattgattcacagcttataaatgatttgtgctattccgtattgggtggtatgttttcaccatctcacaaggctgctttccttaatcagttccagcaacagcagcaggcacttctttcaccaatcaacacagtcttctccccgaagtctgtggacaaccagcagttgccttcacactcatctctgttgcaagcatcacttggtatatcctcccctggccgcatgtctcctcgatgtgttgaatctgggtcccctatgaactctcatctttgcgctgctcttgctcagcgtgagaagcaacagcagacaatgagaagtctcagttctcgtgatcttgggccgagtgctgcaagagcatcaggtgttgttggctcccctctaagctcatcatggtcaaagtggggatcaccttcagggacacctgactggggtgttaatggtgaagaattgggcaagcttcgccggtcatcatcgtttgagctgagatctggtggtgatgatccagatctctcttgggtacacacactggttaaggaatctccaccagagaagcaagtcactactgctgaatccataaactttgttggaccttcaccactgatgcctcccagtgtaagcaacggtgaaggtcctagtctgaatgccccgctggatgggcatgaccaagctgctgttattggagcattgcttgaacagatgcagcttgatcagcatattg

SEQ ID NO: 13683 - DNA, 1161 bp, Oryza sativa
  Clone ID: TFbOSC400431j.C1.o28.fg
atgatgatgatgggggaaggagtcagcagcgtcccgccgtggtctcacctccccgtgagcggagtcgatgtactcggcggcggtggtggcggtggggatgagatgacgccgtacgtgatcgccgcgctgcgggattacctgccggcgaatgatgtcggggtgggggctgacgaggaggaggaggccgcggcgatggccgcggcggtggacgcgtacgcgtgcgacgagttccggatgtacgagttcaaggtgcggcggtgcgcgcgcgggcggagccatgactggaccgagtgccccttcgcgcacccgggggagaaggcgcgccgccgcgatccgcgcaagtaccactactccggcaccgcgtgcccggacttccgcaagggcgggtgcaagcgcggcgacgcctgcgagtacgcccacggcgtgtttgagtgttggctccacccggcgcgctaccgcacccagccgtgcaaggacggcaccgcctgccgccgccgcgtctgcttcttcgcccacaccccggaccagctccgcgtcctcccggcgcagcagtccagccccaggagcgtggcgtcctcgccgctggccgagtcctacgacggctcgccgctgcgccgccaggcgttcgagagctacctcaccaagaccatcatgtcctcgtccccgaccagcaccctcatgtctccgcccaagtcgcccccgtcggagtccccgccattgtcgcccgacggtgccgcggccatccgtcgcggatcttggcccggcgtcggctcgccggtgaacgacgtcctggcctcgttccgccagctccgcctcaacaaggtgaagtcgtcgccgtccggcgggtggagctacccttcgtcgtccgccgtctacgggtctcccaaggccgccaccggcctctacagcctccccaccactccactggcttccacggcaacggtgaccaccgcctccagcttcatgcccaacctggagccactggacctcgggctcatcggcgacgaggagccggtccagagggtggagtccggaagagccctccgggagaaggtgttcgagcgactgagccgggatggtgccatctccggcgacgccacagccttcgccaccgccggtgttggcctcgacgttgattgggtgtccgacctcatcaactga

SEQ ID NO: 13684 - DNA, 1395 bp, Oryza sativa
  Clone ID: TFbOSC900188j.C1.o9.fg
atggttcggaagcgtcgcgacaccgcgagggttaacccaaccgcggttagcggagggggcctctctggtttatatagccgcgcctcctcttcccctcctcttcaccacagcggatcacggcggcgacttcggacgaacaccttgcctcgccggagttggagaagaggagaggagttagagagcaagatgatgatgatgggtgagggcgcgcacgcgccgccgtggcagcagcacgtggcgtcgccggtgagcggcgtggagggaggaggtgggagggagatcgaggtggtggccacaccgtaccacctgctcgacacgctgcggcattacctgccgtcgaacgaggcggcggcgccgaaggataaggagaaggccgcgccggtggcggcggcggtggacgcgtacgcgtgcgatgagttcaggatgtacgagttcaaggagcggcggtgcgcgcgcgggcggagccatgactggacggagtgccccttcgcgcacccgggggagaaggcgcggcggagggaccccaggcggtactgctactccggcacggcgtgcccggacttccgcaagggcgggtgcaagcgcggcgacgcctgcgagttcgcgcacggggtgttcgagtgctggctccacccggcgcgctaccggacgcagccctgcaaggacggcaccgcctgccgccgccgcgtctgcttcttcgcccacacccccgaccagctccgcgtcctcccgccctcgcagcagcagggctcgaacagcccgaggggttgcggcggcggcggcgcgggcgccgcggcgtccccgctcgccgagtcctacgacggctcgccgctccggcgccaggcgttcgagagctacctcaccaagagcatcatgtcgtcgtcgcccaccagcacgctcgtctccccgccgaggtcgccgccgtccgagtccccgccattgtcgcccgacgccgccggcgcgctccgtcgcggcgcgtgggcaggagtcggctccccggtcaacgacgtgcacgtctcgctccgccagctccgcctcggctccccgaggtcggcgccgtcgtgcgcctccttcctccccgccggctaccagtacggctcccccaaatcccccgccgccgccgccgccgcggcgctctacagcctcccgtccaccccgacaaggctatcgccggtgacggtcaccaccgcctccggcgccaccgtcaccgtcgagccgctcgacctcgggctcatcgaggaggagcaacccatggagagggtggagtccgggagagctctccgggagaaggtgttcgagcgtctcagcaaagaagccaccgtgtccaccgacgccgccgccgccgccgccggcgtcgcgcccgacgtcggctgggtatccgacctcatcaactga

SEQ ID NO: 13685 - DNA, 1167 bp, Oryza sativa
  Clone ID: TFbOSC418457j.C1.o13.fg
atggccgatcccaacggccgccgccgcctccccaccggtgatccagatcaagccaacgcctccccgtcccggcgagtctccgccgtcgatggcgtcaccggcggcgagggcaggcccacctactcccacttcccccccggcgcgtacgagccgacggacgtggcctacggcatccgcgacgcggccaacgacgagcgggcgcgggcgcgggctcgggctcgccatgaccagggtggcggggctcatgaccaccaccacgaccggccccggcaagaccagcgcggcgaggctcacctccacgacctccccggcgagaagagcgaggtccccgacgtcggtccatctgaccaacaggggaaggaagcctccgacaccgacatggctccattggcggcgctggcaaagagatcctacgacgtcaacttcccgccgctgcacgagcaccgcgccgcccccttccccgccccggcacccgcattcgcacccgcaccggcgggcaccatgggatcctcttccgcacaggtgcagggtgacggggctcctgacaatcacgaccacgacccacgtcacctaccccggcaagaccagagcggcggagctcaccccgacgacctccacggggagaagaccatcggttcaggctccgatatcctcgacgactccaagagaggaatgatcaacgccggtccccaacacggccgcatcaccacctccaatggcggcagcggcagcggcagcgacaagggcaagggggtctcctacgccggggacaagcccgcatctagctcgtcgtcctccagctctgctggccagcaggggagcgacaccgacaaaactccttcggcggcggcggcgagctcctacgccgtcaacttcccgccgctgctgcccgcacccgctcccgtccccgcccccgcacccgcacccgcggtcgccggcgccatgggtgttgccaatgcccaccacaagattgcgctgtgcagcaagtggaggaaggggaggtgccacaacggggcagcgtgtcgctactctcatggcgaggaggagcaacgaattgtgccggagatgagagtcggcggcgggggacgtccgtgcccggagctcgccgccgccaagggatggtgcaggtacgggctcaactgcaagtattgccatggcggcgtatag

SEQ ID NO: 13686 - DNA, 160 bp, Oryza sativa
  Clone ID: TFbOSC32469j.C1.o1.gp
agaagcaatgtggcaaatgactttaggaggaggagagtctatggagtccactccataccctgagcggataggagagccagactgcagttattatatgaggactggactatgtaggtttgggatgacctgcaaattcaatcaccccccaaatagaaaactg

SEQ ID NO: 13687 - DNA, 1521 bp, Oryza sativa
  Clone ID: TFbOSC419228j.C1.o18.gm
atggagcagccgcacgccgccgccgccgcagctggtggaggggagggggagggcggggctagccccgacaccggcctggaagggccgatgtggaggatggggctgggaggaggaggcgggggaggtggaggtggaggaggaggggatggggacgcggcggggaggctgccggagcggcccggggaggaggactgtgtctactacctccgcaccggcgcgtgcggcttcggtgaccgctgccgctacaaccacccgcgcgatcgcggcggcactgagcttgaaaattgggcatgccactgcctagatcttgtccggcgcatcggtagcactcatcgggtagcagcattagagtttgggttcgcggtggagggtgagaaggagtgctcctactacatgaaaactgggcaatgtaaatttggaactacatgctcatacaccccaatgatgctctcatctggaatgatcccattgcaaggatggagcccttatccggcttcggtaaaccctgtagtgtcaggtggagctcaacaaaatgttcaagctggacctgtgtacggcatggggcaccatggatcttcctctacaattgcttatggtggctcgatagttctcatcggcagttcgcggcactgggagactcggatccattccctcgtggccggcggggaaaaggggcagagcgcgccgacttggagacgcttcggcgacatcgtccacctcgacacgagcggtggacgcggcggatactcctcttcctcctcccctctcttggtcactggccagtggtcaccgctcgccggagaggaagacaaacttgtggtggtcgtcggccgattggcaatcattcggcaacgacgaccgatgctggttcagccgccgaacgccgacgcccagcacactgacatccccgacggccgctccttcctcggcgtcccccgctactaccgccacagcctcaccgtcctccagagagccgtccgctcctggaatgcccacaaccacaagcatccaatgacggcggcggtggcgccgtcgctgctggccgtccaggccgtcgtcgccgagtttgaccgcttcctcgacgcgtacgacttcaacgccgtgggatggtcgcgcgaccacccgatggccgcggcagcggggagattcttggacaagaggaacccgaacacggacaagaacaacccgagcggccttgccggcgtggccaggcggttcgtgatgttcaacggtgccgtctgtgaggcgcagctgcggtggctcgacggcgtgctgcgggggctgatgtggaactatgagggggtgatgcgcgtggtgcaccggtggacccgaggccccacctgtcatcgtctccccccaaccgtctcctcctctctcctttcccccgaggccccacctgtcgggtccttcccccacctcccgccgatcccggtgtcgccgtcgctcgtccgcacctcggcatcgccggtcttcgccgcctccctcgtttttctccgccggccattgccgcccctccggtga

SEQ ID NO: 13688 - DNA, 1701 bp, Oryza sativa
  Clone ID: TFbOSC400711j.C1.o10.gm
atggccaccaccacctcctcttccgcctccgatcccgccgccatttcgccgacgccctcgcagcaacatgccagcagcacggtgaagacattggatgaccggcggcctgctggcaccagcagcagcgccggcgagacggaaccgaaggcggcggttgagccgcaggagtacccacggcgacccggagtgccggactgcagctactacgtggagttcgggagctgcaagttcgggatgcgctgcctgtacaaccaccctgcgaagcatgccggcggttgcgacaagctggagcacccgcaacggcccggggagcacgactgcctccactacctgaggttcgggagatgcaagtacgggatgaactgcaggttcaaccaccctcccgaccgcctgcctcagcagcaagtgcctgctgagcaaatccgttacacaagggatcaacttctcaaactgcgcgagactgttgatgtacctaaggacatcatgaaacttattcaagatattaatgtagaactccgtgctgaagatgaaagtcgggctccaaatgaaacaaattatgagactgacagccatgactggcattcacggtctttacaaactccagtggttgccgaggaagagaaatctcaggacgatactcgtgaagcaaaagaaccctatgctttaggttggaagcaaaaggagtttaacaagcaagaccaaaaaagcttccagtctgattctaaagctcaggctggccccaccttggctcttcataaggctgaagacccttggtcaatccagagaagcactgtccctgagaaatacaaagttcttaaaacagtaaaaggtatactgaacttattgacaccagagaagttcgatattctgaaggaccaactaatagaagcaggaatcactagaaccgatattttgaaggatgttattgatcttatattagagaaggcggttgctgaaccaactttatgtccgatgtatgcccaattttgctcttatctaaatgaaaatatcacagcattccccccaaaagacactcattgtgaacaaattacattcaaacaagcactatcggacaaatgtcaacaagcatttgaaattgctcgcaatgttcgagccgacatctacaaattgactggacgagagcaagagatggagcgacgggataaagaaaggctagtgaaacatcaaatacttggaaagattcgtcttattcgtgatctgctcaagcaaaaaatggtcccagataagatagtacatcacattgctcaggcagtgacggattgtgaaaattttcactttgaaccacttgagaatgttgatttgctaaatataatctttgacggcgtgctggattcggttttaccaggaactgaagctaataaagttgtcaatgctattattggtatcgagaaatgttccattgcttcaaatgatgctgggatcattcataaggatgttaataggcgaaatgaggaggcaaaattacaaaaatcttctaatgatatcccgaataacttgatcgatcctcagaaaaattatgtggtttcagcttttggtcatcccattgagaatgagaagcaaacaaattcagaaacatccgtgagaatcagtgaagtaggatgcggtatttctgagatcatggagttaattgttaatgctggtgctgaggaaggcaccctcaaggaagacttcggtggctaa

SEQ ID NO: 13689 - DNA, 1260 bp, Oryza sativa
  Clone ID: TFbOSC400964j.C1.o103.np
atggacgacgccggaagggcctccgctccagcggtggtgacgctccccgccaccgccgccgccacggacgagccttcccacgaccccgccgctctctatggagagggtatgtggcagcagatgaccatgagcggcagtggcgctatgcaacctggaccatatcctgagcggtccggagaaccggactgcacttactacctcaggactggattgtgcagaatgaaaggagaataccctgagaggatggggcaaccagaatgtcagtattatctgaagactggaacatgcaagtttgggcctacatgcaaattccatcatcccagagaaaaagctggaattgcagggagggtgcagctaaacacattaggatatccactccgaccgagtgaaaaggagtgtgcatattacttaaaaacaggacagtgtaaatatgggaatacatgtaaatttcaccatccagaacttttcaatgctatggcttcttcacgtggttcacctatttatccttctgtacattcctctgcaaccgcgggtccaccttatactggaacaatggctagctgggcttttccaagaggttcttttattccaagccctagatggcagaatccctcaaattatgcaccgatgattgtaccgcaaggtcttgttcaagtaccaagctggaactcatatactggccaaatgatgcctgtttcatcttctgagagtcgactgcagtccccaggggctcaacaaacctatggaacttctcagcaagttgatgccagtgcaggcaatcagggaatgttgtcaccctacagatctagttcatatcctgtacctcaatacgcattgcagagagagaatgtatttcctgagagacctgatcaaccagaatgtcaatactacatgaagactggagactgtaaatttggtgcggtgtgcaagttccatcatccccgggtgcgatcaatgcctactccagattgtgtcttgagtccagtgggtcttccactacgtccgggagaagaactgtgcaagttctattctcgctatggcatctgcaagttcggcgcgaattgcaaatttgaccatccaacgatggctcctccaatgggagtgtatgcctacggctctgcttcaactaatgtacctatgattgtcggtatcggctttagtggatcttggcagcaaggagccaaggacccgacagattcctccggggctccaccaaacacacatgtactcggagaagaccctatcccatatcgtaaaatc

SEQ ID NO: 13690 - DNA, 1830 bp, Oryza sativa
  Clone ID: TFbOSC22496j.C1.o9.fg
atgctcctcgtcgacggcgagcccgtctccgcctccgcctcccccaccttcggctcctcccgcggggtgcgcctacttggttgttggagggatttcttcccaccccgtctctcaccctcccgattcttgcaggggagcggcgggagggagctggtggcggcgctcatggggaaccccgggctccgcgccgcatcggagaggctcagggcggagccggagaggcggatctcgtcggggccagaggaggatgatgcggacgccgcggcggcggcggcgccgaggcacgtgtacgtgttccagcgggagttcgccacggttgatccggcgcgcgtcgagttagtgggcacagatgaggtgactacatgcgtgggtgtagtaattcgcaacaacaagactggaatgacctccattagccacatggacttcccaaaaattgtggagggagggctcaaacagatgttagaattacttggtgatgacaatgcaccgtttgatgttgtacattctgctggaaggaagcacatcaaacaggaagggtattcctatccactatgttgcaggatacttgaggtgttgtataagtcccggcagcaattccatcttcgtacattttgtgtccttgggagcaataccacaactgattcatacgggaatacacggccaataatcggtggatttgtggtggagacctcatctggggctgttaatccagcaagctttgaaatgaattcaaggtgtccagatgaaatagttaggagaattcgtgtgagcgtttcttcttatgatccaaattggcaaggaaggctactagagacttatgatactcacagtgatgcttttgaaattgcacctgcctgctggatgccggattgggctgaaatggcatcatcacttaaccagctatcggactctgaggtcttgttgcagtgctccacctctccagctgccgagccaccacattttgtggaaaatgagagaaggatatggagatacttgattgaaaatccatattggcaagacacatttccgaaatacaagcctcgggtcttccataggaccagtgatggaagtacttctggctgtccttttggttcaagttgtcattttctccataacttccctggtggctaccaggctgctgcaaagatgaccagccatggtgggacagctgttgcagctcctcctggaagaatgcctttaggacctggtgctcctaatgggccacctacatccagcgtgaaaactcgcatgtgtaacaagtacaacactgcagaaggatgtaaatggggtagcaagtgtcattttgctcatggagagagggagcttggaaagccgatgctgctggacaactcaatgccacatccaatgggatcaatgccgtttgaggctccaccaatgcctggcccggacatcgttcctccctcaacctttggtgcctcagccacagcaaagatcagtgttgatgcatccctggctggcggtatcattgggaagggtggaaccaacacaaagcatatatcccggatgactggggccaagctagccatccgggataacgagtccaaccccaacctcaagaatatcgagcttgagggtacatttgaccagatcaaacatgctagtgctatggtcacggagctaatcgtccgcatcagtggtaatgcccctccagccaagaacccgggcagggggtcgcatgctggggggcctggaagcaacttcaagaccaagctgtgtgagaacttcaacaaaggctcctgcacgtttggagacaggtgtcatttcgcccatggtgaaagtgagctgcgcaagccgccggctgctgcttga

SEQ ID NO: 13691 - DNA, 1491 bp, Oryza sativa
  Clone ID: TFbOSC26691j.C1.o8.fg
atggcggactcggaggatggagatcacgttgcgacgacgacgacggagcagcgctacgacgacgacgggcacctcgtccccagcagcggcggccaggaggaggagggatccggcggccgcgacgtcgtcgtccccggcggccacgtcgctgaggattaccgctctggcgttggcgtccccgtcggccgagacgcaggcggcgccacctcctccccgccgcagccagtccacgtcaccccgagcatcctcgtcggcagcatccacgcgccggtcttccagggcgagctcgtcggcatgaagttcggggtcgggtcaggctccatgggtgccggcaccagcgcgaccaggcgcctccccgcgaccggttttggtgctctgccgaccagcagcatggcggaggatagtgccgaccacgccgacgacgaccacctcgccgaggaggaggaggaggaggaggaggagcactacatcgacgacgggcccctcgtccccagcagcggcggccaggaggaggagggatccggcggccgccacgtcttcgtccccggcggccacgatggtgaggaggaccaccccgacgacctcgtcgccgacctcgacctcgacctactcgtcgacggcgtagtcggccctgtccccggtggccacctcaacgcagatgcccccgccttcgtccccaccacccgtgggcgccaggacctctattccgccctctcctcatccgcccccgccgccggttaccggtaccgccactacatcacctcgtccgcgctcgcagaagccggccacgtgtccccattcctcggtctcccgtacgccacggccttcgattctccgctcgaccgcgagttggtcggcccgtcgtcagcgccgccgccgtgctccgccgctagccgtgcctggttagtgcgctgttcctcaccgctctccgactccgagtggactcggcgttcgatcctggcgcgagaggctgcacacacaccggcctccaccgtcactgggcgtgggcggttcgagttcgtgcccattcccggcgcaccctatgctccgccgccgtcattcgcccccatcgccgccggagctggaccagcagcgcgaccgctacagcagctggcattcggactggaggaacacaagacgaagctgtgcgcggaatattattcccgtgggcttggttgtcctcgtggcaacacatgcaagtacgcccatggagaagatgacctgcgtttggtggtggcggtgagctctctagccgacgccggtgagggctcctcgtcctcggattcgtccttcgccgctttgggaggggaagacaagtacaagacgaagctatgcaagacgttcacgagtggtggattatgcctgtttgcagccaactgcaggttcgcgcatggggaggtggagcttgggaagaaggagccgtgctggtatttcttctccggtcagacctgcccccgcggtgacacctgtggtttccggcattcctactag

SEQ ID NO: 13692 - DNA, 1605 bp, Oryza sativa
  Clone ID: TFbOSC418457j.C1.o20.gm
atgtcggtgatggacgccaatcaggcgtacgctcggcaccactttgacggcggacacctgcgtggtgaccgcgccgacgtgctggcgcagcaggctgggatggatatcggcagcatggcggactcggaggatggagatcacgttgcgacgacgacgacggagcagcgctacgacgacgacgggcacctcgtccccagcagcggcggccaggaggaggagggatccggcggccgcgacgtcgtcgtccccggcggccacgtcgctgaggattaccgctctggcgttggcgtccccgtcggccgagacgcaggcggcgccacctcctccccgccgcagccagtccacgtcaccccgagcatcctcgtcggcagcatccacgcgccggtcttccagggcgagctcgtcggcatgaagttcggggtcgggtcaggctccatgggtgccggcaccagcgcgaccaggcgcctccccgcgaccggttttggtgctctgccgaccagcagcatggcggaggatagtgccgaccacgccgacgacgaccacctcgccgaggaggaggaggaggaggaggaggagcactacatcgacgacgggcccctcgtccccagcagcggcggccaggaggaggagggatccggcggccgccacgtcttcgtccccggcggccacgatggtgaggaggaccaccccgacgacctcgtcgccgacctcgacctcgacctactcgtcgacggcgtagtcggccctgtccccggtggccacctcaacgcagatgcccccgccttcgtccccaccacccgtgggcgccaggacctctattccgccctttccttatccgcccccgccgccggttaccggtaccgccactacatcacctcgtccgcgctcgcagaagccggccacgtgtccccattcctcggtctcccgtacgccacggccttcgattctccgctcgaccgcgagttggtcggcccgtcgtcagcgccgccgccgtgctccgccgctagccgtgcctggttagtgcgctgttcctcaccgctctccgactccgagtggactcggcgttcgatcctggcgcgagaggctgcacacacaccggcctccaccgtcactgggcgtgggcggttcgagttcgtgcccattcccggcgcaccctatgctccgccgccgtcattcgcccccatcgccgccggagctggaccagcagcgcgaccgctacagcagctggcattcggactggaggaacacaagacgaagctgtgcgcggaatattattcccgtgggcttggttgtcctcgtggcaacacatgcaagtacgcccatggagaagatgacctgcgtttggtggtggcggtgagctctctagccgacgccggtgagggctcctcgtcctcggattcgtccttcgccgctttgggaggggaagacaagtacaagacgaagctatgcaagacgttcacgagtggtggattatgcctgtttgcagccaactgcaggttcgcgcatggggaggtggagcttgggaagaaggagccgtgctggtatttcttctccggtcagacctgcccccgcggtgacacctgtggtttccggcattcctactag

SEQ ID NO: 13693 - DNA, 1104 bp, Oryza sativa
  Clone ID: TFbOSC416788j.C1.o1.fg
atggattacaccaacgccatccacatcatcccggacgcggcgggccccgacgcctgggcgaacgcggcggcgcagggcggggacgccgggatatgggccaccgaggacgactacaacagccagtggaacgccgacggcggcggcggcggctcctcgagggccgggagcgagcagccacctccgggcaagaaatcccgcggcggcggcggcggcgaaggcggcgggaacacgagcaagtcgcgggcgatcgggaagatgttcttcaagacgaagctgtgctgcaagttcagggcggggacctgcccctacgtcaccaactgcaacttcgcccacggcatggaggagctccgcaagccgccgcccaactggcaggagatcgtcgcggcgcacgaggaggccacggaggcgagggaggagcaccagatccccatcatgacgtcgtcgggacccaccgccggcggcgacgcgggctgcggcggcggcggcggcggcggctccgggagggcctacaaggggaggcactgcaagaagttctacaccgacgagggatgcccctacggcgacgcgtgcacgttcctccacgacgagcagtccaaggccagggagagcgtcgcgatcagcctctcgccgagcgtcggcggcggcggcggtggcgggagctacaattctgcggccgccgcggccgcctccgcctccgccgcggcggggaatgggccgatgcagaagccgtcgaactggaagacgaggatctgtaacaagtgggagatgactgggtactgcccctttggcagcaaatgccacttcgctcatggagcagctgaactccacaagtatggtgggggacttgttgacatagacagcagggatgctgcagcaactcccgactccaagcaagctgtggtatctgcgaaagctccagcagagaccgctgctgcatccaccacagtgctccctcatgcagacgtgtaccatctaggcgtgcaggcgcagcgttctaccattgccggccaaaggtctgggcaggtacagaggcccattcagaaatggaagggccctgacaagatcagcaggatctatggtgactggatagacgaaaccgagtag

SEQ ID NO: 13694 - DNA, 1164 bp, Oryza sativa
  Clone ID: TFbOSC400011j.C1.o3.fg
atgcaggaagctcttctacctccggctcatccaggccgcttctactcggactttggcccgaagccgttcggcagcggagatcaacggctctcctcgcccaacctgctgaccaacggtggagatctcttctacggctgctactcccccttcagccctacccgcgtgctctcgccgccgccgccgcggcgcgccgcctcgttctcccactgctcgtcctcctccgactccgtcgtcgacgacggagatggtgcgggggcagcggcagcgaccgagcaccgcctccacctcgcccacctcgcgctccagtaccaggagatggccaaccgcttcgagctctgcctctcccacctcgccgatgccgcggacgaggcggccgcgctccgtcaggagaacgccgagctccgcgtcgccaacaacgacctcgcatgccgcatcgccaagttcggcggaaggcagagctccgccatcgccctcgccggtgacctccgccgcctccgcctccccaaggagcagaccgtgccagctcttcctcctccgccgcagtctccgccggccgcactgatgaatcccgtcgccgtccccgagaagcaggctgttcttccgaagagcatctccatccgttcgaccggataccagaagctgaaccagggcggcaagcatcgcgtgtcgaagccggtgaacgtcggctcggtgagaccaaatcccccaattcctccattgtgttgtgtctggctcccactcttgcagcgcactgactcctgtgctgaatccaaaatcccaatcctaactagtacgatgttcttgatgcgacaatgcaagcagcagcgcgtgttcgtgggcattgacggcgcggagggaggcgagcacaaagttggtgtgaagaaggaggagccgcccatgggtgggctggagttcgaggtgtacaaccagggcatgttcaagacggagctgtgcaacaagtgggaggagaccggggcttgcccctacggcgaccagtgccagttcgcccacggcgtcgcggagctccgccccgtcatccgccaccctcgctacaagacccaggtctgccgcatggtgctcgccggcggcgtctgcccctacggccaccgctgccacttccgccactccatcacccccgccgaccgcttctccttcggccattga

SEQ ID NO: 13695 - DNA, 1326 bp, Oryza sativa
  Clone ID: TFbOSC400848j.C1.o12.fg
atgtcggaccccttctacccgcacggccacggcggcgccgcgggcggcgagggcgcggccgcggcggggtactcgtcctacgaggtcgacctcatcgcggcccgctacggcggccgcccgctcgccaacccttcctcggccgccgccgacctcgacgcgcggctggccggcgcgaggcgatccatgggagttctctatcatcagccaattatgggaagccatagtactgttgaacagattgaggctttgtattcttcaaatactatgaccaagcgccctaggcttgaaagcagccttcctatatatccacagcgaccgggggaaaaggactgtgccttctatatgatgacccgaacctgtaaattcggaggttcctgcaaatttgaccatccacaatgggttccagagggtgggattccaaattggaaagaggctgcaaatgttgaagaatcctatccagaacaagaaggggaaccagattgtcctttttttatgaagactggtaaatgcaagtttggatcgaaatgcaagttcaatcatccaaaggaaaaggttaatgcattagcgtctggaaataccaatgatttttatgcaaaaacaggcaaatgcaaatttcgtgcaatgtgtaagttcaatcatcccaaggatattgaaataccttcaagtcaaaatgaacccgaaagtgcagtgactgttgaaggagaaacggatattggttcagcagctgattcagtttcagcgaagatgcaaactccagttgctgctgcgcaagagtttaactctaaagggctgcctatgagaccaggtgaagttgattgtcctttttacatgaagatgggcagttgcaagttcggttctacttgtcgattcaaccatcctgatcgtctagttttaaattttccacttccactgggtcaaaccattctccctactccggaatccatgctgctaaattcatctgcaaacttcatgcaaggctttgattttcatgcggcacacatgcctgttggacctgggccagtcacctatccccagaggcctggagcaactgtttgtgatttctacatgaagacaggattttgcaagtttgctgaccgatgcaagtttcaccacccaattgatcgttctgctcccgatccctctgcaaactgggagcctgctgaggagtctgtgcagcttactcttgctggcctaccaagaagagaggatgccgtggtatgtgccttctacatgaagactggcgtgtgcaagtttggtatgcagtgcaagttcgaccacccaccccctcaggaggctatcgccaaggtgtcgaattcagggagctga

SEQ ID NO: 13696 - DNA, 2037 bp, Oryza sativa
  Clone ID: TFbOSC404615j.C1.o9.fg
atgtcgacggcggccgctgatcccgccgcggcggcggatgcggcggtcacgaggaaggagaggcggagggagcggaagaaggagcggcggcgccgggcgcggagggaggccgcggaggccgctcggaaggcggctgaggcgctcgcggccgacccggaggaggagcgccgcctccgggagctcgaggaggccgaggccgacgcgtccgagcgcgcgcggcgagccttcgaggacgcggagcgccggtggctggaggccgccgccgcgcgcgccgcggagaaggccgcggctgcgagagaggagtcgacggctccggaggattcctcccgcgagtataaagatgaccatggaaatggaaccgaggaggatgacgaatgggaatatgttgaagatggaccagcagagatcatatgggaaggaaatgaaatcactgtgaagaagaaaatggtcaaagtaccaaagaaagccaaggaaaaccagccaattcaacaggataaggcacattgcccatttcacctcaagacaggggcttgccgctttggagtgcgttgcagcagagttcatttttatcctgataaatcatgcactctgctcatgagaaacatgtatagtggtccaggccttgctttggagcaagatgaagggcttgagtgtacagatgaagagattgaacagagctatgaagaattttatgaagatgtgcacacagaatttctgaaatttggtgaacttgtgaactttaaggtgtgtcgaaatggatcactccatcttcgaggaaatgtttatgtgcattataaatcattggattcagctcttattgcctacagcagcatgaatggacggtattttgctgggaagcagataacatgtgaatttgttgctgtgacaagatggaaggttgccatatgtggtgaatacatgaggtcaagattcaagacatgttcacgtggaatcgcttgtaattttattcattgctttcgcaaccctggaggagattatgagtgggctgattgggataatcctcctcctagatactggattaggaagatggctgctctttttggtccctcggatgattctatctatggcaagccaagcgacaccccacatttagagcgctcacagagttcagacaggaggagaccgagaagttctgatcctaggtacacaccaagcagaacaagggatgaagatgcacataaacagcactcgtccagagattattcacattcgaagcatgaacgcagcagccatactgagcacagacgagacagaaaagaatcatctgcatcagataagcaccgacatcgagagattaaagataagaccagcaaatactcctctaacatggaaagtgaaagagagtcccacaagtacatgcgtgaagaaaaacataggattgaccatggaaatggaggtaaaggagaccatggtaaagttaggtcgaggaagaacagatctgaacgccaagaaagtttggagcctggatcttctggccggtcttcggacttcatcgatcaagacaccaccgagagtccttcaggcagcaagtccactggcaggcatcacaagaagaccaggaggcaatccttagaagagcacagcaccagaaggagctcaaggcatcgggacatggaagatgatggaagaggacagtctgtagctgtaaaacgcaaggatcaccatgatacatcggatgatagatgggtagcaacaaacagtgatgttgattcagacttggagactcaataccagaggtcaagtagtgaaggcagcaagctgggaatgaaatatcatgctcgatcagattcagaaactgggtacggaaggtcaagaagtggaacaaccaagagccgtagggaaaggaagcgtcagagtggaaacggtgagcgcagcgacactttagaggttacttcagattcagacaccagagatatgagctctgatgcatggaggagccgatcgagaagcagtgacgagaatctctcaacgcacaggtcaaggagaaaaagaagtcgcagtagtcatgattcctga

SEQ ID NO: 13697 - DNA, 1818 bp, Oryza sativa
  Clone ID: TFbOSC413661j.C1.o5.fg
atggcagacatgaagcaagaggaggatgagctagccgtggatcccggtgtcggtgctgtgtgcgatcctgtgacgaagctgcggttcgaagcgatcgtctgcctcctggataggattccgatcacgctgcagcagatcgacatgtttggccaggacgtggcgttccgcacgaagagaattggcaacatagaggcgttgctcgacttcctcaaaggaagcgcggccgcgacatggggagcgcgcgccggcgccggcgagccgatcgatgcgtcgtcgccggagcttcaccgtctggtggaggatgcagagacagcttaccgcgacgtccgcggcctccaacccagaatggtcgtgcaaatgccccgcgtgttccacaaggtgtgtctcccgaagctgcaccagctgctggtcatcgcgcgccgcctcctcgcccagaacgtggcgctccgccgacttctccttcagccagtgggctgtgacgtctctcccatggcgttggccgaggccgctgtaagttcggacgacttcgagcggcacggccgcaacaaggtcgtcatagacgagttcggctacgaggacctgctgcgccgccgccacaccggccacgagtcgcagaacgatgcggacgacgcagagcagcacggccgcgaggtcagagaaggcgagtacgaggacctgatcctgatgcgccaccgcgacaccagccacgagttgttgcaggatgatgcgcgccggcgccgcgcggatgcagaggcagagcagcaaggcggcgacggcgaggtcagagatgagtacgaggactacctgtgtcgccagctcggcgccgtctacagcgggcccgatcaaatctacgagcacgacatgcgaggtccggaaccagcacactcgccaaacacgcccgaccagatctacgtcccctgcgaaaggatgcttccctacccaagcaactgcgacaacgccgaggaccggattcatatggcatgtcttgctctcaagaacctggtaaaagacatggaaggaatctactctcctcgaggaaccttgtggcagtatctggaggacgtcatctctcttgcgcatgctctgtttctggagaacaccaagctccaccggttcactgatcaggcttcgcaccaggacttgccgttgcagccgccgcagggcttcccatttcaacagcagccgcagcacgatggctaccagcagccgggcgtcccgttccagcaaccgcagcaaggtggctactacggccacggccagggcatcatgtttcagcgaggtggctacctccaggatgtcccgttccagcactggcagtggcagcagggtggttacggacaaggcttcatgtttccgcaggctcagcatcaaggtggctacggccaaggtttcctgtccgagcagccgctgcccggtgaccccagcttcatgaacatgcaggctccttacgacggcgacgggggagtcctgttccagaagccgcagcactatcaccatgggcatgttccgagcgagaagggcgctattcaggccaaggggaagcagaagatgcgggaaccaaaaactgtcatgtgcccggactggtgcagaaccggacattgttcctctggtgacgggtgcgaatatgctcacagtcaagacgaactgcgggtaatcgacgcccgccccaagtacagaacagagccgtgccgttactggctagctgggaaagggtgctggtatggggacaaatgccggtacaagcagcaccgattagctcgggagccactgtatgtcgatccattcttgacaggtcatgaattgagaaataagacatag

SEQ ID NO: 13698 - DNA, 903 bp, Oryza sativa
  Clone ID: TFbOSC101298j.C1.o6.fg
atggaagtcggcggccgcaagaggggcaagcccgacggtgcgaacggcgccggcgggaagcgcgcgcgagaatcggagtcatttcaaaccggtgtaggaagcaaatcgaagccatgcaccaaatttttcagtacctctggttgcccctttggtgagggttgccacttcctccaccacttccctggtggctaccaagctgttgcaaagatgaccaatcttggtggtccagctattgcgccgcctccaggaagaatgccaatgggaaatgctgttcctgatgggccaccaacacccactgttaagactcgcctgtgcaacaagtataacactgcagagggatgcaaatggggggataagtgccactttgcgcacggtgagagggagctcggcaagcctatgttgatggatagctcaatgcctcccccaatgggaccaaggcccactggtcactttgcacctccaccaatgcctagccctgccatgtccactccagcaagctttggcgcttcggccacagccaagatcagtgttgatgcatctcttgcaggtggcataatcgggaggggtggggttaacacaaagcagatatccagagtcacaggggccaagctggccatccgtgatcatgaatcagacaccaacttgaaaaacattgagcttgagggcacatttgatcagatcaagaacgctagtgcaatggtgagggagctgattgtcagcatcggtggcggtgcccctccacaaggcaagaaacctgtgggaggatcccaccgcgggggaggccccggaagcaacttcaagaccaagctgtgcgagaacttcaccaaagggtcgtgcacttttggcgacaggtgccattttgcccatggtgaaaatgagcttcggaaatcagctgctgcttga

SEQ ID NO: 13699 - DNA, 1401 bp, Oryza sativa
  Clone ID: TFbOSC419228j.C1.o6.fg
atggagccgtacgcggcggcggaggggggaggaggaggaggaggtggaggcagcaccgacaccgggctcgaagagtcgatgtggaggatggggctgggcggcggcgggggtggcggaggggaggcggtggcggcagggaggctgccggagcggccgggggaggcggactgcgtctactacctccgcacgggggcttgcggctacggggagaactgccgctacaaccacccgcgcgatcgcgccgccgcagcagtgttaaatggaggtgggaagaccacacattcggcagagtatccagaacggccggggcaaccagtttgtgagtactatatgaagaatggaacttgtaagtttggctctaattgcaagtatgatcacccaagggaaggctctgtgcaagcagtcatgttaaattccagtggataccctctacgctcaggtgagaaagattgtacctactatgtcaaaactggccattgcaaatttggatctacatgtaaattccatcacccagaaattggtggagtttcagagacacctaacatgtatccaccagttcagcctcagcctatctcttcctctcatccatatcaacatcttgctggctggcaaatggggaggcctcctgttttgccaggatcatttttatcaggctcatatccaccaatgatgcttccgtccacagtcgtaccaatgcagggatggaacccttacatttcacctgtgaaccaagttgcgtcagctggggggcatcaaactgttcaagcagggccgttttatggcttatcgcaccaagggccttctgctgcagtcacttatggcagtcagtatgcaccgttatcttcttcaaccatgccttcaagtagcagtaaacaagaacctgcctttcctgcgcgacctgggcaacctgaatgccagtattatctgaagacagggagttgtaaatttggatctgcatgcaaatatcatcatcctcagtatttgaatacacctaagtctaactgtatgctgagtcctcttggtcttcctcttcggccgggtagccaaccatgtgcttactatacacagcatggattttgcaaatttggtccgacttgcaagtttgatcacccaatgggtactctaagctatagcccttcagcgtcatcgattactgatttgcctattgctccctatcccctcaattacgctgttgctcctgtggctccaccttcatcttcttctgatttgcggccagaataccttctaaccaaagagttttcagccaaccagtcagcgtcacctggtactacatgcggacctgctggagcaatgttaaaagcgtacgctccacacatgcttatccgacctcaaacttctggagctggtggcatggttacaactcatggtggagagctctaa

SEQ ID NO: 13700 - DNA, 2073 bp, Oryza sativa
  Clone ID: TFbOSC400151j.C1.o17.fg
atggcgagaatcaaagagctttgcaactccttttcctcagctgcattattgtatattggtagttctatctcgatctccatgcgcatgcatgattcgctgcacgcatatggcggggaggggtgggatggtggagtgggaggtggggcggcggcgggattcggaggacgtgatcgtgctgcgccggggccgccggcgaggaggcggccaccgccggtgaaggcggtggagccggagtccggcgggttcgcgtacgagccgccggagaagctgttctacaagacgagggtgtgcgagacgttcgtgaccagcggccggtgcatgttcgaggacggctgcacgttcgcccacggcgacgaggagctccgcccctcgctcaccgcgtgcgccggcggctggaggaagccttcgccgtcgttgtcggcggcggcgcctcccgtggcggtggcgccgacgcctccgccggcgcaggtcgtgcacgagctcctcgccaggggatccggctccggcggcggcggccaccgcgccatcaccaaggtgtgcttcgagttcagggacaagggcatctgctatttcggggagacctgcgccttcccccacgtctccgctgcagagatccgccagggctcaaggctgtcgtcgatgtcgtcgtcgtcgtgggagatgccggcacggaggagcgtggcggtgaccgtgcccaggacgttcgtctccgtgccgccggtggcgccgccgccgccgccgccccactaccgtgtcaacaacagcagcagctacaacgcggcatccatggccgccgcggcgcccgccgccagcgacgccaaccttgtcgcccagcagccgccgccggagcagggaggccggaagatgacccgcctggagatgctcagcctcaagaagatgaccggcatctacggcgactggctcgagggggcgagagagatgcggatctggtgttctttagtgcaggtgaagaggaggagaccggaggaggggaagagggggaggaggatgggatctgggattggagccgtgctggtgcttgttgcagcatggctaacatttgcgccgcctggtgctctggcttcttcgcgcagtataaaactttggatgaatcgcttcgattatcgtgggttgatgcaaccatttggtggcatatgtgagattcctattataaaactgagtccataccaattaaatgattacaatcaagaggcagtggagaaggggcaacatagatgggggaaatggtttgatctgagtattgcacaagaaaagttagtgaactccacaggtggttcaactgcttcaagctcacaccttgtttttgatccttcaaaatcaaagagactctcatggcatccaaggatcttcttgtatgaaggttttctttctgacatggagtgtgaccatttagtatctatgggacgtggtaatatggagtcatctttagcatttactgatggtgatagaaatagttcgtataacaacattgaggatatagttgtttccaagattgaggacaggatatcgctatggagctttcttccaaaagaaaatggagagagcattcaggtcttgaagtatggagtgaacagaagtggcagtatcaaggaggaacctaaatcaagcagtggtgcccataggcttgcgaccattttgatgtatctttctgatgtcaagcaaggtggtgaaactgttttccccagatctgagatgaaggatgctcaagctaaggagggggcaccatctcaatgttctggttatgcagtgcgaccagccaagggcaatgcaatactgctgttcaatttaaggcctgatggagaaacagataaggatagccaatatgaagaatgtcctgtcctcgaaggagagaaatggctagccataaaacatataaatttgagaaaatttgattatccaaaatcatcacttgcatccgaggatgagtgcacagatgaagatgataggtgtgtgagttgggctgctagtggtgagtgtgacaggaatccggtgtttatgataggaagctcagactactatggctcttgccgaaagagctgtcgagtgtgctga

SEQ ID NO: 13701 - DNA, 1437 bp, Oryza sativa
  Clone ID: TFbOSC400481j.C1.o19.fg
atggcggcgggagcaggagcgggcggcgggggcggggagggcgacagcaacgggggaggcacctccccgggtggcgtgtcggcggcggcgccggcgatcgggccccaccacctcggggttgccgccgcggaaggtgggggaggggttatttgctccgttctcttgtatttgaacctttgggggaagagagtgtctggtgtgagagaagcaatgtggcaaatgactttaggaggaggagagtctatggagtccactccataccctgagcggataggagagccagactgcagttattatatgaggactggactatgtaggtttgggatgacctgcaaattcaatcaccccccaaatagaaaactggctgttgctgctgcaaggatgaatggagagtatccttatagagttggtcaacctgagtgtcaatactacttgaaaactggaacgtgcaagtttggtgcaacatgcaagtttcatcaccccagggagaaggctgcacttgcaaaccgtgtacagttaaatgttctaggctacccgatgcgtccgaatgagaaggaatgtgcttactacttaagaacagggcagtgtaaatttgcaagcacatgtaagtttcatcatccacagccctctaatacaatggttgctgtacggaactctatgtattcacctggacagtctgcaacctctcctggtcaacatacttatcctggggccgtaacaaactggaccttgtcaagatctgcatcatttattgcaagccccaggtggcctggccattcaggctatgcacaagtaatcgttccccagggccttgttcaagttccagggtggaatccttatgctgcacaaatgggctcttcgtctccagatgaccagcaacgaacacctgtaaccactcaatactatggctcacgtcagagtgaaacaggtggtatgggagatcatggaatgtatcagtcataccaaggaggctctgttccagtcggtgtttacacagtacaaggggaaaatatatttcctgagagacctgatcaaccagagtgtcaattctacatgaaaactggagactgtaagtttggtgctgtttgcaagtttcatcaccccaaggagcgactggtacctgctccaaactgtgcattgaattcacttggtcttccactacgcccgggagaacctgtctgcacattctattctcgttacgggatctgcaagtttggtcctaattgcaaatttgaccatcctatgggaacccttatgtatggaagtgcaacatcaccaagaggtgatgtgtcatctatgcattatcagttgtcaccctcaccagggcatccaggaatattgcttgatggaggctctggaaggtctcaccgggttcctcagtctgattcccagcaaataccctctggcgatgggaatgccgagagagaggcatcataa

SEQ ID NO: 13702 - DNA, 915 bp, Oryza sativa
  Clone ID: TFbOSC413563j.C1.o4.fg
atggcggagcatttggcttcaatatttgggactgagaaggatagggttaactgccccttttacttcaagattggggcttgccgtcatggggatcgttgctcccgtctgcacaacaggccaactgtgtcgccgacaattgtgcttgctaacatgtatcagcgccctgatatgatcacaccaggagtcgatgctcaaggccaacctattgatcctgaaaagatgcaggagcactttgaggatttctatgaggatatctatgaggagctgagcaagtttggtgaggttgagaccctcaatgtctgtgataaccttgctgaccacatgataggcaatgtgtatgtccagttcagggaggaagaacaggcagtcgctgcgcataatgcccttcaaggtcgcttctactcagggcgcccaataattgttgagtattcccctgtgactgatttccgtgaggcgacctgtaggcagtttgaggagaacagctgcaaccgtgggggctactgtaattttatgcatgtaaagcagattggcagggagctcaggaggaagctttatggggggcgatccaggaggagccatgggagaagccgcagcccaagcccacgccacaggaggggcaatcgtgaccgtgatgatttccgccgtgaacgtgatggttatcgtggtggtggtgatggttaccgtggcggcggcggtggcggtggtggtgacggttaccgcggcggtgatagttaccgtggtggtggtggtggtggacgcaggggtgggggcagcaggtatgacaggtatgatgatggaggaaggcgcaggcatggcagccccccaaggcgtgcaaggagcccagtcagggaaagcagcgaggaacgcagggcgaagattgaacagtggaaccgtgaacgggaggaaaagccttga

SEQ ID NO: 13703 - DNA, 1680 bp, Oryza sativa
  Clone ID: TFbOSC401249j.C1.o75.fg
atgtcaagtgcgtacacagttcatcgctccatctctctcttgtctgttatccagctgaacaattctagtcagtggcgtgcagaaagaatcaaacaacagattaaggtccatttttgtgccaacaggcttgctcacagaaagttgttcgtcgcttctctttcctttgagaaggacatgactggaaacaaaagcttcatggagccaaggttttttggccccaaagtcttgagacaggcaaagcatccgatgaggcatgcagtgcatcatttttttacttttctttttgactacaagtattcagtaatcagagttttacagaacgaaaacgacgtcggccatgtcttccgtgccctcgccaagttcaagtcgctgctcctcgacgtcgtccgcaagaagagggcgccgacgagaggcggcggcggcaagaagtacgccatcggctaccgctcgagaccggagaagagcaagaagaggatcgccagcttcatgaagctgctgcgcttcaactgggccgccgccgccgccgtcacgccggctcgcgccaaggatctcgagctgcactaccacccgtactactacgactacgacgactcgacgtggaacgtggtggttccggccgacggcgcggcggaggagctgcgcggcggcggcggcgacgacggggaggactgcgggtacctgtgctggctggaggaggagacgtcggccggtgcattgccggctgccggagaaggagaagacggcggcaacggcaacggcgacggcgacggcaatggtgcggtgaacgagatcgacaggctcgcggagaggttcatcgcgaggtgccatgccaagttcttgctggagaagcaggagtcgtaccggaggtaccaggagatgatggccaggagcatcactatcggatgcccttttggcgagggttgtcatttctcgcactttgtccctggtgggtatcaagcagtagcaaaaacactcaatctaggcaacccagctgtgcctgcaccggcaagagctcctatggatcatgctgctggtggtaattctcatccagcttcttctggcaagacacgcatgtgcaccaagtataacactgcagaaggctgcaaatttggtgacaagtgccatttcgcccatggtgagagggaacttggcaagccagcttacatgtcccatgagagtgccatggctcctcctatgggtggtcgatatggaggccgacctgaaccacctccaccagccgctatgggtcctccagcaggaaactttggtgcatctgctactgccaagatcagcgttgatgcctcgcttgctggtggcataattgggaagggtggagtcaacacgaagcagatatgccgagtaactggggtcaagctctcaatacgtgaccatgaatcagattcaaacctgaagaacattgagctcgaaggcaatttcgaccagataaagcaggcaagcaacatggtgggtgagctcattgcaacaatcagcccgagcacaccagccaagaaacccgctggttcagcagcaggagcagcaccagcaggccgaggcggccccgggggcaggagcaactacaagaccaagctgtgcgagaacttcgtgaagggaacctgcacgttcggcgaccgatgccacttcgctcatggcgagaacgagcagcggaagggcgctgcttga

SEQ ID NO: 13704 - DNA, 1002 bp, Oryza sativa
  Clone ID: TFbOSC401329j.C1.o67.fg
atgcaggaagcgcttgtctccccggtgcgctcggcattggagctcaagccgttcaacttcggagaccagcggctcgcgtcctcgccgcgctacctccccagcggcgacgacgccctgtaccgctgctcctcccccttcagccccagcttcgggttctcctcgccgtcgccgctagccacctccgtctcgctctcgccgtcctcctccgcctccctcgtcgatgacggcgacgacggaggagcggccgccgacgccacggggcagcggctccagctcgcgcgcctcgcgctgcagtaccaggaggtggccgaccgctacgagctttgcctctcccacctcgccgaggccgccgaagaggcggcggcgctccgtcttgagaacgccgagctccgcgtcaccaacagcgacctcgccctccgtctcgcgctgctcagcgggaagcataccgccgccgtcgccgtcgccgacgagatccgtcggctccgcctcggcgagcagaaggtcgcggccgccaccaaggagcgcacgcccgagaagctcgccgtgctgccgaagagcatctccgtgcggtccacaagctacctcaagctgaaccagcaatcccaggccgccaccgccacttcggcggcccccaaccgcaagccccgcacgtcgtcgaacccaaccaaccccccgaactcgcagcgcgcgtacgacggcggcaagaaaggcgacgagcagaaggcgcaacccgcggacagcggcgcggagctggaggtgtacaaccagggcatgttcaagacggagctgtgcaacaagtgggaggagacgggagactgcccctacggcgaccagtgccagttcgcgcacggcgtcaccgagctccgccccgtcatccgccaccctcgctacaagaccgcggtgtgccgcatggtgctcgccggcgacgtctgcccctacggccaccgttgccacttccgccactcgctcacccccgccgaacgcctcctcctccgatcctag

SEQ ID NO: 13705 - DNA, 1124 bp, Oryza sativa
  Clone ID: TFbOSC401327j.C1.o1.fg
atggagcagccgcacgccgccgccgccgcagctggtggaggggagggggagggcggggctagccccgacaccggcctggaagggccgatgtggaggatggggctgggaggaggaggcgggggaggtggaggtggaggaggaggggatggggacgcggcggggaggctgccggagcggcccggggaggaggactgtgtctactacctccgcaccggcgcgtgcggcttcggtgaccgctgccgctacaaccacccgcgcgatcgcggcggcactgagtttggtggaggtgcaaggaatgcagcagcattggattatccagaaagggcgggtcaacctatatgcgagtattacatgaagactgggacttgcaaatttggtaccaattgcaaatatcaccatcctaagcaagatggagctgtgctacctgttatgttaaacaacagtggattccctatacgcctgggtgagaaggagtgctcctactacatgaaaactgggcaatgtaaatttggaactacatgtaaattccatcatccggaattcggtggtgttccgatgacccctggaatatacccaccattacagtctccatctatagcttcccctcatccatatgcttctcttgcaaattggcaaatggggagaccacctgtagttcctggatcatatataccaggctcatacaccccaatgatgctctcatctggaatgatcccattgcaaggatggagcccttatccggcttcggtaaaccctgtagtgtcaggtggagctcaacaaaatgttcaagctggacctgtgtacggcatggggcaccatggatcttcctctacaattgcttatggtggtccttacgttccatatgcttcctcaactggacaatcaagcaacaatcaacaagaacatggattccctgagcggccagggcagcctgattgtcaatattatatgagaacaggagattgcaaatttggagctacatgtaaatatcatcacccccgagagttgagtgcacctaaatcaggctatatggtcaactccctttgtcttccacttcgtccgggggctcagccttgtgcatactatgcccaaaatgggtattgcagatatggagttgcatgcaa

SEQ ID NO: 13706 - DNA, 5946 bp, Oryza sativa
  Clone ID: TFbOSC33100j.C1.o1.fg
atggcggcgcggcgatgcgggagcaggaggcgtcggcgccgtgcagcggcgactcgtgtcgggctcattagccgattggctgataccccatgcatcaaaagaggactagaatctccttcagcatggaagtccccttggttcgtagatatgcaatttcagggttcatacttcgtcagcccagctgatagaacctacaatgcgctaggatttgtgaagcagataaatgtgcagactgctgctgctttggcagaagcccgtgaggtgctggtaagtggcggacaatctgagaacataaattctgggaaggaaaacctggagagtccaaatgctaagaaggaaccaggagcaacaaccaaattgcaagcaaaaatcaagattggcaaaggcttgctaccacctttgccaatggccgcgacggagcacaagccggccggaaggaagacagcggagaaggtggaagaaaagccatctcctccgccattactcctgcttctgctcggtgtctgtttcctgtggggggaaagcccaaggaagcaagcaagactaaaatcagctattgttgttccggagacgagaaagttaagtgtgtttaatcgattgagtaaaggcgaacctggagctccttcatcaatctggcaagaggtgaaaccgagattttggtggcgccagggcagggcacctcttccggccacggcgtccaggcgcccaaccaccggagtaattccagcctggcgtcccttcaatccagcaactttaggccgttgcttgcgttgcctcgctcaagaccacaaaattgcagactgcagagaccctcccagatgctacatttgcaagcgcagtggccacatatcttctggttgcccttcaaaatacaagaacaaaccctcaatattttcctgtatctactccactcatccagcaccaccctccaagcaagaaatccccaatccccttgccttccctccactgactggccacaaagcaccagtgcgcgaaaggcttggccccaaaatggattacatacctgggttgccggagaaccatcctgcttgtggttatgcggtggttgtcgctgacgctgcaatggagcacgaagctatgcggttgtacaaccatggggccgtcatcaaggcccggctgcccaactacgacgtcagcgccaaggagatggcgcaggcgttgcagcagcaagtgggaactcccaactacgacgtcagaaggtgctcgaagatgtctgcatcgtcgaccaaccccaatctccttcctcgggtgtcggtcttcactcttttcccggccggggtagggcaggtgctggagacgggtggcatgcccacgcccagccaggaggtcgcctcggcacctctgggtcgtgtccgccatctgctcattcatcttgacatggtggaggactggaggccattgccggcgaggtcctcaaactccagcggctccacagactccgatgatccaccgaggcggcgcgtgcaccgctttgactggcatttgggctatgaggacggtgtttcgccgccgccgctgcagcctccgcagccgccactgcctgtacggagacttcacgaggagcgcgggcgaccggaacagcggggcattgacttgcgtaaccggctgtcgcagcgagggagccccaaggcggaaacgacggccggtaccgcagccgcaccccccgtggcggcaatcgccacttcgccggccatcgggtgggtcgctccccagccaggcgcccatccaggccgccttctcgccgccggcgctcttgccggtcgcgctcgccaagcaaggggcgtcgtgcggtctcggagagtcgctgtcttcgcgggtgcgcttcccaaggtggtgggggcgacacgggagggggaggacccgatgtttctcgagctggcggtggcggcagcgttccacgcggagaagtcagcgaacgcatctaccctagaagctggggcgtcggttcctattgggtcagcggctcctcttgggccggtggcgcctattgggccagtttctcctgggccggtggcgcctcttgggccggatgggtcagctgcgtcccctggcttgatagcttctcctgggcttgggcttctcgagctggtgggggagcaaatggaaggcacggcgacccagcccatgcaaggaggagttgagccgttttttgctcctctgccaccgccgcttgtggcaacaccgccagtgcgtcgtcgcgggaggccacgcaagaaagttctgcttcccagtcgtcatagcaagcgtctcgaggcacggccatctccggttctaatctcgatgcgagctcaggttcgcattatgaaagagatgagggtccttaagccgggagaaccggtaggtgatgaggcagtggctgagtacatcaagcgcttccaggaccccttgccgacggtcgtggtgcaagggattcgcgcgcttactgggttggacagcggcaagcctctgccgccggatgtgacagaggaggctgatggtgccacgccggaatggtgcacatctctaggagttacttatggttcaagaatgattgaaggcctcaaaattctgaattggaatgtcagagggttgaacaacccggcaaggagagaggctatctgtgaggttgcgaataatgcagatgcgagcatactttgcatccaggaaactaaattagctaacatagaccagtttttagggcgggaaataggtggttcccgactgaggcgttttgaatttctccctgctgatggtgtaagaggtggtgtagcaattttctgggatgacacaaaggtgcaggtcgacaacacacaaattcataccttttccgtttcaattagggcccaagtgataggaggaaatgtcccttttattctcacctccgtatgtgggccttcggaggatgaacataaatcagacttccttgcagaactagaatcgttagtgccgcagccattgctgccctgggttgttttgggagactttaacttgatttgtgaagcaagtgataaaaataatctgaatttagataggagaaggatggggcaatttaggagcactctaaatagatgttgtctcaaggagttcaagctccaaaataggaaattcacatggagcaatgagcaggaagcgcctactctggaaagaattgacaaagttttttgtaatattgatggtgacatcctgttctccaaccacacactgcaagccctctcctcatcctgttcagaccattgccctttgcttcttgctttcactgtaagcccacccaaaagggtagtcttccgctttgaaaatttctgggtctgggtgccgggattcatggaggtagtgcaacaagcctggtcatctcacacttttggtggacatccatttacaaaactcagccacaaattgacagccaccgctaaagctctcaggaagtggagtagaagtctgtttggagagatcaaaatgcaatttcacgtggctcaggaggtgattctccgattggatttggcccaggaagataggatccttactgctgatgaacaccagctcaggaaagacctcaagctaagaattttggggctggcagcagtggcaaagtcgaagaaaaggcagagatcgcgattgacatggctaaaagaaggggatgccaacacaaagtttttccacattcacgcaaactcgaggagaaggaaaaaccacattcaccaactccatacaacaagtgctatcctgacagaacatgaggaaaaaagtgaggcgcttttcaaccatttcaactcaatcctaggcaacaaggaggcgcgaaattgcaccttaaattggaacgcgatcgatctaccacaggttaaccccgatgaactagatgaaccttttacagaggaggaagtttgggccgctttaaagcaaatgcaagcagaaaaggccccaggtccagatggctttaatggaggaaactttggagtactcaacagagcagcaattaccttgcttccaaagaggaacgcccctaccttggtgaccgattttaggccaatcagcctcattcactccgtcgccaagctgatatccaaagttctagcaataaggcttgccaggcagatggatggcctgatctcggttgcacagagcgccttcatcaaaaaaagatgcattcaagacaacttcctgtatgttcggaacatgctcaggaacctaaatgccagcaaaaagccaacactttttttcaagctagacattgctagagcttttgattcggtctcctgggaatatttacttgaactgatgcaaaacatgggttttggcccccggtggagaaattggatctgtttgctcttttccaccgccacttccaaggtagtcctaaatggagaccagggggaatgcattgcacacagacgtggcttgaggcaaggggaccccatatccccctatctctttatcctggctatcgaccccctacaaaggcttctacatctggcgaccgaaggtgggcaactaaccaacatcggaagtcgccatgctagattgaggacttcgctttatgcagatgatgcagctgtttttctcaaccctgtacaaagcgaggtggatgttcttattaccatgcttagggactttggcaaggcaacagggctgcacgtcaatcttggaaaaagtctggtggcaccaattcgatgccaggaagtagatctggacgacgtcttgtgtagtttttcgggggcaagagccagcttcccactgacttacctagggctaccactcactcctggccgcctacgtaaggtgcatttccagcctctccaggataagatcaaaggtcggctctcgggatggaagccatcattgttgtacatgggggggcgccgaattatggtgaactcagttctaagtgccatcccaacttacaccctcacggtgctgaaaccgccgaaacaatctcttcaagaaattgacaaagcaagaaggcggttcctgtgggcaggtaacgagaatatgcatggcggaaaatgcaaggtcaattggcttaaagtttgctcacctgtccggacgccagagaagccttggatagggactgaaacaccctgtgatgaattggataaggatcttttcgcggcatcaacgagagtccagattggtgacggacaaaaggcgagcttttgggaatcaaattggattggtggccaaagactaaaaagtcaagcaccgaatctttataggcattcgaagaggaaaacccgcaccgtccaagacgccctgcaacaaggaagatggattaacgacatcctccacagcctcaccattccccttcttgatgaattcttccatgtttgggaaattttagcccgtaacaccccacaactaacagagggggtacaagactcgattgtttggcaatggacaactaatggggaatatagtgcaaaatccgcgtaccaattccaattcaatggaatggtactcttgccatcaacaaagttgtcttgggaggcatgggctccggtaaagtgcaaaatcttcagttggttggttcttcaaaaccgggtgtggacagctgaccggttacagatcaggggatggccaaataattatttctaccagctatgctttcgaaacctcgaaacaatcgaccatcttctgtttgaatgcctggtctcaaagcaaatttggtttgggattctcacatggctgcaccaagggcacatcatcccaaaatggaacacaagtagaaacctcttagattggtggacacaaggaacaagcgacctggaagcaacaaaacagaaaggactcagaactctcttcttgctcattgcttgggaaatctggaaggaacgaaatgcaagaatctttagagcaaaggaggcgacagtacaccagatgattagtcgtatccaagaggaattaggttggtggagtatggccggcgctaaacacattgggagaatgttgccatga

SEQ ID NO: 13707 - DNA, 1389 bp, Oryza sativa
  Clone ID: TFbOSC900317j.C1.o10.fg
atggcacctcaaccaacctgtcagacttgtgtccgcaactaccttggttctaaggaagacccagctttgtcagaaaatccaaatcaactagctgaacaagtcaccaaccaagttgccaagactgataatactgttcctggaccaaacaaggaagttgcaaccagaaatcaacactcctcaatggatatttatcagattctagccaatcagactcagatgctacaagaaatagctcaaaatttggcttctatacaacaacaactgctactaccacagcccaaggtgaatccagacaagagtaagaatgaggccgcagaaatacaaggaacacaatcagtagaaggcactgatacccataaagagaagaacaaagaattcttaaatgtgatgattacagggatgaaaaccccacttcgagctaataattgccccaaccttcagaactcaatcaataaatccgtatcgcgagaaaatagcatgattaaagaaggaagttgtcacaaaagaaagaccttgccatcagaagttgacatgcaagatgtcccacaatgtcagacaatgcaatcttgccaaaacttacccaagtcccccaccctcaaatcaaagaagatcagacacgttcccggattcatatgcttcatttgccacaaaattggccattacatgagacactgcccccaaaaaccctatatggatgcaccactacaagctaatatgagcacctcaaggatgcccttctatccccaaggaagcccaaattcgccaaatgttaatgcagtacgttcaaccttccctgatgacaaaagagcaaaagcatcctgcgacatgtgccaagacatccaagaaaagaaagagatgcaagaatacaagagacgcaaagtaatgtccctagagattcaagcaaaagaagatttgtgtcgaaaaacaaactcgccagcacaatactatcagaaagcatctcagcattcaactagttccggttctacgtctcgttcgactatgtcagaacctggtcagcaagccacaatgatcaacagtaatagccatgaaggaagcaactccgtaccatgccctacaccttcaaaaagacgtggttataaggcaggagtcgaatgtttcatctgccatgagatgggacactattcatggtgctgccctcagaaagtcaagtcaaaacgagtccaaccaacaacaagccttcccaacgtatctggaccaaaaagttcaaagtcaccaaacagtggttctgcctcgttgacctcaccgcccgttggacaaggtcgtctgaaccatgtgcaagtagaaacaaacggaaaagttgggaatctcgagcaagttgaaggagcaggagaagaacaggttccacaggcaagagcagagccacagtaa

SEQ ID NO: 13708 - DNA, 835 bp, Oryza sativa
  Clone ID: TFbOSC28031j.C1.o1.np
ttctatagaagatcctacacatattattacatggatggaatttactacaacttttagagatgcttttatacctacagctgtgatcaggatgaaaaagaatgaatttcgtagattgaggcaaggttttatgacagtacaagaatatttgattaaatttacacaacttgctcgatatgccgcctcggacattcaagatgaaaaagaaaagattgaaagatttatagaaggactacgtgatgaacttcgaggaccaatgattagtcaagatcatgaaaattttcaaagcctagtcaataaagtggttaggctagaaaatgatcgtagaatggtggaaggactccctaagagaagaatgaatttacaatgacaatcactaactagaggttcactacaagttcggaggccttatccatttaaggcatctctacccaatgcaaggccaggcatgccaccaatactaccaagacctggattaaaaatggaagactctccttgttatgtttgtgggaaaattggacattttgcaagactatgccctaatcgtcaaaatatgggaggccaaacttcttatcagaaaccatctactacaggttttataaagaaaaatcctccaataattaagagtggacataatcttggacgtggtcaagtacatcatattaaagcagaagaagctcaacaagatcctaatatattgatgggtatgttcaccataaactctaaaccagttactattctatttgattctggtgcctctcattcctttctatctgccaaagccaattggaatcagtctttaccttaaagataatttagataaggctgtgctaataca

SEQ ID NO: 13709 - DNA, 2022 bp, Oryza sativa
  Clone ID: TFbOSC28041j.C1.o3.fg
atgccaccaatactaccaagacctggattaaaaatggaagactctccttgttatgtttgtgggaaaattggacattttgcaagactatgccctaatcgtcaaaatatgggaggccaaacttcttatcagaaaccatctactacaggttttataaagaaaaatcctccaataattaagagtggacataatcttggacgtggtcaagtacatcatattaaagcagaagaagctcaacaagatcctaatatattgatggatatcattttgggcatggattggttagccaagaataatggactgatcaattgtgcaacaagagaggttatccttactgatgaacaaggaatgaatacaaggataatagttaaatccaatctatctatggaacaacatatgacagacatttgtatgcttaaaccaaaagaagaagttccagtggtgcaagaatatttcgatgtatttcctgaagaactaagttcattacctccagatcgggaaatagaatttattatagaattacttcctggaatggcacctatatcaaaaagaccctataggatgccaattaatgaattggaagaattgaagaaacagatagctaagctgcaagaaaaaggctttattcgaccaagttcttcagcttggggagctcttgtattattcgtaaagaagaaagatggaagtttaagaatgtgtgtagactaccgggctttaaatgaagtagctattaaaaacaaatatcccttaccaagaatcgatgatctatttgatcaattaaaaggagcaagtgtattttctaaaatagatcttcgatcagcatatcatcagttgaaaattaggcaagaagcatttggattaaccaatgcccctgcctatttcatgaatcttatgaacaagatatttatggaatatctggatcaatttgtggttgtatttattgatgacattctgatatattccaaaaataaggaagaacataaacaacacctacgaatgatggatcttaatcttcggcaaagaagatggttagaattaattaaggactacaatttggaaattctataccatccaggaaaagccaacgtagttgctgatgccttaagccgaaaagctaattgcaatctacaacaagaaataatatcagaacaattgcaagcagaaatgcttaaactaaatctgggtattattaagtttgaagaattaaacactttggagttaaaacctaccctaatggatcaaataaaagaacatcagaaggaacattctgaaatacaaacttttaaggaacgaaaggtacaaggaaaggctgcagatattaccgaagacctggaaggaatattttggtacggagatagaattgtcgtaccacaatcaggaaacttgaggaaggtaatactaaaggaagcacatgattcagcctactctttacacccaggtagtacaaaaatgtaccatgatttgaaagacttatactggtggccaaatatgaaacgacatattgcagaatatgttgcactatgtcatgtttgtcaacaagttaaagcagaacaccaaaagcctacaggattattacaacccttacaaatacctgaatggaaatgggatgaaataggaatggattttattactggattacctaaaacttctactggatatgactctatatgggtaatcattgatagacttacaaagactgctcgattcattcctgtgaaaacaacttatactggagcacaagttgctgaactctatatgacaaggataaaattacattatgaattaggaagttatctggatttcagtacagcatttcatccgcaaatcggaggacagacggaaagactaaatcatacattagaagatatgttaacagcctgtggtctagattttgctgctagttgggacaaatgtctaccttatgcagaattttcatataacaataattatcaagccagtttaaaaatgtcaccacatgaagccttatatggaagaaaatgccgaacaccattgatatggacataa

SEQ ID NO: 13710 - DNA, 1179 bp, Oryza sativa
  Clone ID: TFbOSC32878j.C1.o1.fg
atggatgaagtcgggcgtcgatggacattctccagggcaaatgaaggctacacgagctgcggcccgatgtttaacagagaaaaaggaaagaatgtcagcgggtatgccccaagtaactcaagttttcaactcaatccaccactggcctcaagagagttaacaagggcacacccttggtccattccaagcacgctgcttagttcacagctaccattggttggaagtcaagaccaaaatcagtatgtgtttgatcgagcatttgccacccaggtcaatgagcttccaatgccaggagaggatgtccccttttgtcatgattgtagagagcaaggacactatgccctgaattgtccatgggtatatgccaaagaagccccttcctttggtttaacagggcaggcatcgctaaaccagcctcctcacaccaagtcaagcttgcagcctagtgtgcaaagtagagagctcaacggagagaacccattgaatcccgggaaatgctttccccctagcctctcgtaccacgtggggtcgcatactaagcaagccaaaggcaagaagagtaagaatcagaagagaaaagcaccgatgcgaactgaagaagaagtacgtaagatgactattaccagcaccgaatggcctccagcagggataactattcctagacgtcagaaaggaaatactttccgaggtgcacgacagttgacccagcaccttctaagccatggtggcagagtatctgatagtgaagggtcagatcaagtctcctcggatgatgaagatgagtctccccgacatctcggcgaggaagagatggaatcaaaggcatgcacccgttgtggagaaattggacacattgctagcatgtgtctcacactctgcgcttattgcgaagaagaccatccaccaggggagtgtcccacccgcaaggtcatatgttttctgtgcgaaggtacaaaccatgtgcccaaggattgccaactcagtgtgttgttgaccaagaccgcagaaatccaacgaacaactctacgattgtctcatcagctagtcagctccaacagcaacatcgacgatatcatccacaacaccaatgctcctcttgctgcacctgattctgcagtaaatcatagcgataataccttcagcaccaaccattctcggcaccgacagcctcagcaatga

SEQ ID NO: 13711 - DNA, 4848 bp, Oryza sativa
  Clone ID: TFbOSC400152j.C1.o9.fg
atgccctacgtcacgtcggaggcgcaggcccgcgccctcctgcaggtcggcgggtggcccgtcggaactctggtccatgtcgtcatcgtcgacgccgcctgccgtgcccgccgtctcgaccacacgctgcgggcgatggtggcgcgcagggggtgggtcgtggtcaaccgccacgccgtgcttcgagtcatccgcgtcagcgacctggtccacaacatcctcgacatcaccctcccccgcctcctcgacgacgcctacgacgccacgcagctcactcacttccggaggcaggcggcggctcttcgtacgatggcgggtgtgatcggagggaacttccgcaaccgcgcctacgtcgtcgtccgcaagattcgcttcgtcgccagcagcgcccgcaaccactccatggcggcggcgaggctccagcagcgtctgctcgacatcaggcgtcgcctcagtggtctcgtcgaagcacctgatatgaacttacaaaggctttgtgcagactgctcctatctaataaatcagattgctggtgaattgttggctcttcttgctgatgctgcttttgaaacagttagtatcccctttcgtttcatatttgccaaggttattggtgattgttccttggttgccaagcaaagagcgtttattattcatgctgcatgtgcgctagataaagctatgatggtgcggttatgtgaaaagagcggcaacttttattgcacagaacttggtcgaattgcaaaccacttttaccttcagtactccagtgtggagacttacaatgagatgctttggcatcacatgaatgagagtaagataaggaggccgcgagtccgatccgagttcctcgcttctttcccggtgttagtttctccttctccgcgcctgagttgctctcgcttctccgcttctgatctcttgcgcgcacgagagattggaagaagcagtgcctccgaaaccacaccttcgcctgagatgggtgatcaggtttttgggggagtgcctcctgcacgactgctcatcgccatgtctggagttgctgccgccgctattggcggaggtggtgcgccgccgccgacaggagctggtgcgccaggaggaggtgccgtgaacgactacaacaacggaggcaattctgcctcaccatccagcggagggccattctcggggtataatcttctccttctactgctgttagcgttactcctgttcccattgttagcgctatactgtgtgcgctatgttcttgttcctgttctacatgatgcctttagcatgttatcgcattattggtatgttcctgattctgacattcatgatgcgcttagtatgctactggttatgttaagatcaccctacactgcttatgccatgatcatagtttcaatttcttggattaaaatatgccgaataatgactatatttccaacaatccaaaaacctgataggtcattttcggtagttggctttgctgctgcactgaaaccacatgcttttgatggttcaaactataagagatggaaagcacgtgcactattgtggttgacagcgatgcagtgcttctatgtttcacggggcaaacgaagtgaaccacctctttctcctgaggaagaggctaagttcgaggcttcggattgcctgttccgtggagcattgatcagtgtactcgctgacaacatagtggacgtgtacatgcacatgccttctgggaaggacatgtgggatgcactcgaggccaagttcggattctatgactacaagatggtcgatgaccgttctgtagtagaacaagctcatgagattcagatgctggctaaggaacttgagaacaacaactgtgagttgccggacaagtttgtggcgggtggcattattgccaaactaccaccttcttggtcggactttgccacttctctaaagcacaagagacaagagttcagtgttcctgatctcattggctctttgggtgttgaggagaaggcgagggcaaaggacatccggggcaaaaaggttgagggaggttctagtgccaatatggtacagaagaagaaccctcatgcatcccacaacaacaagaaagtcaagcctgatgtcaaacccaaggctgcaaccaattttaagaagaaaggcaagggaaaggcaaaaggagactgctttgtgtgtggcaagtctgggcattgggccaaggactgtcttgagcgcaaagacaggaagtctgccaacatgatcattagcgagggcggaggaacatcggggtacggtcgggagaggttcctccttgttgatgggaaacgggtcgcttgcggttgttcatggtgttgttccaagtgccatacttgtgttcaatcgaaacaacctcgcaagcctcacaaggcatctgaggcgaggaatttggcacctctagaacttgttcattccgatttgtgcgaaatgaacggcgtgttgactaaagggggaaagaaatatttcatgacactgatagatgattgcactagattttgctatgtgtatctattgaaaacaaaggatgaggcattgcattactttaaaatctataaagctgaggtagaaaaccaacttgaaaggaaaatcaaacggttgaggtctgatagaggtggggagtatttttccaatgagtttgcatctttttgcgaagagtttggaattattcatgagatgacgcctccctattcaccccaatcaaatggggtggccgaaagaaagaaccgtactctaactgagatggtgaatgccatgttagacactgcggggctttcgaaggaatggtggggtgaggcagttttgactgcgtgtcatgtcctgaataaaattccaatgaagcataaggaagtaacaccattcgaggaatgggaaaggaagaaattaaatctctcatacctacgaacatggggctgtttggccaaggtaaatgtacctatagtcaaaaagcggaaacttggaccaaaaactgttgattgcgtgtttcttggttatgctatccatagtgtgggttatagattcttaatagtaaactctggagtacccgacatgcatgctggtacaatttttgagtccagagatgctacattctttgagaatgaattttctatgaaatatacacctagcacttctagtaaagaaactgtcatgccccatgagcactttgcaccgatagaacacaatgatgaaacgcctgaggaaaatcctgaggaggacaacattgtagatactcgcaagagtaagagacaaagggttgcaaaatcctttggagatgactacattgtatacctcgtggatgacaccccaagaaccatagaagaggcgtattcatctcctgacgctgactactggaaggaagcagtacgcagtgaaatggactcgattatgtctaatggtacttgggaagtcgttgagcgtccatatgggtgcaagcccgtaggatgcaaatgggttttcaagaaaaagcttaggcctgatggtacaatcgaaaagtacaaggcaaggcttgtggccaagggttatacccaaaaggaaggcgaggatttcttcgacacatattcaccagttgctcgcttgactacgattcgagtactacttgctctggcagcctctcatggtcttctcgtccatcagatggacgttaagacagctttcctaaacggagagctggaggaggagatctatatggatcaaccagacgggtatgtactagaaggtcaggaggaaatggtgtgtaaactattgaaatccttgtatggcctcaagcaagcacctaagcaatggcatgagaagtttgacatcacgcttacatctgcaggctttgttgtgaacgaagctgacaaatgtgtatactatcgctatggtgggggagaaggggtgatcttgtgcttgtatgtcgatgacatactgatctttgggaccagccttaatgtgattgaggaggtcaaagactatctgtctaagaattttgaaatgaaggatttgggagaggctgatgttattcttaacatcaaactacaaagaggagatgagggtgggattacacttgtgcaatcccactatgtggacaaggttttgagtcgctttggatatagtgactgtaagccagctcctactccttatgatcccagcgtgctattaaggaaaaaccgaagaatagcaagggatcaactgagatactctcaaatcattggttcattgatgtacttggctagcgcaacgaggcctgacatctcatttgctgtaagcaagctgagccggtttgtctcaaatccgggagatgatcattggcaggctctggaaagagtaatgcgctatctaaagggcactatgagctatggaattcactataccgggtatccaaaagtactagaaggatatagtgactcaaactggatatctgatgctgatgagataaaagccacaagtggatatgcgttcacacttggaggtggcgctgtttcctggaagtcttgcaagcagaccatcttaacgaggtcaacaatggaagcagaacttacagcactagatactgcgacagttgaggctgagtggcttcgtgaactcctgatggatttgccggtggttgaaaaaccagtgccagcaatcctaatgaactgcgataatcaaacagtgattattaaagtgaacagttcaaaggacaacatgaagtcatctagacacatcaagagaagactgaaatctgtcagaaagcagaaaaactccggagtgatagcattggactatgtccaaacggctagaaatctggcagatcagtttaccaaggggctaccacgtaatgtgatagacagtgcatcgagggaaatgggcttgatacccacctaa

SEQ ID NO: 13712 - DNA, 5246 bp, Oryza sativa
  Clone ID: TFbOSC401418j.C1.o2.np
atgtcggacttagggggaaagaacggggaaaatggaaatgaagatggagcgagcagcaaggaaactccatcacccaagggagctactataccttttgattacagcaaacttaccattccccctcacaactttgtctccgtgccttctgggcgtgctcctcaatttgatgggacacattacgccgcttggaagcacaagatgaagttgcatctaatctctttgcatccaagtatttggaaagttgttttgtataggtgttgatgtacctaatgatgacatggagctcacttcggagcaagagcaactcatccaccgcaatgctcaagcttccaatgcaattctctccgccttgagtctggaggagttcaacaaggttgatgggcttgaggaggccaaggagatatgggatactttgcaattggctcaagagggatcacctaccgttcgtgaggccaagattgaattattggaaggaaggcttggaagatttgtgatggatgacaaggagacaccacaagagatgtatgataggatgatgattcttgtcaacaagatcaaaggacttgggagtggggacatgacaaatcactttgttgtcaagagacttctccgtgcttttggtccaagaaatcccactcttgtatcaatgatacgggaaagaaaagacttcaataggctcaccccaagcgatattcttggaagaattgtgtctcatgagatgcaagaagaggaagctcgtgaagtgaggcaaatggtgaagaatgctgccatgatcaaaaatcaagaagttgctttgaaggcaaaacaagaagaaatggcttttattgtcaagagattcaagcactttcttcgcaagagtggctatggcaaacggaggaaggatgatgacaagggaaagcggcaatcaaagagagcttgcttcaattgtggtgaatatggccacttcattgccgattgttctaagtcaaatgaagctaaggctaagggaggcaagaagaagccggagcgtgctcatgtggcagaggcacacatggcggaggtgtggtactccggagatgaggaagatcccgaggtcaagcccaagcccaagctaaaagacaaggttgaaggagaaggtggtgttgctaccgttgccttcaagtcatcttcttcaagcaaggagcgtctcttcaacaatttgagtgatgacgacgacgactcctaccactactcttgtttcatggcccaaggccgcaaggtgatgactcaaaagccctctcacacctctcttgatgttgattctagtgatgaggaaagtgataatgaattagatgatgtgcttaagagctttagcaaacccgctatgcaacatttggctaagttaatgagagctttggatagtaaagtacaatctctcgaaaggcaagaagaattacttattcttgagaagaaaagaaaccttgccttagaggagagcctagctaaagaatgtgctaaaaatgaacaactagctaatgagcttaatttggctaatggttctctagctagccttagggatgtcaatgaaactcttcaagagaagtttgctagtttagacaaaagtcataaagatcttgaagttcaatttgacactctttggaatagcacttctcaaccaaatgtggtttctaattcttccaacccatctactagcaatggttgtgctaggtgttacaatattgatttgaactctcatgctactaatgttgatgctatgcaagctcttaagaaagagaatgaaaggttgggcacattggtgaaatatggatgcatgaagacataccattcaaaagatgccctttacaagaccatcaccgctcatcctaacaaggatggacacgggctcgggttttctagtggaagtcctgtgtctaagcgtgtgatggtaaatgggaaagaatgcttgatgtttgtaagagaaggaaatgctccacaagcaagtgagatgacttgtcccctcactggtcagacacccggaacttccgggcaaaatgaccggaagttcctgtcctgtaagacaggaagttccggacattttgtcaggaagttctgggcttctgataggccaaaggggctggccggaagttccggttataatgccagaaagttccggccagagggtctttactatgattcatatgcatactcctctggtggctcaagttgggttgtggacagtggctgcaccaatcatatgacgggagagatgagtatgtttataagtcttgatgaggagggtggaagtcgtgaaaatattgtctttggagatgatggtaaaggaaaggtaatgggtctcgcctatataagcattggaggtaacaagtatggtttcgtcattgttgatgatttttcacgcttcacttgggtgtactttctccatgacaaaagcgaagctcaagatgttttcaagcgcttcgcaaagcaagcccaaaacctctatgatctcactatcaagagggtgcgaagcgacaatggaggagaattcaagaacactcaagtggaggaatttcttgatgaagaaggaatcaagcacgagttctccgccccctatgatcctccccaaaacggcattgttgagaggaagaaccgaaccctcattgaagccgcaagggcaatgcttgatgagtacaagacttcggatgtattttgggcggaggccgtgagtaccgcatgtcatgccatcaatcgcttgtacctacacaagatcctaaagaaaacctcatatgagctcttgagtggtaagaagcctaatgtttcatattttcgtgtctttgggagcaaatgttttattttaagtaagaggcctcgctcatctaagttctcacctgaggtggatgagggattcttacttggctatgaatcaaatgcacatgcctatcgtgtctttaacaaaacctccggtattgttgaagtcactagggatgtgacatttgatgaatctaatggctcccaaggagagcaagttgttgtacatgttgtaggggatgtggatccaagtcaagctataggtactaaggctattggagacatacgaccagtcgagacgcaggatgaccaagaagatagggatcaacctccgtcatcgacatccaatagccctacaagtgctgtgtctgctgagccggaagttccgggtcctattgatcggaacctccggacatctccaggcccggaagttccgggttctacagtccggaacctccagaccagtggtagtgaagacgtgtcaacagcacaagtggatgggatcgatgttgagggcactttagagcattctgatcaggctcaggtcccccccagtgcaccatctaaggatacatcacactgtccaaagagatcatcccgtcgacaacatacttggtgacataagaaaaggggtaactactcgctctcgtgtcgcaagtttttgtcaacacttctcgtttgtctcttctttggaaccaaccagggtggaagatgcgcttggtgatccggattgggtgatggctatacaagaggaattgaataacttcgctcgcaatcaagtgtggactttggtggagagacccaagcaaaatgccatcggcaccaagtggatctttcgcaacaagcaagatgaacatggggtggttgtaaggaacaaagcctggttagttgcgcaagggttcatccaagtcgagggtctcgattttggtgaaaccttcgcacctatcactcgccttgagtcaattagaattcttttagcctatgccgctcaccatgatttcaggttattccaaatggatgtcaagagtgcctttctcaatggacctatctcggagttagtctatgtggagcaaccaccggggttaaaggatccaaagttgccaaaccatgtgtacaagctccacaaggcgctctacgggctcaaacaagcccctaaagcttggtatgaatgtctccgagattttcttttgaaaaatagttttgaaattggaaaggcggatactactctcttcactaaaaaatttaagagtgatttattcatttgccaaatttatgtcgatgtcataatatttggttctactaatgtctctttttgtgaagaattagtagtatcatgactaaaaggttcgagatgtctatgatgggcgagttgaccttcttcctcgggctacaagtgaagcaagcacaagagggcaccttcatctctcaaaccaagtacgtgaaagacatactcaagaagtttgggatggagggtgccaaacctatcaagacgcccatgcctactaatggccacctagacctcgacgataatggtaaatgtgtggaccaaaagggttgtgactttaagcttttgggctattccgattcggattatgccgggtgtaaggttgatagaaaaagcacaaccgggacttgccaatttcttgggcggtcccttgtttcttggtcctccaagaagcaaaattccattgcattatccaccgctgaagccgaatatgtcgccgccggttcttgttgtgcccaactcctttggatgaaacaaactctaaaagactttggctacaacttcaccaagatcccactcctatgtgacaatgagagtgccatcaaaatagccattaatcccgttcaacactctcgaaccaaacacatagacattcgccaccacttcttgagggatcatgagactaaaggagacatatgccttacccataagagacagaagctttctcaagatgttcctggtgactcgagccccccggttcgtggtcctagggggagattgggcaaagaaaaagttggagatttttacaatgggagtcagattctgatccattccaggagggctggtagcattgtcattcgtgatgcaccccgctctccctctccagctgcatctgagtcagatgatggtggcaatgaggatgagcctggttctgaaagcaatcctttgaggctgtacaagacaagggctgttgatcctgatcctaaacgcccaagagtgaactatctgaaaaatctactcaagtgtggaaaggacatgatcatgggaagatctcatccagtggtagagatgaagtggctagattggcagtacatgtcctcaaagaacaacatagtcttcaatgaggtacgcaaggtgtgtgagcgcaagcacgtggcagatttgttggccttgcagtattcctagaatgaggaagtgattggatagttctactccactgctttctttggcaccaccaagaaaaggcttgatttctgat

SEQ ID NO: 13713 - DNA, 2568 bp, Oryza sativa
  Clone ID: TFbOSC417975j.C1.o4.fg
atggaggcgctcgtcggcaagtatactccgtgccttgccaaaggtcggcaagctgttggaatccatctagcttttggagatgcttttatacctacagctgtaatcaggatgaaaaagaatgaatttcgaagattgaggcaaggttttatgacagtacaagaatatttgaataaatttacacaacttgctcgatatgctgcctcggacattcaagatgaaaaagaaaagattgaaagatttattgaaggattacgtgatgaacttcgaggcccaatgattagtcaagatcataaaaattttcaaagcctagtcaataaagtggttaggctagaaaatgatcgtagaatggtggaaggactccgtaagagaagaatgaatttacaacgacaatcgccaactagaagttcactacaagttcggaggccttatccatttaaaccatttctacccaatgcaaggccaggcatgccaccaatactaccaagacctggattaaaaatggaagactccccatgttatgtttgtgggaaaattggacatttcgcaagactctgtcctaatcgtcaaaatatgggtggccaaacttcttatcagaaaccatctactacaggttttataaagaaaaatcctccaattattaagagtggacctaatcttggacgtggtcaagtacatcatattaaagcagaagaagctcaacaagatcctaatatattaatgggtgcctctcattcctttttatctgcaaaagccagttggaatcagtctttacctaaagataatttagataaggctatgctaatacactcacctggaggaaccatattagtatcatctatttgtagaaatgtaccaattaaattaggagatcaaatatttttaattgacttgatggtactacctacccaaactatcgatattactttgggcatggattggttagccaagaataatggactaatcaactgtgcaacaagagaggttatccttactgatgaacaaggaataaatacaaggataatagttaaacccaatctatccatggaacattatatgacagacatctgtatgcttataccaaaagaagaagttccagtagtgcaggaatatttggatatatttcctgaagaactaagttcattacctccagatcaggaaatagaatttattatagagttacttcctggaacggcacctatatcaaaaagaccctataggatgccaattaatgaattggaagaattgaggaaacagatagctgagctacaagaaaaaggagcaagtatattttctaaaatagatcttcgatcaggatatcatcagttgaaaattagacaagaggacataccaaagactgcttttgtgacaaggtatggattatatgagtttacagtaatggcatttggattaaccaacgcccctgcttacttcatgaatcttatgaacaagatatttatggattatctagatcaatttgtggttgtatttattgatgacattctgatatactccaagaatgaggaagaacataaacaacacctacgattggtattggagaaattaaggcaacatcagttatatgccaaattcagtaaatgtgaattttggctagatcaagttgcatttctaggacatataataactaaggaaggagttgtcgtggatccagaaaagattaaagtggtaatggaatggagaacacaaacctcagtacctgagataagaagtttcttaggacttgctggatattatcggagatttattaaagatttctccgctattgcaaaacctatgaccagattacttaaaaaggacagaaaatttgaatggacaccagaatgtcagagtagttttcaaagattaaaacataagcttactactacgccggtattaatcttgccagacatccaaaaagattttgagatctattgcgatgcctctcgacaaggattaggatgtgttcttatgcaagaaggtaaagtagtagcttatgcgtcaagacaactaagaccccatgaagataattacccaactcatgatttggagttagcagcagtcgtacatgcgttgaagatttggcgacactacttaattgggaatcattgcaagatctataccgatcataagagtttgaaatatatttttacccagacggatcttaatcttcggcaaaggagatggttagaattaattaaggactacaatttggaaattctataccatccaggaaaagctaacgtagttgctgatgccttaagccgaaaagcttattgcaatctacaacaagaaataatattagaacaattgcaagcaaaaatgcttaaactaaatttgggtattattaagtttggagaattaaacactttggagttaaaacctaccttgatggatcaaataaaagaacatcagaaagaagattctaaaatacaaacttttaaggaacggaaggtgcaaggaaaggctgcatatattaccgaagacatggaagaaatattatggtacggaaatttgaatcatcgtaccacaatcaggaaacttaaggaagataatactaaaggaagcacatga

SEQ ID NO: 13714 - DNA, 2814 bp, Oryza sativa
  Clone ID: TFbOSC101063j.C1.o15.gm
atgtcgggccaagcaggggatgggatcgatggtgataagggagctaagatcccttatgactatccccctacatctacatcttataatcccgaagatcccaccaaggaggacgacgagaacgagcacaagaacgctcaagccgctaatgcaatacttagcgccttgagtggaagtgagttcaaccgtgtggatggcattgagagtgccaaagtgatttgggacacgcttcggaacttgcatgaaggcacggatagtgttcgtgagtccaaggtggagatcctcaaggggcaatttgagagatttgtgatgttggatggtgagagcccaagcgacatgtacgaccagttgagcaagatcgtcaatgagatcaagggacttggctccaaggacatgaccaatgatgttgtggtcaagatgatggttcgagcaatcactccaaggaactctaccttggtgatcatcattcgtgagcgtccggactacaagactctcacacctcgtgattttctcggacgcatccttgcccatgacatgctcgtgcaagagtccaaggatgtcatccaatacatcaaccaaagctcaaccgcaagcatcaagaaggaagacttggctttgaaggcaaaggaagaagaagaagagaaccgcaagagcaagagcaaggcggagatcgatgatgaagagatggctctcttcgtcaagaagttcggcaagttcatgagacgaagcggcttcttcaagggaggttcttccaagcactactccaacaagtcaagtggaagacactccgcaagagtgtgctacgtgtgcaaagagcccgggcacttcattgcggattgcccccacctcaaggatggttcccacatcaaggaagataagaagaagggtgagaagaaggatgagaagaaggagaagcacaagcataggaagcgggaacattatggccaagctcaccttgtgatgatcttcggctccgactccgagtcaagctcaagtgatgaagaaggagtcgtcgcgttcgccgtcaagccttcatcaccaccaagactcttcgacaactcaagtgatgaggatgctcccatttgcctcatggcaaaggagcctaaggtaccttctcctctcaagtcatttaatgttgatcttgttagtgatgaggaggatgaggccaaaagtatccttactaatgattatgcttcacatggttcttttgatgcatcttatgttcttaggaagaatgctagtggttatgttgttgctaagtatgtaggcctaaggggcaagaatatttctatcaagagagaatatgtctccggtggaagaagttgggtgattgatagtggatgccccaatcacatgaccagagaagaatcaatgttttcaactcttgatccaaatggcacttcacaagataacatagtcttcggggacgatgaaaagggaaaggttatgggattgggtaagattgcaatctctgatctttccatggccaacgttctctttgggtgttctcaagggagagctttaccttgtggatttttcctcaacgcgtgtcaagccggcaaacaaattggagcacatcaccccgtcaagaatgtgatgaccactacaagaccattagagcttctccacatggacctcttcgggccaattgcttatctaagcattggaggtaacaaatatggtcttgttattgttgatgacttttcacgcttcaccgacaacggcaaggagttcaagaacacgtgcatcgagagtttccatgatgaagaaggcatcaagcacgagttctcggctccatattcacctcaacaaaatggagtagcggagaggaagaataggactctcattgagatggcgaagatcatgttggatgagtacaagacatcggaccgtttttgggccgaagccgtcaacaccgcatgccacgccatcaaccgcctttatcttcaccgccttcttaagaagactccctatgagcttcttaccgtgaatgagggattcttgcttgggtatgggtcaaatgaatgcacataccgcgttttcaacaaaacctccagtattgttgagatcgcgcgtgatggagccacaacaaggagcctcttcctcaacacaagtagaaccacctacatcaacccaagccgacgatccctctacctcaagcttgaatcaagggtggaagaagctcttaatgatccggattgggtaatggcgatgcaagaggagttgaacaatttcacctggaatgaagtgtggactttggtggagcgacctcggcaaaatgtgattggcacaaagtggatcttccgcaacaagcaagacgaggccggggtcgtaataaggaacaaggtgaggcctatcaacgagttggtatatgtggagcaatcaccgggcttcgaggatccaaaatatcccaaccacgtgtccaagctccataaggcactctacgggcttaagcaagcccctagagcttgtagaatgatgaccaagcgttttgagatgtccatgatgggtgaattgaagttcttcctcggccttcaaatcaagcaactcaaggaaggaactttcatttgccaaataaagtatttgaaggacatgctcaagaagtttggaatggagaatgcgaagccaatccacactcccatgccatcaaatggccacctcgacctcaatgagcaaggtaaagacgtcgaccaaaagggagcgaggtttgatctcattggctacgccgatgcggattatgccggatttgtgagcacttgcatcatctctgggagttctttgcatcatcttttactcttggaggttgaggactcctag

SEQ ID NO: 13715 - DNA, 1119 bp, Oryza sativa
  Clone ID: TFbOSC101552j.C1.o1.fg
atgaaatgcttctgggtgagtactggcaaacctgaaggaattcttactgctgatcagcagaagcaattcgaggaagccactactctctttgtgggatgcattcttagcgttcttggcgaacgtctggtcgaggtgtatatgcacatgactgacgctaaggagttgtgggatgcactgaatactaaattcgttgctactaatgctagcaatgatctatacatcatggagcagtttcatgactataggatagctgacaaccgttctatagtcgaacaggctcatgagatacaaaccatagctaaggaactcgaactccttaagtgtgtcttacccgacaaatttgtggccgggtgcattattgcgaaactacctccatcttcgagaagtttcggtactgcactcaaacacaagagacaggaatactccgttgaggggttggtagcatctcttaatggtgaggagaaagctcggaaaaagacgccgcgtctaagggcgatgaacaagagcaaggggaaatacaaagctcaacagaacaccaacttcaagaagcagaagaagaacaacaacaatcctaatcaggatgagaggacttgctttgtgtgtggccaacctggtcatctggctaggaagtatccacagcgcaagggtatgaaggcacctgcagggcagacttctaagtctgctaatgtgaccattggcaacactggagatggaagcgggtatagtaatttacctactgttttttcagttaatcaatctactaattggtgggttgatactgcggccaatgtcgcacggagttccaccgtcctaatggggaatgggtcacatgcttctgttcatggtgttggcacagtagatctgaagtttactttgggaaagatcgtgcagctgaagaacgtgcagcatgtcccttctatcgataggaatcttgttagtggctcccgtctaactagagacggatttaagttggtttttgagtctaataaagtagtcgtgtctaaacatggatattttattggtaaaggttatgagtgcggaggcctgttccgcttttccctttctgatttctgcaataagtctgtcaaccatatttgtggcagtgtggatgatgactaa

SEQ ID NO: 13716 - DNA, 5208 bp, Oryza sativa
  Clone ID: TFbOSC102249j.C1.o19.fg
atgtcgggccaagcgggggatgggaacgatggtgataagggagctaagatcccttatgactatccctctacatctacatcttatgtgagtacctatagcggcaaagctccgtacttcaatggtacggactatgccgcttggaagcataagatgaagatgcatttgaagtctattaacccatctatttggagaatagtcaaaaaaggctatgttttgcagaatcccgaagatcccaccaaggaggacgacgagaacgagcacaagaacgctcaagccgctaatgcaatacttagcgccttgagtggaagtgagttcaaccgtgtggatggcattgagagtgccaaagtgatttgggacacgcttcggaacttgcatgaaggcacggatagtgttcgtgagtccaaggtggagatcctcaaggggcaatttgagagatctgtgatgttagatggtgagagcccaagcgacatgtacgaccggttgagcaagatcatcaatgagatcaagggacttggctccaaggacatgaccgatgaggttgtggtcaagaagatgactctcacacctcatgatttgctcggatgcatccttgcccttgacatgctcgtgcaagagtccaaggatgtcatccaatacatcaaccaaagctcaaccgcaagcatcaagaaggaagacttagctttgaaggcaaaggaagaagaagaagagaatcgcaagagcaagagcaaggcggagatcgatgatgaagagatggctcccttcgtcaagaagttcggcaagttcatgaggcgaagcggcttcttcaagggaggatcttccaagcactactccaacaagtcaagtggaagacactccgcaagagtgtgctacgtgtgcaaagagcccgggcacttcattgcggattgcccccacctcaaggatggttcccacatcaaggaagataagaagaaggatgagaagaaggagaagcacaagcatagcaagagggaacattatggccaagctcaccttgggatgatcttcggctccgactccgagtcaagctcaagtgatgaagaaggagtcgccacgtttgccgtcaagccctcatcaccaccgagactcttcgactactcaagtgatgaggatgctccggtttgtctcatggcaaaggagcctaaggtaccttctcttcttaagtcatttaatgttgatcttgttagtgatgaggaggatgaggttgaggatgaggttatagatgacgaattgttcaagtccataactaaggaatccctaccacacttgagtgagttgcttgagagaattgaggaccaatatgcaactcttgagaggcaagagactttgctcattcgtgagaaagagcggtctcatgaactcaagagtgagcttgctaaggagagagagaaaaatgaggcattggaatatgtctccggtggaagaagttgggtaattgatagtggatgcacaaatcacatgaccagagaagaatcaatgttttcaactcttgatccaaatggcacttcacaagataacatagttttcggggacgatggaaagggaaaggttatgggattgggtaagattgcaatttctaatgatctttccattgccaacattctcttggtaaaatctctaaactacaatcttttgtccgtttctcaattatgttctatgggttataattgtctttttaccgatgttgatgtgaccgtctatagaaggaatgattcctcggtagtctttaagggtgtcctcaagggaaagctttaccttgtggatttttcctcaagtaaagccaaacatgagacatgcttagtggctaagtccaacacggggtggctttggcatcagaggctagcccatgttggtatgaggaatcttcacaagcttctaaagcacgatcacatccttggactaacaaatgttcaatttgagaaagatagggtgtgtagcgcatgtcaagccggcaaacaaattggagcacatcaccccgtcaagaatgtgatgaccactacaagaccattggtgcttctccacatggacctcttcggaccaattgcttatctaagcattggaggtaacaaatatggtcttgttattgttgatgacttttcacgcttcacgtgggtgttctttttgcatgacaagagtgagacacaagctatcttcaagaagtttgcaagaagagcacaaaacgagttcgacctcaagatcaagaacattcgaagtgacaacagcaaggagtttaagaacacgtgcatcgagagtttccttgatgaagaaggcatcaagcacgagttctcggctgcatattcacctcaacaaaatggagtagctgagaggaagaataggactctcaatgagatggcgaggaccatgttggatgagtacaagacatcggacaatttttgggccgaagccgtcaacaccgcatgccataccatcaactgcctttatcttcaccgccttcttaagaagactccctatgagcttcttaccggtaataaaccaaatgtctcttactttcgtgttttcggtagtaagtgttacattcttaataagaaggctagatcctctaagttcgctcctaaagtggatgagggattcttgcttgggtatgggtcaaatgaatgcgcataccgcgttttcaacaaaacctctagtattgttgagattgcgcgtgatgtgacatttgacaaaattaatggctctcaagtatccgagcgaagcaatcaaaagattggctcttggggacgtgaagaaggcgagcaagtgccaccctcaccgatcaacttagctcgcccaagaatccaccaaagtatccaaagagatcatcctaccgacaacatcttaggagacatcaacaagggagtatccactcgttctcgtattgcaaatttttgtgagcattactcgtttgtgtcttctcttgaacctctaagggtggaagaagctcttaatgatccggattgggtgatagcgatgcaagaggagttgaacaatttcacccggaatgaagtgtggactttggtggagcgacctcggcaaaatgtgattggcacaaagtggatcttctgcaacaagcaagacgaggccggggtcgtaataaggaacaaggcgaggttagtggcgcaagggttcacccaaatcgaaggattagatttcggtcaaacttttgcgccggtggctagacttgagtcgattcgcatattgcttgcttttgctactaacctcaattttaagctatatcaaatggatgtcaaaagcgccttcctcaacgggcctatcaacgagttggtatacgtggagcaaccaccgggcttcgaggatccgaagtatcccaaccacgtgtacaagctccacaaggcactatacgggcttaagcaagcccctagagcttggtatgagtgtcttcgcaattttcttgtgaaaagaggctttaaaatcgggaaagccgattcaaccctttttactaaaagacataataatgatatttttgtgtgccaaatatatgtcgatgacattatatttggttctactaacaagtcttttagtgaagagtttagtaggatgatgaccaaacgttttgagatgtccatgatgggtgaattgaagttcttcctcggccttcaaattaagcaactcaaggaaggaactttcatttgccaatcaaagtatttgaagaacatgcttaagaagtttgggatggagaacgccaagccaatccacactcccatgccatcaaatggccacctcgacctcaacgagcaaggtaaagacgtcgatcaaaaggtataccgttccatcattggctcacttctttacctttgtgcatctaagcctgatattatacttagtgtgtgcatgtgtgcaagatttcaagtcgctctgaaggagtgtcaccttgtggccgtgaagagaattcttagatatttagtgcacacacctaaccttggtctttggtatcctaagggagcgaggtttgatctcattggttatgccgatgaggattatgccgggtgcaaagtggataagaaaagcacattgggtacttgccaattcttgggtaggtcccttgtttcttggtcttccaagaagcaaaactccgtcgccctatccaccgccgaagcggaatatgtttcgatcaattgggaggagttgcaggcacacaacgatccggtgattgactctatgattgccaattgtgatctcatgggtatccgctccttcatgacgttgcagcaaaattggtgcaacgaggtcattgctcagttttatgccaccgtctactttgatcgttatcgtgccatgcactgcatgactcaggggtcctggtattctgtttcttatcagcagttggctgagatctggggcttccgtcttcgttctttgctcaaccttgatgaccttcataatcttcaaattcctgccaacacagaattgcttcccctttacactccaaatgatccaaatgtggtgttgggcaaggtcgacggcctcaagccgtactttgcctacttgaaccggatgtttcgccggtcttttgtgtctatggatagtgatgctaacagcattaaccacctctctaggaccgtgcttctccgttttgatccccctcctcatcgcttccatgtctatcactttgtgtgggaggagatccgcatggcttcaattcagtacaagaaggggttggtctatgcccttcacattatgcggatgatcgagactgtgactcagctccagtttcgccatgatgtgactcattctcagcttcacttgcgccttcttaaggccccccgctcctcggctgcttgggacataccctcctcttccactctgccgcctcctgctcctgagcgccctgcctctgtggctcgtcgtgagccgtctcccttattccacaatttacggagtctttttggtctttgctccacggaggccaaaaagaaccgccgattgcggaattcggcgaagaaaacggctcgtgatgtcaagttcctcaaggcaaggtattatgaggaccaccacattgatatccctccttctcctccgggtttcgaggccgagcccgatgagccacaggatgaagcgattgaggatccttttgctgggttgccttacgacttcgacttctttggatatggccatggctatggctatcctcctccaccacctccagaggatccttctcaggcgcccttcgcttga

SEQ ID NO: 13717 - DNA, 375 bp, Oryza sativa
  Clone ID: TFbOSC11196j.C1.o1.fg
atggacaatcgtaagagaggaaggattgttttccaggaggcacaaggtcaagaacagtcacaacagttgggcatcagtggtgagatcaactcagagactaatgcaagcaatgaagacaacgatgagcaagctactcaatcagtgtcatttcagcaggatcagtctcaagaagataacagtaatggaagggagcagcgggtgtgtttcaattgttatgagccaggtcacttcgtaaaagagtgtccgaagccgaagcgtcaacagccacaaggccaagtcaacaaccttgtccttacagaagcaaatgcagtgccggttgcgtctcaagggatacagctcagccaccagtttcaaagcggcattagttttctttaa

SEQ ID NO: 13718 - DNA, 3210 bp, Oryza sativa
  Clone ID: TFbOSC22995j.C1.o3.fg
atggctcaatttaatgagttgaggcgtaacatggaggcaagacaagatcgaatggcacaagatgttcaaaatattttgggtcattttgaaaatattaatccttttggtggagatgcaagtgtgcacagtggagaagatgaagaggatgataatgatgatttgccctatcgttttggtcgcataccacggcggagaaataatgatgaagagaggcttggtaagctgaaattcaccattccaaagtttgatggtggatctgatctagaggcttatcttatgtgggagttgaaggttgataaaatatttcacatccataattattccgaagagaagaaattggcaatggcttcacttgagtttgaggattatgctctaatttggagtcgagatatccaatgcttcaagtgtggaggccgtgggcatgttgttagagaatgtccaaacaatcgtgccattattgtgattgaacatggagagtttgattcagctagtgaggatgctgaaaatggacaaagaaacaatctttttcagacccgagctaaagtgggaggaaaggtgtgcaaggtcatcgttgatggaggtagctgccataatcttgcaagtaaggatatgtgtgacaagcttggtctgaagttgttgcgacacccacatccatatcatgtccaatggctaaatgatagtggagatatcaagattgggcatcgggtgaaagtttcttttaagattggtgaatatgaagatgaggttttgtgtgatgttgtgcctatgacagtgtgtcacttgctgctgggaaggccatggcaatttgatcgatcatcacggcattgtggtcgaacaaatcaattctctatcaagtggaaaggaaggaattttgtgcttaagcccatgacacctcaacaaatcatggctgagcatatgcaaaagagttctgaagttaggatagaaagtgagaaagaaagagagcaaaataaatttagtgacatccacaaatcggtgagcaagagccacaagccaaatatgagtgataaaaagaaaagagagggtgagaactttgtgatgttagccaccaaatcagaaatgagagatgagtatgaagatgtttttccaatggaaacacctgctggacttcctccattgcgtggcatagaacatcaaattgatctcattcctggggctgcactacccaaccgagcaccataccgcaccaacccacaagaaacaaacgaaatacaaaggcaagtacaagagcttttagataaaggttatgtgcgtgaaagtttaagtccttgtgttgtccctgtgattttggtgcccaagaaagatggatcttggaggatgtgtgttgattgtagagccctcaataatatcactgttcgatatcgccatcccattccaaggatagatgatatgcttgatgagttgagtggttctatgatattttctaaaattgatttgagaagtgggtatcatcaaataagaatgaaaattggagatgaatggaaagctgtttttaaaacaaaattcggtttatatgaatggttagttatgccttttggtttgactagtgaaccaagtactttcatgagattgatgaaccatgttttgagaacattcattggaaaatttgttgtggtttactttgatgatattctgatttactccaagtctttgagtgaacatgctagtcacataaaacaagttttggatgtgctaagaaaggagaaattatttgctaacattgagaagtgcacattttgtacagagaaggttgtctttcttggttttgtcatttcaggacagggagttgaagttgatgaatcgaaagtggaggcaatcaaggattggccaacccctgtgaatgtaagtcaggtgagaacttttcatggtcttgctggtttttatagaagatttgtgaaagatttcagcaccatagctgcacccttgaacgagttgacaaaaaaaggtattgagtttcattggggtgaatcacaaaaggatgctttccaaaaattaaaaagatgtttgactgaagctcctttgttggtttggcctgatttcactaaaacttttgaaattgaatgtgatgctaatggaattggtataggagctgttttaatgcaagataaaaagcatgttgcttactttagtgagaaattgggaggagctcaattgaattattctgtttctgacaaagaattatatgttttggtgagagttcttgaaacttggcaacattatttatggccaaaagaatttgtcattcactctgatcatgaagctttgaagtacttgaaaggacaagccaagctgaaccgtcgccaagccaaatgggtagaatttattgaaacatttccctatgttgttaagtataagaaagatggtcaaactgaagttgtgaaccgtacactatcaacgttgctgcgtatgatgatcaagaaaaatttaaaagagtgggaggattgcttgccacttgtggagtttgcatacaacagggcagaaagaactaacatggatgcttcgaagcgtgctgcatatgtgaagaagattcatgaaaagaccaaggaagaaattgaaaagaaggcgcgcagtaatactgcaaaggtgaacaagcatagaaagaaagtggtctacgaaacaggagatcttgtttgggttcatctacagttcaggacgactccttttcaagagggggaggatgatgtgccccaacccctgtcacatgatgatgagcacatcccagctacacctgacgtaaacaagggtgatgtaaacaatggtgatggttcacatcataagtcacatgaggaaaatgaagatgacgtaaatcatgttgatggattatgtctcaacaagaacgatcaagcatatcatggtccaattacgcgcagccgtgctaggaaaatacaacaagaggtgaactcgctctttgctcaacttaatccaaatttttgtgagaattttatactacctaaatgctctacatttttattgctcaggtttacacccgaggagatcatcactacaccaagaaggatgggttacattgaggatgataagggttacgttgaggacgataaaggttacgacgaggaagaaccagcccatcccaaaccagtagctgtctacgccaacaagaagatggtttactctgcaaaagactcaacttccaaggcttgtgtgacccaaccagtcaactttctccatgcttaa

SEQ ID NO: 13719 - DNA, 250 bp, Oryza sativa
  Clone ID: TFbOSC25748j.C1.o1.hg
gcaagctactcaatcagtgtcatttcagcaggatcagtctcaagaagataacagtaatggaagggagcatcgggtgtgtttcaattgttatgagccaggtcacttcgtaaaagagtgtccgaagccgaagcgtcaacagccacaaggccaagtcaacaacattgtcctcacaggagcaaatgcagtgccggttgcgtctcaagggatacagctcagccatcagttccaaagcagcagtagctttctttaa

SEQ ID NO: 13720 - DNA, 162 bp, Oryza sativa
  Clone ID: TFbOSC28706j.C1.o5.gm
atgacgacgaccgagacggcggcggcgcacggctggagcgacggctacgacggcggcgctaggttgcacggcgctagagctcttccggcgacgagaggcgaaggcgaaggtggcgacggcgctgcggtgactgcactagctatgacaagggttagaggttag

SEQ ID NO: 13721 - DNA, 771 bp, Oryza sativa
  Clone ID: TFbOSC28815j.C1.o1.fg
atgaacagagcagaacgacaaccaatcacttgggaagagtttaccgaaggattcaagaagacacacgtacctgtaggagttgttgctttgaagaagcgtgagtttagggctttgaagcaaaaggatcgtaccgtggcagagtatcttcatgagttcaatcgtctggctcgctatgctccagaagatgtgcgtactgacgaggaaaggcaagagaaattcttggaaggtccgaaggatgaactgtcagttatgttgatctctcatgactatgaggattttcaggagttggttgataaagcaattcgactggaagacaagaagaacaagatggataaccgtaaaaggaaaatgactgtatcccaggaggcacaaggtagtagccagaggcagcgtatcaagccactccaaattggtgaatctttttctgcaggtcaagaacagtcacaacaacagtcacaacagttgggcatcagtggtgagatcaactcagagactaatgcaagcaatgaagacaatgatgagcaagctactcaatcagtgtcatttcagcaggatcagtctcaagaagataacagtaatggaagggagcatcgggtgtgtttcaattgttatgagccaggtcacttcgtaaaagagtgtccgaagccgaagcgtcaacagccacaaggccaagtcaacaacattgtcctcacaggagcaaatgcagtgccggttgcgtctcaagggatacagctcagccatcagttccaaagcagcagtagctttctttaa

SEQ ID NO: 13722 - DNA, 5976 bp, Oryza sativa
  Clone ID: TFbOSC400269j.C1.o2.fg
atgtcgggccaagcgggggatgggaacgatggtggtaagggagctaatatcccttatgactatccctctacatctatatcttataatcccgaagatcccaccaaggaggacgacgagaacaagcacaagaacgctcaagccgctaatgcaatacttagcgccttgagtggaagcacggatagtgttcgtgagtccaagatggagatcctcaaggggcaatttgagagatttgtgatgttagatggtgagagcccaagcgacatgtacgaccggttgagcaagatcgtcaatgagatcaagggacttggctccaaggacatgaccgatgaggttgtggtcaagaagatggttcgagcaatcactccaaggaactttaccttggtgaccatcattcgtgagcgtccggactacaagactctcacacctcatgatttgctcggacgcatccttgcccatgacatgctcgtgcaagagtccaaggatgtcattcaatacatcaaccaaagctcaaccgcaagcatcaagaaggaagacttggctttgaaggcaaaggaagaagaagaagagaaccgcaagagcaagagcaaggcggagatcgatgatgaagagatggctctcttcgtcaagaagttcggcaaattcatgaggcgaagcggcttcttcaagggaggatcttccaagcactactctaacaagtcaagtggaagacactctgcaagagtgtgctacgtgtgcaaagagcccgggcacttcattgcggattgcccccacctcaaggatggttcccacatcaaggaagataagaagaaggatgagaagaaggagaagcacaagcatagcaagagcgaacattatggccaagctcaccttgggatgatctttggctccgactccaagtcaagctcaagtgatgaagaaggagttgccacgttcgccgtcaagccctcatcaccaccgagactcttcaactactcaagtgatgagaatgctaaggtaccttctcctcttaagtcatttaatgttgatcttgttagtgatgaggaggatgaggttgaggatgaggttatggatgacgaattgttcaagtccataactaaggaatccctaccacacttgagtgagttgcttgggagaattgaggaccaatatgtaactcttgagaggcaagagactttgctcattcatgagaaagagcggtctcatgaactcaagagtgagcttgctaaggagagagagaaaaatgaggcattggtacggctttacaagcaaaccaaagagtctcatgctaatcttgaggtggcgaacgctcaacttcaagagagagtggatggcttggacaaagcatacctcactcttgaagagaagttcaaaaccttaaagaatagtgtctctctccctagcgagccatcttgttctaaaattgtcccaagcaatgaaccatgtgtgagatgcaaagatattgatattgaagcttgtgctactaactctatttccttgagtgctttgcaaaagcaaaatgagaagcttatgggactccttcacaatggcttacttaagtgccatatggatagtaaggccctaaaggagtacctaggctatcaaagggacaacttctaccatcagggtcttgggtatgttcctccaccaaaagaaaaggtggacaagagtgtgctgatcaggaggccccaaggtcttagcaattttgttaaggccaaaagtatccttcctaatgattatgcttcacattgttcttttgatgcatcttatgttcttaggaagaatgctagttgtcgtgttgttgctaagtatgtaggcccaaggggcaagaatatttctatcaagagagtactttgggtgcctaagacacttgttactaacatgagaggacccaagcaaggaaaggttatgggattgggtaagattgcaatctctaatgatctttccattgccaacgttctcttggtaaaatctctaaactacaatcttttgtccgtttctcaattatgttctatgggttacaattgtctttttaccgatgttgatgtgaccgtctatagaaggaatgattcctcggtagtctttaaggatgtcctcaagggaaagctttaccttgtagatttttcctcaagtaaagccaaacatgagacatgcttagtggctaagtccaatacggggtggctttggcatcggaggctagcccatgttggtatgaggaatcttcacaagcttctaaagcacgatcacatccttggacaaacaaatgttcaatttgagaaagatagggtgtgtagcgcatatcaagccggcaaacaaattggagcacatcaccccgtcaagaatgtgatgaccactacaagaccattggagcttctccacatggacctcttcggaccaattgcttatctaagcattggaggtaacaaatatggtcttgttattgttgatgacttttcacgcttcacgtgggtgttctttttgcatgacaagagtgagacacaagctatcttcaagaagtttgcaagaagagcacaaaacgagttcgacctcaagatcaagaacattcgaagcgacaacggcaaggaatttaagaacactaagtgttacattcttaataagaaggctagatcctctaagttcgctcctaaagtggatgagggattcttgcttgggtatgggtcaaatgaatgcgcttaccgcgttttcaacaaaacctccggtattgttgagatcgcgcgtgatgtgacatttgaagaaactaatggctctcaagtagagcaagttgattctcatgtgttaggtgaagaggaggatccgagcgaagcaatcaaaagattggctcttggggacgtacgtcctagggagccacaacaaggagtctcttcctcaacacaagtggagccacctacatcaacccaagccaacgatccctctatctcaagcttggatcaaggtgaagaaggtgagcaagtgccaccctcaccgatcaacttagctcgcccaagaatccaccaaagtatccaaagagatcatcccaccgacaacatcttaggagacatcaacaagggagtatccactcgttctcgtattgcaaatttttgtgagcattactcgtttgtgtcttctcttgaacctctaagggtggaagaagctcttaatgatccggattgggtgatggcgatgcaagaggagttgaataatttcacccagaatgaagtgtggaatttggtggagcgagctcggcaaaatgtgattggcacaaagtggatcttccgcaacaagcaagacgaggccggggtcgtaataaggaacaaggcgaggttagtggcgcaagggttcacccaaatcgaaggattagatttcggtgaaacttttgcaccggtagctagacttgagtcgattcgcatattgcttgcttttgttactaacctcaattttaagctatatcaaatggatgtcaaaagcaccttcctcaacgggcctatgaacgagttggtatacgtggagcaaccaccgggcttcgaggatccgaagtatcctaaccgcgtgtacaagctccacaaggcactctacgggcttaagcaagcccctagagcttgtgaagagtttagtaggatgatgaccaaacgttttgagatgtccatgatgggtgaattgaagttcttcctcgtccttcaaatcaagcaactcaaggaaggaacttttatttgccaaacaaagtatttgaaggacatgcttaagaagtttggaatggagaacgccaagccaatccacactcccatgccatcaaatggccacctcgacttcaacgagcaaggtaaagacgtcgatcaaaaagtataccgttccatcattggctcacttctttacctttgtgcatctaggcccgatattatgcttagtgtgtgcatgtgtgcaagatttcaagccgctccgaaggagtgtcaccttgtggccatgaagagaattcttagatatttagtgcacacacctaaccttggtctttggtatcctaagggagcgaggtttgatctcattggctatgccaatgtggattatgccggatgcaaagtggataggaaaagcacatcgggtacttgccaattcttgggtaggtcccttgtttcttggtcttccaagaagcaaaactccgtcgtcctatccaccaccgaagcggaatatgtttcggcggggagttgttgtgctcaacttctttggatgaagcaaacattgagagactatggcctcaatgtatccaaaatcccactcctatgtgacaatgagagtgccattaagatagccaacaaccccattcaacactctcgaaccaaacatatcgatattcgccaccatttcttgagagatcattccataagaggcgacatagacatccaacatgtgagaaccgacaaacaattggcggatatctttaccaagcctctagatgaagctaggatgcctccccgcaagcaaacctcccacaagtccaagcgcccgagggatcgctctcccactccatcctctcatgatgattcggacagtgattggtccggtggagaagatgcggttcctcaggttgcgtgggtggctcggcggtctactcaagctcatggtggtggtggcgatggtgagggctcctctcgtcaaccgcaaacgccgccgcaccaacccaatgtccccattgggcctctccgcattcatacccccgagagggatccggcggtgattcaccaagtgtatgattggtggcgcaagtctgaggttgttgctcctcgtcgggatgaggatctgcgctcctttcgccgcaccgccacggatctgcggttttggaccctttttcagcaagacttttatgagtctgtgattaagtccaaaactcatcccactgttcccatgcaatggatcaattgggaggagttgcaggcacacaatgatccagtgattgactctgtgattgccaattgtgatctcatgggtatccgctccttcatgacgttgcagcaaaattggtgcaacgaggtcattgctcagttttatgccaccgtctactttgatcgttatcgtgccatgcactggatgactcaggggtcctggtattctgtttcttatcagcagttggctgagatctggggcttccgtcttcgttctttgctcaaccttgatgaccttcataatcttcaaattcttgccaacacagaattgcttcccctttatactccaaatgatccaaatgtggtgttgggcaaggtcgacggcctcaagccgtactttgcctacttgaaccggatgtttcgccggtcttttgtgcctaaggatggtgatgccagcagcattaaccacctctctaggaccgtgcttctccggtttgatccccctcctcatcgcttccatgtctatcactttgtgtgggaggagatccgcatggcttcaattcagtacaagaaggggttggtctatgcccctcacattatgtggatgatcgagactgtgactcagctccagtttcgccatgatgtgactcattctcagcttcagttgcgccttcttaaggccccccgctcctcagctgctcgggacataccctcctcttccactcagccgcctcctgctcctgagcgccctgcctctgtggctcgtcgtgagccgtctcccttattccgcattttgcggagtctttttggtctttgctccacggaggccaaaaagaaccaccgattgcggaattcggcaaagaaaacggctcgtgatgtcaagttcctcaaggcaaggtattatgaggaccaccacattgatatccctccttctcctccaggtttcgaggccgagcccgatgagccagaggatgaagagattgaggatccttttgccgggttgccttccgacttcgacttctttggatatggccatggctatggctatcctcctccacgcccttcgcttgagtcgtcatctcatcgtcctctctttttggtgtcttga

SEQ ID NO: 13723 - DNA, 5092 bp, Oryza sativa
  Clone ID: TFbOSC400615j.C1.o3.np
atgtcgaacgaggtgaaccacgtagggaaggctcccatgtttaatggcacaaactattccacttggaaaattaaaatgtctactcacctcaaagctatgagcttccatatttggagtattgtggatgtaggctttgcaatcaccggcacgcccttgacggagattgatcaccgcaacctccaactcaatgcccaagccatgaatgctttgttcaactctttgagccaagaggagtttgatagagtgagcaaccttgagaccgcatatgagatttggaacaagttggcggagatccatgagggcacaagtgagtacaaggatgccaagcttcacttcctcaagatccaatatgagacattctccatgttgcctcatgagagtgtgaatgacatgtatgggaggctcaatgtcattgtgaatgatctcaaggggcttggggcaaactacaccgatctcgaggttgcccaaaagatgcttagggctctaccggagaagtatgagacccttgtcaccatgctcatcaactccgacatgtcaaggatgacaccggcaagcctcttggggaagatcaacaccaatgacatgtataagttgaagaaaaaggaaatggaggaagcctcaccttccaagaagtgcattgctctccaagccgaagttgaagacaagggcaagggcaaggtgaatgaagtcaatgagaacttggaagaagagattgcccttcttgctagaaggttcaatgatttcttgggaaggagaaaggagagaggaaagggctccaactcaaataggagaagaaatagaagacccaacaagactctctccaacttgaggtgctttgagtgtggtgagaagggatactttgcttccaagtgcccttccaaggatgatgatggagacaagtcatctaagaagaagagtggaggctacaagctcatgaagaagctcaagaaggaaggcaagaagattgaggccttcatcggggaatgggactcaaatgaggagagctccgcctcatccgggtccgaggaagaagatagtgataatgcaagctccaagaagaagaagatggccgttgttgccatcaaggaggctccatcactcttcgctccactttgtctcatggcaaagggctcctctaaggtaacatctcttagtgatagtgagagtgatgatgattgtgatgatgtttcctatgatgagcttgtgagtatgtttgaggagctccatgcttatagtgagaaggagattgtcaagttcaaggccctaaagaaggatcatgcttttttggaggtcttgtatgaggagctaaagacttctcatgagagactcaccatttctcatgagaagcttaaggaagctcatgacaacctcctttccactactcaacatggagctctcattgatgttggcatatcttgtgatttgcttgatgatagtactacttgccatattgctcatgttgcatcatctagcatttctacctcttgtgatgatcttgtggatatgtctagctctagctctagctcttgtgtatctatttgtgatgcctcacttgttgttgagaacaatgagcttaaggagcaagtggctaagctcaacaagagcttggagaggtgcttcaagggtaagaacactcttgacaagattttgagtgagcaacggtgcatccttaacaaggagggacttggatttattccaaagaagggtaagaaaccttctcaccgtgccactcgttttgtcaagagcaatggtaagtattgctccaagtgtcgtgaggttgggcatttggtgaatgattgccccggtggtaagcctcctaagacatgcatgtttgattctcattatatgcttaggaaggctcatgatggtagcattgttgctagatatgtgggttcccctatactcggtggtaaaaagaataccatttgggtgcccaaagctttggtctctaacctccaaggacccaaacaagtttggattattctcactatacttgggtattctttttgcatgataagtctattgttgccgaacttttcaaaaagtttgcaaaaagggcccaaaatgaatttagttgcactcttgtgaaaattagaagtgacaatggttccgaatttaagaattccaatatcgaggactattgtgatgatcttggtatcaaacacgagctttccgctacctactcacctcaacaaaatggtgtagtggaaaggaaaaatcgtacattgattgagatggcaaggactatgctagatgaatatggtgtttccgattccttttgggcggaagccataaacatcgcttgccatgcaaccaataggctttatttgtatcgtctcttgaaaaagacttcctatgagctaattgttgggaggaagccaaatgttgcctattttcgagtttttggttgcaagtgctatatttaccgaaagggtgttagactaaccaaatttgaaagtcggtgtgatgaagggtttcttctaggttatgcctcaaatagcaaggcataccgggtctacaacaagaacaaaggtgatgaaggcttgatgagagctatgaagaacatgtctattggagatgtcaagcctattgaagtggaagacaagccatccacctccactcaagatgagccatctacttccgcttcgccaagtcaagctcaagttgaagtggaggaggagaaggcacaagatccacctatacctccaagaatacacaccgctctttccaaggatcacccaattgaccaagtgttgggtgacattagtaagggtgttcaaactcgatctcgtgtcgcttcgatttgtgaacattactcgtttgtttcttgtcttgagccaaaacatgtagatgaagctctttgtgatccggattggatgaatgctatgcatgaagagctcaacaactttgcaagaaacaaggtgtggactttggttgaaagacctagagaccacaatgtcatagggacaaagtggatctttaggaacaaacaagatgagaacggattggtggtgagaaacaaggcaaggttggtggcgcaaggtttcacacaagttgaaggtttagactttggtgaaacttttgcccccgtggcaagacttgaggctattcgcatccttcttgcatttgcatcatactttgatataaaactatttcaaatggatgtgaaaagtgcttttctaaatggtgaaattgccgaacttgtctttgttgaacaacctcccggttttgaagatcctgaaaatcctaaccatgtttacaaactctcaaaagctctttatggtttaaaacaagctcctagggcttggtatgaaagattgagagattttcttttgtcaaaggatttcaaaattggaaaagttgacaccactcttttcacaaaaatcattggtgatgatttctttgtgtgtcaaatttatgttgatgacatcatattcggttctactaatgaggtattttgcaaggaatttggtgatatgatgtctagggaatttgagatgtccatgattggagaattgagcttcttccttggacttcaaatcaagcaactcaaggatgggacgttcgtgagccaaaccaagtacatcaaggatctactcaagaggtttggcttggaggatgcgaagcccatcaagacacctatggcaaccaacgggcatctcgaccttgatgagggaggtaaaccggtagatttaaaactttatcgttctatgattggtagcttgctttaccttaccgcatctaggccggatatcatgtttagtgtttgcatgtgtgcacggtttcaagccgctcctaaggagtgtcacttagtggcttacccaaaaggtgctaaatttaagcttgttggctattccgattcggattatgccggttgcaaagtggatagaaagagcacatccggtagttgccaaatgcttgctatgcctccccacactcggcatggtcgtcgtgagcccacgcccgatcccgttagtaagaatgaggaatcgagcggagatgagtatgttcaaagtgatgaggacaatatggaaaatgttgagggtaatgagttggatgtaagtgatgatggtgatgacaatgggagtggcaatagtgaagatgatgaggcaagtgatgatgggagtcctctcgattccaccatccaatttgtgctaaatttgaggaatgctcaacaatacactatcctccatcatcatgatcaattccggaggcctaacgattgtaatgatccaagatttcatacacggttccaaaagtccgtgtatgaacaagtgtatgccaacaaagccttcgccgaacacaagtggatttcttggaggcacattggtgagacaccggagtttgagaatttgcaagagatgttccggaccgttgggattgataggattgtcaccatgaagcaaccttttgatgaagatctcatccggcaattctatgccactgtatgggtgtccggcgattgtgatgcaatgaagtggatgtcggggaccctccgatgctctatcaaccgccgtgaattcaaggagctcttgcacattcgcttcaataacggggatgaccttcatgatgagcacacccacaaccccttccccattgatcacttttctcagttttatgaagaagggggagggtacacatatggaaaggtggcgggtttgagggctctcccaagtgtgatcaaccgcagagtaagggccaccatcctcccaagatgcggcaacaatgatgacatacgcggagttgcttggcatgttattgatgccattatggatggtcgtcggtttgatgttatcaaccttatgatgaaggagattgccatctcaaaggggactattggacaaggaatctattatgctccctacataatgaggttgccgcctcctagacggcttgtggagaagttgcccggtgacctctccgagaagattgtggaggaggctcggtgccagtttgtgagtggtttggagttcaccaccttcggagtgaaggaagaactaccctagtgatcaaggcttgggtagttctctccgtgggccggctcccgccttgcccaccccttgacgaagggggcgtgcggaggcttcgtggt

SEQ ID NO: 13724 - DNA, 2529 bp, Oryza sativa
  Clone ID: TFbOSC400752j.C1.o2.gm
atgtcgggccaagcaggggatgggatcgatggtgataagggagctaagatcccttatgactatccccctacatctacatcttataatcccgaagatcccaccaaggaggacgacgagaacgagcacaagaacgctcaagccgctaatgcaatacttagcgccttgagtggaagtgagttcaaccgtgtggatggcattgagagtgccaaagtgatttgggacacgcttcggaacttgcatgaaggcacggatagtgttcgtgagtccaaggtggagatcctcaaggggcaatttgagagatttgtgatgttggatggtgagagcccaagcgacatgtacgaccagttgagcaagatcgtcaatgagatcaagggacttggctccaaggacatgaccaatgatgttgtggtcaagatgatggttcgagcaatcactccaaggaactctaccttggtgatcatcattcgtgagcgtccggactacaagactctcacacctcgtgattttctcggacgcatccttgcccatgacatgctcgtgcaagagtccaaggatgtcatccaatacatcaaccaaagctcaaccgcaagcatcaagaaggaagacttggctttgaaggcaaaggaagaagaagaagagaaccgcaagagcaagagcaaggcggagatcgatgatgaagagatggctctcttcgtcaagaagttcggcaagttcatgagacgaagcggcttcttcaagggaggttcttccaagcactactccaacaagtcaagtggaagacactccgcaagagtgtgctacgtgtgcaaagagcccgggcacttcattgcggattgcccccacctcaaggatggttcccacatcaaggaagataagaagaagggtgagaagaaggatgagaagaaggagaagcacaagcataggaagcgggaacattatggccaagctcaccttgtgatgatcttcggctccgactccgagtcaagctcaagtgatgaagaaggagtcgtcgcgttcgccgtcaagccttcatcaccaccaagactcttcgacaactcaagtgatgaggatgctcccatttgcctcatggcaaaggagcctaaggtaccttctcctctcaagtcatttaatgttgatcttgttagtgatgaggaggatgaggccaaaagtatccttactaatgattatgcttcacatggttcttttgatgcatcttatgttcttaggaagaatgctagtggttatgttgttgctaacgcgtgtcaagccggcaaacaaattggagcacatcaccccgtcaagaatgtgatgaccactacaagaccattagagcttctccacatggacctcttcgggccaattgcttatctaagcattggaggtaacaaatatggtcttgttattgttgatgacttttcacgcttcaccgacaacggcaaggagttcaagaacacgtgcatcgagagtttccatgatgaagaaggcatcaagcacgagttctcggctccatattcacctcaacaaaatggagtagcggagaggaagaataggactctcattgagatggcgaagatcatgttggatgagtacaagacatcggaccgtttttgggccgaagccgtcaacaccgcatgccacgccatcaaccgcctttatcttcaccgccttcttaagaagactccctatgagcttcttaccgtgaatgagggattcttgcttgggtatgggtcaaatgaatgcacataccgcgttttcaacaaaacctccagtattgttgagatcgcgcgtgatggagccacaacaaggagcctcttcctcaacacaagtagaaccacctacatcaacccaagccgacgatccctctacctcaagcttgaatcaagggtggaagaagctcttaatgatccggattgggtaatggcgatgcaagaggagttgaacaatttcacctggaatgaagtgtggactttggtggagcgacctcggcaaaatgtgattggcacaaagtggatcttccgcaacaagcaagacgaggccggggtcgtaataaggaacaaggtgaggcctatcaacgagttggtatatgtggagcaatcaccgggcttcgaggatccaaaatatcccaaccacgtgtccaagctccataaggcactctacgggcttaagcaagcccctagagcttgtagaatgatgaccaagcgttttgagatgtccatgatgggtgaattgaagttcttcctcggccttcaaatcaagcaactcaaggaaggaactttcatttgccaaataaagtatttgaaggacatgctcaagaagtttggaatggagaatgcgaagccaatccacactcccatgccatcaaatggccacctcgacctcaatgagcaaggtaaagacgtcgaccaaaagggagcgaggtttgatctcattggctacgccgatgcggattatgccggatttgtgagcacttgcatcatctctgggagttctttgcatcatcttttactcttggaggttgaggactcctag

SEQ ID NO: 13725 - DNA, 759 bp, Oryza sativa
  Clone ID: TFbOSC400773j.C1.o55.fg
atgaacagagcagaaggacaaccaatcacttgggaagagtttatcgaaggattcaagaagacacacatacctgcaggtgttgttgctttgaagaagcgtgagttccgggcacttaagcaaaaggatcgtaccgtgacggaatatcttcatgagttcaatcgtctagctcgctatgctctagaagatgtgcgtactgacgaggaaaggcaggagaagtttttggaaggcttaaaggatgagctgtcagttatgttgatctctcatgactatgaggattttcaggagttggttgacaaagcaattcgacttgaagacaagaagaacaggatggataaccgtaaaaggaaaatgattgtattccaggaggcacaggatagtagccagaggcagcgtatcaagccactccaaattggtgaatctttttctgcaggtcaagaacagtcacaacagttgggcatcagtggtgagatcaactcagagactaatgcaagcaatgaagacaatgatgagcaagctactcaatcagtgtcatttcagcaggatcagtctcaagaagataacagtaatggaagggagcatcgggtgtgtttcaattgttatgagccaggtcacttcgtaaaagagtgtccgaagccgaagcgtcaacagccacaaggccaagtcaacaacattgtcctcacaggagcaaatgcagtgccggttgcgtctcaagggatacagctcagccatcagttccaaagcagcagtagctttctttaa

SEQ ID NO: 13726 - DNA, 5148 bp, Oryza sativa
  Clone ID: TFbOSC400988j.C1.o4.fg
atgtcgggccaaacgggggaaggaaaacatggtgataagggagctacgtttccttatgactatccacctacatctacatcttatgtgagtacctatagcggcaaagctccgtacttcaatggtacggactatgccgcttggaagcataatatgaagatgcatttaaagtctattaacccatctatttggagaatagtcgaaaaaggctatgttttgcagaatcccgaaaatcccaccaaggaggacgacgagaacgagcacaagaacgctcaagccgctaatgcaatacttagcgccttgagtggaagtgagttcaaccgtgtggatggcattgagagtgccaaagtgatttgggacacgcttcggaacttgcatgaaggcacggatagtgttcgtgagtccaaggtggagatcctcaaggggcaatttgagagatttgtgatgttggatggtgagagcccaagtgacatgtatgaccggttgagcaagatcgtcaatgagatcaagggacttggctccaagggcatgaccgatgaggttgtggtcaagaagatggttcgagcaatcactccaaggaactctaccttggtgactatcattcgtgagcgtccggacttcaagactctcacacctcatatttgctcggactccaaggatgtcatccaatacatcaatcaaagttcaaccacaaacatcaagaaagaagacttggcgttgaaggcgaaggaagaagaagaagagaatcgcaagagcaagagcaaggcggagatcgatgatgaagagatggctctcttcgtcaagaagttcggcaagttcatgaggcgaagcggcttcttcaagggaggttcttccaagcactactccatcaagtcaagtggaagacactccgcaagagtgtgctacgtgtgcaaagagcccgggcacttcattgcggattgccctcacctcaaggatggttcccacatcaaggaagataagaagaagggtgagaagaaggatgagaagaaggagaagcacaagcatagcaagcgggaacattatggccaagctcaccttgggatgatcttcggctccgactccgagtcaagctcaagtgatgaagaaggagtcgccacatttgccgtcaagccttcatcaccaccgagactcttcgactactcaagtgatgaggatgctcccatttgcctcatggcaaaggagcctaaggaatatgtctccggtggaagaagttgggtgattgatagtggatgcaccaatcacatgaccggagaagaatcaatgttttcatctcttgatccaaatggctcttcacaagataacatagacttcgaggacgatggaaagggaaaggttataggattgggtaagattgcaatctctaatgatctttccattgccaacgttctcttggtaaaatctctaaactacaatcttttgtctgtttctcaattatgttctatgggttacaattgtctttttaccgatgttgatgtgaccgtctatagaaggaatgattcctcgatagtctttaagggtgttctcaagggaaagctttaccttgtggatttttcctcaagtaaagccaaacatgagacatgcttagtggctaagtccaacacggggtggctttggcatcggaggctagcccatgttggtatgaggaatcttcacaagcttctaaagcacgatcacatccttggtctaacaaatgttcaatttgagaaagataatgtgtgtagcgcgtatcaagccggcaaacaaattggagcacatcaccccgtcaagaatgtgatgaccactacaagaccattggagcttctccatatagacctcttcgggccaattgcttatctaagcattggaggtaacaaatatggtcttgttattgttgatgacttttcacgcttcacgtgggtattctttttgcatgacaagagtgagacacaagctatcttcaagaagtttgcaagaagagcacaaaacgagtttgacctcaagatcaagaacattcgaagtgacaatggcaaggagttcaagaacacgtgcatcgagagtttccttgatgaagaaggcatcaagcacaagttctcggctccatattcacctcaacaaaatggagtgaccaagaggaagaataggactctcattgagatggcgaggaccatgttggatgagtacaagacatcggaccgcttttgggccgaagccaagactccctatgagcttcttaccggtaacaaaccaaatgtctcttactttcgtgttttcggtagtaagtgttacattcttaataagaaggctagatcctctaagttcgctcctaaagtggatgagggattcttgcttgggtatgggtcaaatgaatgcgcataccgtgttttcaacaaaacctccggtattgttgagatcgcgcgtgatgtgacatttgacgaaactaatggctctcaagtagagcaagttgactcacatgtgttaggtgaagaggaggatccgagcgaggcaatcaaaacattggctcttggggacgtacgtcctagggagccacaacaaggagcctcttcctcaacacaagtggagccacttacatcaacccaagccgacgatccctctatctcaagcttggatcaaggtgaagaaggcgagcaagtgccaccctcaccgatcatcttagctcgcccaagaatccatcaaagtatccaaagagatcatcccaccgacaacatcttaggagacatcaacaagggagtatccactcgttctcgtattgcaaatttttgtgagcattactcgtttgtgtcttctcttgaacctctaagggtggaagaagctctaaatgatccggattgggtgatggcgatgcaagaggagttgaacaatttcacccggcaaaatgtgattggcacaaagtggatcttccgcaacaagcaagacgaggccggggtcgtaataaggaacaaggcaaggttagtggcgcaagggttcacccaaatcgaaggattagatttcggtgaaacttttgcgccggtagctagacttgagtcgattcgcatattgcttgcttttgctactaacctcaattttaagctatatcaaatggatgtcaaaagcgcctttctcaacgggcccatcaacgagttggtatacgtagagcaaccaccgggcttcgaggatccgaagtatcccaaccacgtgtacaagctccacaaggcactctacgggcttaagcaagcccctagagcttggtatgagtgtcttcgcaactttctcgtgaaaaacggctttgaaatcgggaaagccgattcaaccctctttactaaaagacatgataataatatttttgtgtgccaaatatatgtcgatgacattatatttggttctactaacaagtcttttagtgaagagtttagtaggatgatgaccaaacgttttgagatgtccatgatgggtgaattgaagttcttcctcggccttcaaatcaagcaactcaaggaaggaaccttcatttgccaaacaaagtatttgaaggacatgctcaagaagtttgggatggagaacgccaagccaattcacactcccatgccatcaaatggccacctcgacctcagcgagcaaggtaacaacgtcgatcaaaaggtatactgttccatcattggctcacttctttacctttgtgcatctaggcccaatattatgcttagtgtgtgcatgtgtgcaagatttcaagccgctccgaaggagtgtcaccttgtggccgtgaagagaattcttagatatttagtgcacacccctaaccttggtctttggtatcctaagggagcgaggtttgatctcattggctatgccgatgcggattatgccgggtgcaaagtggataggaaaagcacattgggtacttgccaattcttgggtaggatgcctctccacaagcaaacctcccacaagtccaagcgcccgagggatcgctctcccactccatcttctcatgatgattcggacagtgattggtccggtggagaggatgcggttcctcaggttgcgcgggtggctcgacggtctactcatgctcatgatggtggtggtgatggtgagggctcctctcgtcaaccgcaaacgccgccgcaccaacccaatgtccccattgggcctctccgcattcatacccccgagagggatccggcggtgattcgccaagtgtatgattggcggcgcaagtctgaggttgttgctcctcgtcgggatgaggatccgcgctcccttcgccgcaccgccacggatccgcggttttggactctctttcaacaagacttttatgagtctgtaattaagtccaaagctcatcccactgttcccatgcaatggatcaattgggaggagctgcaggcacataatgatctggtgatcaactctgtgattgccaattgtgatctcatggatatccgctccttcatgacgttgcagcaaaattggtgcaacgagatcattgctcagttttacgccaccgtatactggatgactcaggggtcctggtactctgtttcttatcagcagttgtctgagatctggggcttccgtcttcgttctttgctaaaccttgatgaccttcataatcttcaaattcctgccaacacagacttgcttcccctttacactcaaaatgatccaaatgtggtgttgggcaaggtcgacggcctcaagctgtactttgcctacttgaaccggatgtttcaccggtcttttgtgcctaaggatggtgatgctagcagcattaaccatctctctaggaccgtgcttctccggtttgatccccctcctcatcgcttccatgtctatcactttgtgtgggaggagatccgcatggcttcaattcagtacaagaaggggttggtctatgcccctcacattatgcggatgatcgagactgtgactcagctccagtttcgccatgatgtgactcattctcagcttcacttgcgccttcttaaggccccctgctcctcagctgctcgggacataccctcctcttctacccagccgcctcctgctcctgagcgccctgcctctgtggctcgtcgtgagccgtctcccttattccgcattttgcggagtctttttggtctttgctccgaggaggccaaaaagaaccgctga

SEQ ID NO: 13727 - DNA, 1098 bp, Oryza sativa
  Clone ID: TFbOSC401051j.C1.o10.fg
atggtgaacactcgcgccagtggaagtggaaacaataacaatgaagagaacccaactcttgctcaagtgctggctcaacagacccaattgatcaacatgttagtgcaacaaatgcagaaccagcaagggaacaacaatgtcaatcctccgccgccgcagaacaagttagctgattttcttcgtgtgaggccacctaccttctctagcactaccaacccagtagaagcaggtgattggctgcacgctgttgagaagaagttggaattgctccagtgcacggatcaggagaaagttgttttcgcttcacatcagttgcaaggatctgcttcagaatggtgggatcatttccgaatgaacagagcagaaggacaaccaatcacttgggcggagttcactgaagcattcaagaagacacacatacctgcaggtgttgttgctttgaagaagcgtgagttccgggcgcttaagcaaaaggatcgtaccgtgacggaatatcttcatgagttcaatcgtctagctcgctatgctccagaagatgtgcgtactgacgaggaaaggcaggagaagtttttggaaggcttaaaggatgagctgtcagttatgttgatctctcatgactacgaggattttcaggagttggttgataaagcaattcgactggaagacaagaagaacaggatggacaatcgtaagagaggaaggattgttttccaggaggcacaggatagtagccagaggcagcgtatcaagccactccaaattggtgaaccttcttccgctagtcaagggcagtcgcaacagttgaacatcgctggtgagatcaactcagagactaatgcaagcaataaagacaatgatgagcaagctactcagtcagtgtcagttcagcaggatcagtctcaagtgaataacagtaatggaagggagcagcgggtgtgtttcaattgttatgagccaggtcacttcgtaaaagagtgtccgaagccgaagcgtcaacagccacaaggccaagtcaacaacattgtcttcacaggagcgaatgcagtgccggttgtgtcttcaagtgttacagctcagcgaccagtttcaaagcagtag

SEQ ID NO: 13728 - DNA, 5496 bp, Oryza sativa
  Clone ID: TFbOSC401179j.C1.o25.fg
atgaagatgcatttgaagtctattaacccatctatttggagaatagtcgaaaaaggttatgttttgcagaatcccgaagatcccaccaaggaggacgacgagaatgagcacaagaacgctcaagccgccaatgcaatacttagtgccttgagtggaagtgagttcaaccgtgtggatggcattgagagtgccaaaatcctcaaggggcaatttgagagatttgtgatgttggatggtgagagcccaagtgacatgtatgaccggttgagcaagattgtcaatgagatcaagggacttggctccaaggacatgaccgatgaggttgtggtcaagaagatggaagaagaagaagatagccacaagagcaagagcaaggaggagatcgatgatgaagaaatggctctcttcgtcaagaagtttggcaagttcatgaggcgaagcggcttcttcaagggaaattcttccaagcatcactccaacaagtcaagtggaagacattctgcaagagtgtgctacgtgtgcaaagagcccgggcacttcattgcggattgccctcacctcaaggatggttcccacatcaaggaagataagaagaagggtgagaagaaggatgagaagaaggagaagtataagcatagcaagcgggaacattatggccaagctcaccttgggatgattttcggctccgactccgagtcaagctcaagttatgaagaaggagtcgccacattcgccgtcaagccttcatcaccgccaagactcttcgactactcaagtgatgaggatgctcccatttgcctcatggcaaaggagcctaaggtaccttctcctcccaaatcatttaatgttgatcttgttagtgatgaggaggatgaggttgaggatgaggttatggatgacaaattgttcaagtccataactaaggaatctctaccacacttgagtgagttgcttgggagaattgaggaccaatatgcaactcttgagaggcaagaggctttgctcattcatgagaaagagcgatctcatgaactcaagagtgagcttgctaaggagagagagaaaaatgaggctttggcacggctttacaagcaaaccaaagagtctcatgctaatcttgaggtggcgaacgctcaacttcaagagagagtggatggcttggacaaagcatacctctctcttgaagagaagttcgaaaccttaaagaatagtgtctctctccctagcgaaccgtcttgttccaaaattgttccaagcaatgaatcatgtgtgagatgcaaagatattgatattgaagcttgtgctactaactctatttctttgagtgctttgcaaaagcaaaatgagaagcttatgggacttcttcacaatggcctacttaagtgccatatggatagtaaggccctaaaggagtacctaggctatcaaagggacaacttcaaccatgagggtcttgggtatgttcctccaccaaaaggaaaggtggacaagagtatgatgataaagaggccccaaggttttagcaattttgttaaggcaaaaagtatccttcctaatgattctgcttcacattgttcttttgatgcatcttatgttcttaggaagaatgctagtggtcgtgttgttgctaagtatgtaggaccaagggacaaaaatttttccatcaagagagttctttgggtgcctaaggcacttgtcactaacatgagaggacccaaacaagtgtgggaatatctctccggtggaagaagttgggtgatcgatagtggatgcacaaatcacatgaccggagaagaatcaatgttttgctcccttgatcctaatggctcttcgcaagagaacatagtcttcggggacgatggaaagggaaaagtaatgggattggagaatgtctcttactttcgtgttttcggtagtaagtgctacattcttaataagaaggctagatcctcaaagtttgctcctaaagttgatgaggggttcttgcttgggtatgtgtcaaatgaatgcgcataccgcgttttcaacaaaacctccggtattgttgagatcgcgcgtgatgtgacatttgacgaaactaacggctctcaagtagagcaagttgactcacatgtgttaggtgaagaggaggaccctagcgaagcaatcaaaagattggctcttggagacgtgcgtcctagggagccacaacaaggggtctcttcctcaacacaagtggagccacctacatcaacccaagccgacaatccctccacttcaagcttggatcaaggtgaagaaggcgagcaagtgccactctctccgataaatctagctcacccaaaaatccaccaaagtatccaacgagatcaccccaccgacaacatcttaggagacatcaacaagggagtatccactctttgcaaatttttggtggaagaagctcttaatgatccggattgggtgatggcgatgcaagaggagttgaacaatttcacccggaatgaagtgtggactttggtggagcgacctcggcaaaatgtgattagcacaaagtggatcttccgcaataagcaagacgaggccggggtcgtgataaggaacaaggcgaggttagtggcgcaagggttcacccaaatcgaaggattagatttcagtgaaacatttgcgccgatagctagacttgagtcaattcgcatattgcttgcttttgctactaacctcaattttaagctatatcaaatggatgtcaaaagcgccttcctcaacgggcctatcaacgagttggtatacgtggagcaaccaccgggcttcgaggatccaaaatatcccaaccacgtatacaagcttcacaaggcactctacgggcttaagcaagcccctagagcttggtatgagtgtctttgcaatttttttgtgaaaaatggctttgagatcgggaaagccgattcaactctttttactaaaaggcatgataatgatatttttgtgtaccaaatatatgtcgatgacatcatatttggttctactaacaagtcttttagtgaagagtttagtaggatgatgaccaaacgttttgagatgtccatgatgggtgaattaaagttcttcctcggccttcaaatcaagcaactaaaggaaggaaccttcatttgccaaacaaagtatttgaaggacatgctcaagaaatttggaatggagaatgcgaagcaatccacactcccatgccatcaaatggccacctcgacctcaacgagcaaggtaaagacgtcgaccaaaaggcccaatattatgcttagtgtgtgcatatgtgcaagatttcaagccgctccgaaggagtgtcaccttgtggccgtgaagagaattcttagatatttagtgcacacacctaatcttggtctttggtatcctaagggagcgaggtttgatctcattggttatgccgatgcggattatgccgggtgcaaagtggataggaaaagcacatcgggttcttgcaaattcttgggtaggtcccttgtttcttggtcttccaagaagcaaaactccgtcgccctatccaccgccgaagcggaatacgtttcggcggggagttgttgtgctcaacttctttggatgaagcaaaccttgagagactatggcctaaatgtgtccaaaatcccactcttgtgtgacaatgagagcgccattaagttagccaataaccccgtccaacattcccgaaccaaacatatagatattcgccaccatttcttgagagaccattccacaagaggcgacatagatatccaacatgtgagaaccgacaaacaattggcggatatcttcaccaagtctctagatgaagctaggttttgtgagttgagaaggtggtttccctccctcaactccttccaaatcactggttccccagtgattctcttggtggttcttgagtgtatcctcatgatcaggggtcagttcaagaatcaactttactctcgccgtgggtcaatgagttctcaaggtcgctctccctcttccaaggctcgtcatgctatacggcgtatgtccgaatcccgcaaagatgccattgacgcgcaagctcaagcctctgaccaagcagctcaagtggctaatgtggagtgtggtgctcctcttcctcttcgccgcagccgagtcagtggagaaggatcaagtgcacctgctagcaaagtaaggagaggcaatcctacggattcttctgagccgggtcacggtagtggttctcatgcaccatcctttgaggaagagattcagttagaagaggacattgccgctcagcaagctgctcaggaagaagggcctttctttatcactgctccctctagagatcctaattatcatcgaagagtcgtaaggtggaaccgcaagtggactgaagtggagaaagagtgtaagaaagatccctacaaatttcaacagttgtccactgatcctcggttttggaacctttttcagcaggattactatgagatagtgattgcacctaagaagggggctattcttatgcagtgggttgattggaagtatatggaggagttgcatgatccaattattgatgaagtcattgaagcttgtgctcggcaaaacttgaaggaactcatgggcttgcaatacccatgtgtcatatgccaagtttgctgccattttggggtttccggctccaatcgtgtcaagattcatgatgagaagcccatggacacaaattctcttcacttcttgtaccaagatgtggactatgagttaggcaccatcaaaggtctccttcccttctatgcctatctcaataagctcttgcgcaaaactcttaatcccaaggaaggtgatgctagcaacgtccttgcctatacaagaaatttgctttacaagatgaaggctcacccacagctctttgacgcctttgacttcatctttgaagaaatccggcttatctctatgatgcctaagcgaggacttagctatgggccttacattacgaagatgattgagattgtgtccaagaagaagtttcacaaggaggtggcacataccggttaccaagtccgtcccatcaaggctgctgttgtgccggctggacgaaccactcgtgcttcttctcgtgccggtcactccgctaccgtcaccaagccggactccaactcgtccttgaggttcttcaagtccatcttcaacttatgcaagaccatctcagttcggcaagccaaggaacgcagagcaaggaagaaggacactcgacggctcaagaacctccttcgcaacgcccatttgccgtgttctcccgatggttctgaggttgaggacagtggggaggatgtgattgaggacccttttgcagctgaggcaagctcctctcatgcggatcgtggcaaggctcctatggaggaagaagaagaggagaaggaaggtaatctatctcctttcgtgatggctagtcgaatcttgggcttttgtgtcttgttatgtgcaattatctattatccatgctcaaatgtgtga

SEQ ID NO: 13729 - DNA, 2760 bp, Oryza sativa
  Clone ID: TFbOSC401834j.C1.o29.fg
atgaaatgcttctgggtgagtacaggcaagcctatgggcgttcttaatgttgatcagcagaaagaattcgatgaggccactactctctttgtgggatgcattcttagcgtgcttggcgatcgtctggtcaaggtgtatatgcatatgaccgacgctaaggagttgtgggatgcactgaatactaaattcggtgctacggatgctagcaatgatctgtatatcatggagcagtttcataactacaagatggctgacaaccgttctgtagtcgaacaggctcatgagatacaaaccatggttaaggaactcgaactccttaagtgtgtcttacccgacaaatttgtggtcgggtgcattattgcgaaactacctctatcttggagaggtttcggtactgcactcaaccacaagagacaggaatactctgttgaggggttgatagcgtctcttgatgttgaggagaaagctcgggaaaaagatgccgcgtctaaaggcgatggtggccagtccactgccaatgttgtgcacaaggccctgaacaagagcaaggggaaatacaaagctcaacagaccaccaacttcaagaagaagaacaacaacaacaattctaatcaggatgataggacttgctttgtgtgtggtcaacctggccatctggccaggaagtatccacaacgcaaggggatgaaggcacctgcagggcagacctctaagtctgctaatgtgaccattggcaacactggagatggaagcgggtatggttatgagtgcggaggcctgttccgcttttccctttctgatttctgcaataagtctgtgaaccatatttgtggcagtgtggatgatgaggctaatgtttggcactcacgtttatgtcatattaattttggcttgatgtctcagctttccagcatgtgtttaattcctaagttttccattgtcaaaggttctaagtgccatagttgtgtgcaattgaagcaacctcgcaagcctcacaaggctgccgaggagagaaacttggcaccattagaactcctacattcagatctttgtgaaatgaatggggtgttgacgaagggtggaaaacgatatttcatgacgttgattgatgatgctactagattttgctatgtgaacttgttgaaaacgaaagacgaagctctagactattttaaaatttataaggcagaagttgaaaatcaacttgacagaaagataaaaagggttaggtctgatcgtggtggagagtttttctcaaacgagtttgacttattctatgaggaacatggcatcatacatgagaggacgcctccctattctcccgagtctaatgggattactgaaaggaagaaccgcacactgactgacttggtgaatgccgtgttggacacagtgggactacctaaggcatggtggggggaggcattgttgacctcgaatcatatgctaaatagagttcctaacagaaataagaacaaaacaccatatgagatatggattgggagaaaaccatcactttcttacttgcgcacatgggggtgcttggtgaaagtcaatgtacaaataacgaagaagcgcaaacttggacctaagactgtggactgtgtctttctgggatatgctcatcacagcattgcctatagatttttaatagttaaatctgagtggaaggaggctgtccatagtgaaatggattccattatcgctaacggaacttgggaggtaacagaacgaccctatgggtgtaaacctgtggggtgcaaatgggtgttcaaaaagaagctgaggcctgatggtaccattgaaaagtataaggctcggcttgttgctaagggctatactcagaaagaaggcgaaaatttttttgacacttactcacctgttgctagattgaccacaagtcgtgtgctactttccctagcagcctcacatggtcttctcgttcatcaaatggacgttaagacagcttttcttaatggagagctggatgaggagatctatatggatcagcctgatgggtttgtagttgaaggtcaagaaggcaaggtgtgcaaattgttgaagtctttgtatggtctgaaacaaactcctaagaaatggcatgagaaatttgacaaaacattgacatctgcaggctttgcagtcaatgaggcaaataaatgtgtgtactatcgccatggtgggggtgagggagttattctgtgcttgtatgttgatgacatactgatatttgggacaaaccttgaggtgataaatgaggttaaatcattcttgtctcaaaattttgatatgaaggatttgggagtagctgatgttatcctaaacattaagctaattagaggtgagaatgggattactctcttgcagtcccattatgtggagaagatcttgaatcgctttggctacattgatataatggaaggatatagtgattctaactggatctctgatgtggatgagatcaaagccactagtggatatgtcttcacactaggtggtggtgctgtctcatggaggtcttgcaaacagaccattttgacgaggtcaaccatggaagcagagttgacggcactggatactgctaatgttgaggcagaatggctgcgtgatctattaatggatctccctattgttgaaaaaccagtgccggctatccttatgaacagtgacaatcaaacgacatgtgaaaagacgattgaagtctgtcaggaaattgagaaactccggagttataacattgggttacatccaaacagctag

SEQ ID NO: 13730 - DNA, 2073 bp, Oryza sativa
  Clone ID: TFbOSC401856j.C1.o1.fg
atggctggttttgccgatgcactgaggttggataaattcaccggtgtgcactttaagagatggcagatcagggtcactctgtggctgacggctatgaaatgcttctgggtgagtaatggcaaacctgaaggaattcttactgctgatcagcagaagcaattcgaggaagccactactctctttgtgggatgcattcttagcgttcttggcgatcgtctggtcgaggtgtatatgcatatgaccgacgctaaggagttgtgggatgcactgaatactaaattcggtgctactgatgctagcaatgatctgtatatcatggagcagtttcatgactacaagatggctgacaaccgttctgtagtcgaacaggctcatgagatacaaaccatggctaacgaactcgaactccttaagtgtgtcttacccgataaatttgtggccgggtgcattattgcgaaactacctccatcatggagaagtttcggtactgcactcaaacacaagagaccggaatactccgttgaggggttgatagcgtctcttgatgttgaggagaaagctcgggaaaaagacgccgcgtctcagggcgatggtgggcagtccagtgccaatgttgtgcacaaggcccagaacaagagcaaggggaaatacaaagctcaacagaccaccaacttcaagaagcagaagaagaacaacatcaatcctaaccaggatgagaggacttgctttgtgtgtgggcaacctggtcatctggctaggaagtatccacagcgcaaggggatgaaggcacctgcagggcagacttctaagtctgctaatgtgaccattggcaatactggagatggaagcgggtatggttatgagtgcggaggcctgttccgcttttccctttctgatttctgcaataagtctgtgaaccatatttgtggcagtgtggatgatgaggctaatgtttggcactcacgtttatgtcatattaattttggcttgatgtctcggctttccagcatgtgtttaattcctaagttttccattttcaaaggttctaagtgccatagttgtgtgcaatcgaagcaacctcgcatgcctcacaaggctgccgaggagagaaacttggcaccactagaactcctacattcagatctttgtgaaatgaatggggtgttgacgaagggtggaaaacgatatttcatgacgttgattgatgatgctactagattttgctatgtgtacttgttgaaaacgaaagacgaggctctagactattttaaaatttataaggcagaagttgaaaatcaacttgacagaaagataaaatggcttaagtctgatcgtggtggagagtttttctcaaatgagtttgacttattctatgaggaacatggcatcatacatgagaggacgcctccctattctcccgagtctaatgggattgctgaaaggaagaaccgcacattgactgacttggtgaatgccatgttggacacggcgggactacctaaggcatggtggggggaggcattgttgacttcgaatcatgtgttaaacagagttcctaacagaaataaggacaaaacaccatatgagatatggattgggagaaaaccatcactttcttatttgcgcacatgggggtgcttggcgaaagtcaatgtaccaataacgaagaagcgcaaacttggacctaagactgtggactgtgtctttctgggatatgctcatcacagcattgcctatagatttttaatagttaaatccgaggtacctgacatgcatgttggtacaattatggagtctcgtgatgctaccttctttgagagctttttcccaatgaaggatacacatagtagttcgagccaaccctctgaagtaattcccagttcaatcacaccaccagaacaaactgaacatacacatgaacatgtcactgaggaggatgtcagtgaagctcctcgaaggagtaagagacaaagaacggctaagtcctttggtgatgatttcactatgtacctcgtggatgacactcctaagtcaatttcagaagcatatgcatctcctgatgcagactactag

SEQ ID NO: 13731 - DNA, 1314 bp, Oryza sativa
  Clone ID: TFbOSC413011j.C1.o2.fg
atggggaggaagccgagaatagtcgaaaaaggctatgttttgcagaatctcgaagatcccaccaaggaggacgatgagaacgagcacaagaacgctcaagccgctaatgcaatacttagcgccctgagtggaagtgagttcaaccgtgtggatggcattgagagtgcaaaagtgatttgggacacgcttcggaacttgcatgaaggcacggatagtgttcgtgagtccaaggtggagatcctcaaggggcaatttgagagatttgtgatgttggatggtgagagcccaagcggcatgtacgaccggttgagcaagatcgtcaatgagatcaagagacttggctccaaggacatgatcgatgaggttgtggtcaagaagatggttcgagcaatcactccaaggaactctaccttggtgaccatcattcgtgagcgtccggactacaagactctcacacctcatgatttgctcggatgcatccttgcccatgacatgctcgtgcaagagtccaaggatgtcatccaatacatcaaccaaagctcaaccgcaagcatcaagaaggaagacttggctttgaaggcaaaggaagaagaagaagagaaccgcaagagcaagagcaagagcaaggcggagatcgatgatgaagagatggctctcttcgtcaagaagttcggcaagttcatgaggcgaagcggcttcttcaagggacattcttccaagcactactccaacaagtcaagtggaaaacactccacaagagtgtgctacgtgtgcaaagagcccgggcacttcattgcggattgcccccacctcaaggatggttcccacatcaaggaagataagaagaagggtgagaggaaggatgagaagaaggagaagcacaagcatagcaagcaggaacattatggccaagctcaccttgggatgatcttcggctccgactccgagtcaagctcaagtgatgaagaaagagtcgccacgtttgccgtcaagccttcatcaccaccgagactcttcgactactcaagtgatgaggatgctcccatttgcctcatggcaaaggagcctaagatacattctcctctcaagtcatttaatgttgatcttgttagtgatgaggaggatgaggttatggatgacgaattgttcaagtccataactaaggaatccctaccacacttgagtgaattgcttgggagaattgaggaccaatatgcaactcttgagaggcaagaggctttgctcattcgtgagaaagagtgtaggatcgagatgtcgactagagggggggtgaataggcgatttaaaaattaa

SEQ ID NO: 13732 - DNA, 1299 bp, Oryza sativa
  Clone ID: TFbOSC413746j.C1.o6.gm
atggtagtgaggtcttcggggaacacttctggatactcgcagactatggggatatcttccaatttcctcaaattcttctccacggtgaccactggatttccgcctaatctgattcaaggagaccccttgctttgcgctgccgccacgtgctccaccccgccgtcgtcgccggccgagctccatccgcgtcgcgccgccgcctccgtcgtcgccgccggtcgccgtcaccgccgtaaggtgcgccgaggtgtggagaagcccggccgctctctccccgctgtcgccggtcaccggagtcccgtcgccgccgtcgaccgaagccgtgccgccgctagacctcgtcgccggccgtcgtcgttcgtcgtttggttcgagggtgagtaccgttgggttcgtctcgtcgtcctctacgtgtacatgtcctccaaagtcgcagccgaccatccaatctccggcgaggtcgccatcttggtccggccattgatgagtctcacacctctcacaataattatggatgttataactggtaacaatttgcttagctcctggtttggagttagatctgtacagccgggtatggttgcattcccatcattggagaagttcattgatgagtgtgttgttgctttgaagaagcgtgagttccgggcacttaagcaaaaggatcgtaccgtgacggaatatcttcatgagttcaatcgtctagctcgctatgctctagaagatgtgcgtactgacgaggaaaggcaggagaagtttttggaaggcttaaaggatgagctgtcagttatgttgatctcccatgactatgttgattttcagcagctggttgacaaagcaattcgacttgaagacaagaataacaggatggataaccgtaaaaggaaaatgattgtattccaggaggcacaggatagtagccagaggcagcgtatcaagccactccaaattggtgaatctttttctgcaggtcaagaacagtcacaacagttgggcatcagtggtgagatcaactcagagactaatgcaagcaatgaagacaatgatgagcaagctactcaatcagtgtcatttcagcaggatcagtctcaagaagataacagtaatggaagggagcatcgggtgtgtttcaattgttatgagccaggtcacttcgtaaaagagtgtccgaagccgaagcgtcaacagccacaaggccaagtcaacaacattgtcctcacaggagcaaatgcagtgccggttgcgtctcaagggatacagctcagccatcagttccaaagcagcagtagctttctttaa

SEQ ID NO: 13733 - DNA, 4671 bp, Oryza sativa
  Clone ID: TFbOSC414191j.C1.o11.fg
atggctagccgcccccgccgtgcagcccgtgcaccagcccgctttggttttgaagatggtagagttgagccagaagaaaatcatgagtcggctaatgagcagtcacaccacagcaaccgttcgcaccgtactgtttcccgcaacgcagaggttgggcaaccccgccgcagcaaccgctcgcatcgcacagtttcccatgatgcagagatgggacagtctcaccgctctcaccgcactgccagtcacaattctggagaagaacgcctcccttccccacctcatgtggaaaacaacatgcaacacataatggcagttcggaaacaaatcttgcaaggactaaccacagccatagccagttttcagcataatgcgcatggaaatggccaccctcacgtgggcaacaatagatccaagctgacagattttctgaggtcatgtccgccagagttctctcagaccgtcgagcccgtcgaggctgacgattggttgaaagatgttgatagaaaactcaactttgtgcagtgtactcctgttgagaagacactctacgcctctcaccagctaagaggacctgctgcagattggtgggagaattactgcaatgcacaccctgaacccactaacattgcttgggatgagtttgctacggctttccgtgcagctcatgtgcctgaaagcactattgacatgaagaaagaagaattcaacagacttaagcaaggcaacagcagtgtcaatgagtacctaagtcagttcaacaagttagctcggtacgcccctgaagaagtggacacagataagaagaagatcaggaaattcttgaaagggatcgcagttggaatgagactccagttgcttgctcatgatttccccacttttcaacatatgatcaacaaggcacttctacttgaggatgccagaaaagaggctaccgaagaatacaagaaacgcaagtctaaccatcagggaaattcttcccgaggcgcacctcgccctcgctacggtcaacccatgcaatatcaccagtcggtaactcaggctaaccaccagccaggctacgcccctcgtcctcagatgaaccgtccggcacctcagccacagcagcgtgcccctagtggcaatactgcgccaaacagtgttacctctttcaagtcaccacagggaccgtcagcagttcagtgtttccggtgcaacaggatgggacactatgccagacagtgtcctcggaatcctaccaacaccaactcagggcatgctaatggcagcactgccagaactcctgctccagcggcagctcagtctcttcctagctctcaggcaagtggacaaggttctcgtgcgtccaaccactttggtcgaggacgtgtgaatcacattcaagctgaaaccgctcaggatgctccagacgttgtgatgggtatgttctctgtcaactccgtacccgcaatagttctgtttgattcaggagcttctcattctttcatatcgcaagcttttgtgaaaagaaatggttggaaaacccaaaatttgcgtgtaccgatgatagtacattcccctggaaggaatataagggcaactcaaatatgcccggaagttaaccttagaattgaggaagttgacttcctagccaaaccgatagtcctagactcgcaaagcttggacatcattctagggatggattggttggctaagcacaaaggacagatagattgtgccgaaaagtccatcaccttgcaaggacctggaggaaagcaagtccgctttacccctaacacccctaccgcaagtcggtctatcctaacttgtttacaagtcacctccttggagtcggtgcccatagtctgtgaatatcccgacgtatttccggaagaattaacaagaatgccaccagaccgagagatcgagttcgccatagaactggcaccaggcacagctccaattgcaaaaagaccctaccgaatggcagctaatgagttagcagaagttaaaagacaaatcgaagaactggaaagtaaaggttatgtgcgacctagctcatccccttggggagccccagtgcttctggttaagaaaaaggatggctctgagagaatggtaatcgactatagagccctaaatgaagtaactataaagaacaagtacccgttgccacggattgacgatttattcgatcaacttaaaggagcaagagttttctcaaaaattgacttgaggtcaggttaccaccaactgaaaatcagatctgaagatatcccgaagaccgctttctcaacgcgttatggtctatatgagttcacagttatgtccttcggactcaccaatgctccagcattcttcatgaacttaatgaacaaaatctttatggaatgtctggaccagtttgtcgtggtattcatcgatgacatcctgatatactctaagaacgaggaagaacatgctgaacacctgaggttgataatggaaaagctcagggaccatcaactattcgcaaaattctcaaaatgcgaattctggttagaccgagtagcatttcttggacacgtgatctcccccaacggtgtcgaagtagatcccagcaaggttgaagctgtacttgcttggaacccgcccaagaatgtgtcagagattcgcagtttccttggcttagctggatattatcgaagattcattgaaggattctctaagctagccagacctatgaccgagctgttaaagaaggaaaagaaattccaatggtctgtagcctgtgaagacagctttcaagaaatgaagaaaaggttgaccactgccccagttctcaccttgccagatatccgaaaagatttcgagatcttctgtgatgcatcaagacaaggcttaggatgtgtcctaatgcaagaacgaaaggttgtggcctatgcatccaggcagctcaggcctcatgaagttaattatcccacccatgatctcgagttggcagccgtggttcatgctcttaagatctggaggcattatttaatcgggaacagatgtgaagtatacaccgatcacaaaagtcttaagtatatcttcactcagaccgagttaaatatgagacagagaagatggttggaactaatcaaggattacgatcttggaatccactatcatcctggtaaagccaacgtggtcgctgatgcgctaagtcgcaaggcctattgcaatgtagctcaaatacggcctgaccaagatcacctgtgcagagaattggagaagttaagactgaccgtggtacagtcaggtgtccctgccagcttgacagtacaacctaccctagagtcgcaaatccgggaggctcagaaagacgacgaagggataaaagaattaataaaaagaatacaggagaagaaagacacaaatttctccatagacgatcaaggcacagtttggtgcggaccacgcatctgtgtaccggccaagaaggagttaagagatctcatcttaaaggaagctcatgagtccgcctactccattcacccaggaagtacgaagatgtaccaagatatcaaggcatacttctggtgggctagaatgaagcgagacgtcgcagaatacgtagccctgtgtgacatttgccaaagagtcaaggcggaacatcagaggccagctggtctgctgcaacccctaccgattcccgagtggaaatgggaagagatcggaatggatttcatcaccggtttgccaagaacccccagcgggtacgactccatctgggtaatcgtggaccgactcacgaagtcagctcatttcgtgccagtgaaaaccacctatgatggaaagaaactagcagaactctacatgactcatgtcgtatgtagatttggctgtcccaagaaaatagtgtcggaccgaggcactcagttcacctcaagtacagcctaccatccgcagaccgatggtcagaccgaaagggtaaaccaaatcctagaagacatgctacgtgcgtgtgccttggatttcgaaggcacttgggatcgttgtttgccgtatgctgagttctcatacaacaacagttatcaggccagcattcagatgtcgccgaatgaggcaatgttcggaagaaagtgccgcacccccttgtgctgggatgaggtgggcgaagccctggtattcggtcctgacatactcaagtcagcagaagaacaagttaagctgatccgagaacgtttaaagacagcgcagaaccgtcagaaaaattacgctgacaatcggagacgtgaccttgagttcgaaaagggagatcatgtgtacctgcgagtatcacccctccgtggtatgagaaggtttgggatgtccggcaagttagcaccccgctacatcggcccctacctcataaccgccagacgtggcgaagtggcttatcagcttgagctacctgaaggtctcgcagacgtgcacaacgtgttccacgtatcccagttaaagaaatgtcttcgagttccagaagagcaagttcccctgggtaatatcgagctggaaaagaatctgacctacaaggaaagaccgatcaaggttcttgaagaggcagaacgtcagactcgaaggaagaccatcaagttctacaaagtccaatggagcaatcattccgaagacgaggcaacctgggagcgagaagatcttctccgcgccgagttcccggacctactcccttag

SEQ ID NO: 13734 - DNA, 779 bp, Oryza sativa
  Clone ID: TFbOSC8289j.C1.o1.fg
aatggtgggatcatttccggatgaacagagcagaacgacaaccaatcacttgggaagagtttaccgaaggattcaagaagacacacgtacctgtaggagttgttgctttgaagaagcgtgagtttagggctttgaagcaaaaggatcgtaccgtggcagagtatcttcatgagttcaatcgtctggctcgctatgctccagaagatgtgcgtactgacgaggaaaggcaagagaaattcttggaaggtccgaaggatgaactgtcagttatgttgatctctcatgactatgaggattttcaggagttggttgataaagcaattcgactggaagacaagaagaacaagatggataaccgtaaaaggaaaatgactgtatcccaggaggcacaaggtagtagccagaggcagcgtatcaagccactccaaattggtgaatctttttctgcaggtcaagaacagtcacaacagttgggcatcagtggtgagatcaactcagagactaatgcaagcaatgaagacaatgatgagcaagctactcaatcagtgtcatttcagcaggatcagtctcaagaagataacagtaatggaagggagcatcgggtgtgtttcaattgttatgagccaggtcacttcgtaaaagagtgtccgaagccgaagcgtcaacagccacaaggccaagtcaacaacattgtcctcacaggagcaaatgcagtgccggttgcgtctcaagggatacagctcagccatcagttccaaagcagcagtagctttctttaa

SEQ ID NO: 13735 - DNA, 4923 bp, Oryza sativa
  Clone ID: TFbOSC900097j.C1.o17.fg
atgaagatgcatttgaagtctattaacccatatatttggagaatagtcgaaaaaggctatgttttgcaaaatcccgaagatcccaccaaggaggacgacgagaacgagcacaagaacgctcaagccgctaatgcaatacttagcgccttgagtggaagtgagttcaaccgtgtggatggcattgagagtgccaaagtgatttgggacacgcttcggaacttgcatgaaggcacggatagtgttcgtgagtccaaggggcaatttgagagatttgtgatgttagatggtgagagcccaagcgacatgtatgaccggttgagcaagatcgtcaatgagatcaagggacttggctccaaggacatgaccgatgaggttgtggtcaagaagatgcgtccggactacaagactctcacacctcatgatttgcttggacgcatccttgcctatgacatgctcgtgcaagagtccaaggatgtcatccaatacatcaaccaaagctcaaccgcaagcatcaagaaggaagacttggctttgaaggcaaaggaagaagaagaagagaaccgcaagagcaagagcaaggcggagattgatgatgaagagatggctctcttcgtcaagaagttcggcaagttcaagaggcgaagcggcttcttcaagggaggatcttccaagcactactccaacaagtcaagtggaagacactccgcaagagtgtgctacgtttgcaaagagcctgggcacttcattgcggattgcccccacctcaaggatggttcccacatcaaggaagataagaagaagagtgagaagaaggatgagaagaaggagaagcacaagcatagcaagagggaacattatggccaagctcaccttgggatgatcttcggcttcaactccgagtcaagctcaagtgatgaagaaggagtcgccacgtttgccgtcaagccttcatcaccaccgagactcttcgactactcaagtgatgaggatgctcccgtttgcctcatggcaaaggagcctaaggtaccttctcctcacaagtcatttaatgttgatcttgttagtgatgaggaggatgaggttgaggatgaggttatggatgatgaattgttcaagtccataactaaggaatccctaccacacttgagtgagttgcttgggagaattgaggaccaatatgcaactcttaagaggcaagagactttgctcattcgtgagaaagagcggtctcataaactcaagagtgagcttgctaaggagagagagaaaaatgaggcattggtacggctttacaagcaaaccaaagagtctcatgctaatcttgaggtggcgaacgctcaacttcaagagagagtggatggcttggacaaagcatacctcactcttgaagagaagttcgaaaccttaaaaaatagtgtctctctccctagcgagccatcttgttccaaaattgtcccaagcaatgaaccatgtgtgagatgcaaagatattgatattgaagcttgtgctactaactctatttccttgagtactttgcaaaagcaaaatgagaagcttatgggactccttcacaatggcctacttaagtgccatatgggtagtaaggccctaaaggactacctaggctatcaaagggacaacttcaaccatgagggtcttgggtatattcctccaccaaaaggaaaggtggacaaaagtgtgatgatcaagaggccccaaggtcttagcaattttgttaaggccaaaagtatccttcctaatgattatgcttcacattgttcttttgatgcatcttatattcttaggaagaatactagtggtcgtgttgttgctaagtatgtaggcccaaggggcaagaatatttctatcaagagagtactttgggtgcctaaggcacttgttactaacatgagaggacccaagcaagaatatgtctccggtggaagaagttgggtgattgatagtggatgcacaaatcacatgaccggagaagaatcaatgttttcaactcttgatccaaatggcacttcacaagataacatagttttcggggacgatggaaagggaaaggttatgggattgggtaagattgcaatctctaatgatctttccattgccaatgttctcttggtaaaatctctaaactacaatcttttgtccgtttctcaattatgttctatgggttacaattgtctttttaccgatgttggtgtgaccgtctatagaaggaatgattcctcggtagtctttgagggtgtcctcaagggaaagctttaccttgtggatttttcctcaagtacagccaaacatgagacatgcatagtggctaagtccaacacggggtggctttggcatcggaggctagcccatgttggtatgaggaatcttcacaagattctaaagcacgatcacatccttggactaacaaatgttcaatttgagaaagatagggtgtgtagcgcatgtcaagccggcaaacaaattggagcacatcaccccgtcaagaatgtgatgaccactacaagaccattggagcttctccacatggacatcttcagaccaattgcttatctaagcattggaggtaacaaatatggtcttgttattgttgatgacttttcacgcttcacgtgggtgttctttttgcatgacaagagtgagatacaagctatcttcaagaagtttgcaagaagagcacaaaacgagttcgacctcaagatcatgaacattcgaagcgacaacggcaaggagtttaagaacacgtgcatcgagagtttccttgatgaagaaggtatcaagcacgagttctcggctccatattcacctcaacaaaatggagtagccgagaggaagaataggactctcattaagatggcgaggaccatgttggatgagtacaagacatcggaccgtttttgggccgaagccgtcaacaccgcatgccatgccatcaaccgcctttatcttcaccgccttcttaagaagattccctatgagctttttactggtaacaaaccaaatgtctcttactttcatgttttcggtagtaagtgttacattcttaataggaaggctagatcctctaagttcgctcctaaagtggatgagggattcttgcttgggtatgggtcaaatgaatgcgcataccgcgttttcaacaaatcctccggtattgttgagatcgcgcgtgatgtgacatttgacgaaactaatggttctcaagtagagcaagttgactcacatgtgttaggtgaagaggaggatccgagcgaagcaatcaaaagattggctcttggggacgtacgtcctagggagccacaacaaggagcctcttcctcaacacaagtggagccacctacatcaacccaaaccgacgatccctctatctcaagcttggatcaaggtgaagaaggcgagcaagtgccaccctcaccgatcaagttagctcgcccaagaatccaccaaagtatccaaagagatcatcccaccgacaacatcttagagacatcaacaagggtggaacaagctcttaatgatccggattgggtgatggcgatgcaagaggagttgaacaatttcacccggaatgaagtgtggactttggtggagcgacctcggcaaaatgtgattggcacaaagtggatcttccgcaacaagcaagacgaggccggggtcataataaggaacaaggtgaggttagtggcgcaagggttcacccaaatcgaaggattagatttcggtgaaacttttgcgccggtagctagacttgagtcgattcgcatattgcttgcttttgctactaacctcaattttaagctatatcaaatggatgtcaaaagcgccttcctcaacgggcctatcaacgagttggtatacgtggaggaaccaccgggcttcgaggatccgaagtatcccaaccacgtgtacaagctccacgaggcactctacgggcttaagcaagcccctagagcttggtatgagtgtcttcgcaattttcttgtgaaaaacggctttgaaatcgggaaagccgattcaaccctttttactaaaagacatgataatgatatttttgtgtgccaaatatatgtcgatgacattatatttggttctactaacaagtcttttagtgaagagtttagtaggatgatgaccaaacgttttgagatgttcatgatgggtgaattgaagttcttcctcggccttcaaatcaagcaactcaaggaaggaactttcatttgccaaacaaagtatttgaaggacatgcttaagaagtttgggatggagaacgccaagccaatccacactcccatgccatcaaatagccacctcaacctcaacgcgcaaggtaaagacgtcgatcaaaaggtataccgttctatcattggctcacttctttacctttgtgcatctaggcccgatattatgcttagtgtgtgcatgtgtgcaagatttcaagccgctccgaaggagtgtcaccttgtggccgtgaagagaattcttagatatttagtgcacacacctaaccttggtctttggtatcctaagggagcgaggtttgatctcattggctatgccgatgcggattatgccgggtgcaaagtggataggaaaagcacatcgggtacttgccaattcttgggtaggtcccttgtttcttggtcttccaagaagcaaaactctgtcgccctatccaccgccgaagtggaatatgttttggcggggagttgttgtgctcaacttctttggatgaagcaaaccttgagagactatggcctcaatgtatccaaaatcccactcctatgtgacaatgagagcgccattaagatagccaacaaccccgttcaacactcccgaaccaaacatatcgatattcgccaccattttttgagagatcattccacaagaggcgacatagacatctaa

SEQ ID NO: 13736 - DNA, 1002 bp, Oryza sativa
  Clone ID: TFbOSC900176j.C1.o10.fg
atggtgaacactcgcactagtggaagtggaaacaataacaatgaagagaacccaacccttgctcaagtgctggctcaacagacccaattgatcaacatgttagtgcaacaaatgcagaaccagcaagggaacaacaatgtcaatcctccgccgccgcagaacaagttagctgattttcttcgtgtgaagccacctactttttctagcactaccaacccagtggaagcaggtgattggctgcacgctgttgagaagaagttggaactgctccagtgtacggatcaggagaaagttgttttcgcttcacatcagttgcaaggacgtgcttcagaatggtgggatcatttccggatgaacagagcagaaggacaaccaatcacttgggcggagttcactgaagcattcaagaagacgcacatacctacaggagttgtttctttgaagaagcgtgagttccgggcacttaagcaaaaggatcgtacagtgacggaatatcttcatgagttcaatcgtctagctcgctatgctccagaagatgtgcgtactgacgaggaaaggcaggagaagtttttggaaggcttaaaggatgagctgtcagttatgttgatctctcatgactatgaggattttcaggagttggttgataaagcaattcgactggaagacaagaagaacaggatggacaatcgacagtcacaacagttgggcatcagtggtgagattaactcagagactaatgcaagcaatgaaggcaatgatgagcaagctactcaatcagtgtcatttcagcaggatcagtctcaagaagataacagtaatggaagggagcagcgggtgtgtttcaattgttatgagccaggtcacttcgtaaaagagtgtccgaagccgaagcgtcaacagccacaaggccaagtcaacaacattgtcctcacaggagcaaatgcagtgccggttgtgtcttcaagtgttacaactcagccactagtatcaaagcagcagtag

SEQ ID NO: 13737 - DNA, 2700 bp, Oryza sativa
  Clone ID: TFbOSC900258j.C1.o16.fg
atggctggttttgccgatgcactgaggttggataaattcaccggtgtgcactttaagagatggcagatcagggtcactctgtggctgacggctatgaaatgcttctgggtgagtaatggcaaacctgaaggaattcttactgctgatcagcagaagcaattcgaggaagccactactctctttgtgggatgcattcttagcgttcttggcgatcgtctggtcgaggtgtatatgcatatgaccgacgctaaggagttgtgggatgcactgaatactaaattcggtgctactgatgctagcaatgatctgtatatcatggagcagtttcatgactacaagatggctgacaaccgttctgtagtcgaacaggctcatgagatacaaaccatggctaacgaactcgaactccttaagtgtgtcttacccgataaatttgtggccgggtgcattattgcgaaactacctccatcatggagaagtttcggtactgcactcaaacacaagagaccggaatactccgttgaggggttgatagcgtctcttgatgttgaggagaaagctcgggaaaaagacgccgcgtctcagggcgatggtgggcagtccagtgccaatgttgtgcacaaggcccagaacaagagcaaggggaaatacaaagctcaacagaccaccaacttcaagaagcagaagaagaacaacatcaatcctaaccaggatgagaggacttgctttgtgtgtgggcaacctggtcatctggctaggaagtatccacagcgcaaggggatgaaggcacctgcagggcagacttctaagtctgctaatgtgaccattggcaatactggagatggaagcgggtatggttctaagtgccatagttgtgtgcaatcgaagcaacctcgcatgcctcacaaggctgccgaggagagaaacttggcaccactagaactcctacattcagatctttgtgaaatgaatggggtgttgacgaagggtggaaaacgatatttcatgacgttgattgatgatgctactagattttgctatgtgtacttgttgaaaacgaaagacgaggctctagactattttaaaatttataaggcagaagttgaaaatcaacttgacagaaagataaaatggcttaagtctgatcgtggtggagagtttttctcaaatgagtttgacttattctatgaggaacatggcatcatacatgagaggacgcctccctattctcccgagtctaatgggattgctgaaaggaagaaccgcacattgactgacttggtgaatgccatgttggacacggcgggactacctaaggcatggtggggggaggcattgttgacttcgaatcatgtgttaaacagagttcctaacagaaataaggacaaaacaccatatgagatatggattgggagaaaaccatcactttcttatttgcgcacatgggggtgcttggcgaaagtcaatgtaccaataacgaagaagcgcaaacttggacctaagactgtggactgtgtctttctgggatatgctcatcacagcattgcctatagatttttaatagttaaatccgaggtacctgacatgcatgttggtacaattatggagtctcgtgatgctaccttctttgagagctttttcccaatgaaggatacacatagtagttcgagccaaccctctgaagtaattcccagttcaatcacaccaccagaacaaactgaacatacacatgaacatgtcactgaggaggatgtcagtgaagctcctcgaaggacctcacatggtcttctcgttcatcaaatggacgttaagacagcttttcttaatggagagctggatgaggagatctatatgcatcaacctgatgggtttgtagttgaaggtcaagaagacaaagtgtgcaaattgttgaagtctttgtatggtctgaaacaagctcctaagcaatggcatgagaaatttgacaaaacattgacatctgcaggctttgcagtcaatgaggcagataaatgtgtgtactatcgccatggtgggggtgagggagttattctgtgcttgtatgttgatgacatactgatatttaggacaaaccttgaggtgataaatgaagttaagtcattcttgtctcaaaattttgatatgaaggatttgggagtagctgatgttatcttaaacattaagctaattagaggagatgatcactggcgtgcgcttgagcgagtaatgcgctatctgaaaggtagtatggaattggggcttcactatactgggtatcctgcggtgctggagggttatagtgattctaactggatctctgatgtggatgagatcaaagagaccattttgatgaggtcaaccatggaagcaaaactaacggcactggatactactactgttgaggcagaatggctgcgtgatctattaatggatctgcctattgttgaaaagccggtgccggctatccttatgaactgtgacaatcaaacggtaattgtcaaagtgaatagttctaaggataatatgaaatcgtctagacatgtgaaaagacgattgaagtctatcaggaaattgagaaactccggaattataacgttggattacatccaaacagctagaaacctggcagatcccttcacgaagggactatcacgaaatgtgatagataatgcatcgaaggagatgggtttgagacccatgtga

SEQ ID NO: 13738 - DNA, 1689 bp, Oryza sativa
  Clone ID: TFbOSC900363j.C1.o1.fg
atgaagatgcatttgaagtctattaacccatctatttggagaatagtcgaaaaaggctatgttttgcagaatcccgaagatcccaccaaggaggacgacgagaacgagcacaagaacgttcaagccgctaatgcaatacttagcgccttgagtggaagtgagttcaaccgtgtggatggcattgagagtgccaaagtgatttgggacacgcttcggaacttgcatgaaggcacggatagtgttcgtgagtccaaggtggagatcctcaagggcccaagcgacatgtacgaccggttgagcaagatcgtcaatgagatcaagggacttggctccaaggacatgaccgatgaggttgtggtcaagaagatggttcgagcaatcactccaaggaactctaacttggtgaccatcattcgtgagcgtccggactacaagactctcacacctcacgatttgctcggacgcatctttgcccatgacatgctcgtacaagagtccaaggatgtcatccaatacatcaaccaaagctcaaccgcaagcatcaagaaggaagacttggctttgaaggcaaaggaagaagaagaagagaaccgcaagagcaagagcaaggcggagatcgatgatgaagagatggctctcttcgtcaagaaattcggcaagttcatgaggcgaagcggcttcttcaagggaggattttccaagcactactccaacaagtcaagtggaagacactctgcaagagtgtgctacgtgtgcaaagagcccgggcacttcatcgcggattgcccccacctcaaggatggttcccacatcaaggaagataagaagaagagtgagaagaaggatgagaagaaggagaagcacaagcatagcaagagggaacattatggccaatctcaccttgggatgatctttggctccgactccgagtcaagctcaagtgatgaagaaggagtcgccacgttcgccgtcaagccttcatcaccaccgagactctttgactactcaagtgatgaggatgctccggtttgcctcatggcaaaggagcctaaggtaccttctcctcttaagtcatttaatgttgatcttgttagtgatgaggaggatgaggttgaggatgagattatggatgacgaattgttcaagtccataactaaggaatccctaccacacttgagtgagttgcttgggagaattgaggaccaatatgcaattcttgagaggcaagagactttgctcattcgtgagaaagagcggtctcatgaactcaagagtgagcttgttaaggagagagagaaaaatgaggcattggtacggctttacaagcaaaccaaagagtctcatgctaatcttgatgtggcgaacgctcaacttcaagagagagtggatggcttggacaaagcatacctcactcttgaagaaaagttcgaaaccttaaagaatagtgtctctctccctagcgagccatcttgttccaaaattgtcccaagcaatgaaccatgtgtgagatgcaaagatattgatattaacgcttgtgctactaactctattgccttgagtggtttgcaaaagcaaaatgagaagcttacgggactccttcacaatggcctacttaagtgctatatgggtagtaaggccctaaatgtcgcgaccgggaaaattgcattttcccgaacgctagtgtattaa

SEQ ID NO: 13739 - DNA, 3810 bp, Oryza sativa
  Clone ID: TFbOSC900412j.C1.o1.fg
atgtcgggccaagcgggggatgggaacgatggtgataagggagctaagatcccttatgactatccctctacatctacatcttatgtgagtacctatagcggcaaagctccgtacttcaatggtacggactatgccgcttggaagcataagatgaagatgcatttgaagtctattaacccatctatttggagaatagtcaaaaaaggctatgttttgcagaatcccgaagatcccaccaaggaggacgacgagaacgagcacaagaacgctcaagccgctaatgcaatacttagcgccttgagtggaagtgagttcaaccgtgtggatggcattgagagtgccaaagtgatttgggacacgcttcggaacttgcatgaaggcacggatagtgttcgtgagtccaaggtggagatcctcaaggggcaatttgagagatctgtgatgttagatggtgagagcccaagcgacatgtacgaccggttgagcaagatcatcaatgagatcaagggacttggctccaaggacatgaccgatgaggttgtggaactctaccttgagcgtccggactacaagactctcacacctcatgatttgctcggatgcatccttgcccttgacatgctcgtgcaagagtccaaggatgtcatccaatacatcaaccaaagctcaaccgcaagcatcaagaaggaagacttagctttgaaggcaaaggaagaagaagaagagaatcgcaagagcaagagcaaggcggagatcgatgatgaagagatggctcccttcgtcaagaagttcggcaagttcatgaggcgaagcggcttcttcaagggaggatcttccaagcactactccaacaagtcaagtggaagacactccgcaagagtgtgctacgtgtgcaaagagcccgggcacttcattgcggattgcccccacctcaaggatggttcccacatcaaggaagataagaagaaggatgagaagaaggagaagcacaagcatagcaagagggaacattatggccaagctcaccttgggatgatcttcggctccgactccgagtcaagctcaagtgatgaagaaggagtcgccacgtttgccgtcaagccctcatcaccaccgagactcttcgactactcaagtgatgaggatgctccggtttgtctcatggcaaaggagcctaaggtaccttctcttcttaagtcatttaatgttgatcttgttagtgatgaggaggatgaggttgaggatgaggttatagatgacgaattgttcaagtccataactaaggaatccctaccacacttgagtgagttgcttgagagaattgaggaccaatatgcaactcttgagaggcaagagactttgctcattcgtgagaaagagcggtctcatgaactcaagagtgagcttgctaaggagagagagaaaaatgaggcattggaatatgtctccggtggaagaagttgggtaattgatagtggatgcacaaatcacatgaccagagaagaatcaatgttttcaactcttgatccaaatggcacttcacaagataacatagttttcggggacgatggaaagggaaaggttatgggattgggtaagattgcaatttctaatgatctttccattgccaacattctcttggtaaaatctctaaactacaatcttttgtccgtttctcaattatgttctatgggttataattgtctttttaccgatgttgatgtgaccgtctatagaaggaatgattcctcggtagtctttaagggtgtcctcaagggaaagctttaccttgtggatttttcctcaagtaaagccaaacatgagacatgcttagtggctaagtccaacacggggtggctttggcatcagaggctagcccatgttggtatgaggaatcttcacaagcttctaaagcacgatcacatccttggactaacaaatgttcaatttgagaaagatagggtgtgtagcgcatgtcaagccggcaaacaaattggagcacatcaccccgtcaagaatgtgatgaccactacaagaccattggtgcttctccacatggacctcttcggaccaattgcttatctaagcattggaggtaacaaatatggtcttgttattgttgatgacttttcacgcttcacgtgggtgttctttttgcatgacaagagtgagacacaagctatcttcaagaagtttgcaagaagagcacaaaacgagttcgacctcaagatcaagaacattcgaagtgacaacagcaaggagtttaagaacacgtgcatcgagagtttccttgatgaagaaggcatcaagcacgagttctcggctgcatattcacctcaacaaaatggagtagctgagaggaagaataggactctcaatgagatggcgaggaccatgttggatgagtacaagacatcggacaatttttgggccgaagccgtcaacaccgcatgccataccatcaactgcctttatcttcaccgccttcttaagaagactccctatgagcttcttaccggtaataaaccaaatgtctcttactttcgtgttttcggtagtaagtgttacattcttaataagaaggctagatcctctaagttcgctcctaaagtggatgagggattcttgcttgggtatgggtcaaatgaatgcgcataccgcgttttcaacaaaacctctagtattgttgagattgcgcgtgatgtgacatttgacaaaattaatggctctcaagtatccgagcgaagcaatcaaaagattggctcttggggacgtgaagaaggcgagcaagtgccaccctcaccgatcaacttagctcgcccaagaatccaccaaagtatccaaagagatcatcctaccgacaacatcttaggagacatcaacaagggagtatccactcgttctcgtattgcaaatttttgtgagcattactcgtttgtgtcttctcttgaacctctaagggtggaagaagctcttaatgatccggattgggtgatagcgatgcaagaggagttgaacaatttcacccggaatgaagtgtggactttggtggagcgacctcggcaaaatgtgattggcacaaagtggatcttctgcaacaagcaagacgaggccggggtcgtaataaggaacaaggcgaggttagtggcgcaagggttcacccaaatcgaaggattagatttcggtcaaacttttgcgccggtggctagacttgagtcgattcgcatattgcttgcttttgctactaacctcaattttaagctatatcaaatggatgtcaaaagcgccttcctcaacgggcctatcaacgagttggtatacgtggagcaaccaccgggcttcgaggatccgaagtatcccaaccacgtgtacaagctccacaaggcactatacgggcttaagcaagcccctagagcttggtatgagtgtcttcgcaattttcttgtgaaaagaggctttaaaatcgggaaagccgattcaaccctttttactaaaagacataataatgatatttttgtgtgccaaatatatgtcgatgacattatatttggttctactaacaagtcttttagtgaagagtttagtaggatgatgaccaaacgttttgagatgtccatgatgggtgaattgaagttcttcctcggccttcaaattaagcaactcaaggaaggaactttcatttgccaatcaaagtatttgaagaacatgcttaagaagtttgggatggagaacgccaagccaatccacactcccatgccatcaaatggccacctcgacctcaacgagcaaggtaaagacgtcgatcaaaag

SEQ ID NO: 13740 - DNA, 2434 bp, Oryza sativa
  Clone ID: TFbOSC400171j.C1.o2.np
atggctgatttcccccctattcaccgtgctgagctcgcaaatatgacattggttgccggctacattgaagcttcagagtacacagttattgagcccctcagtggagagttgctgcatagagttcgcttggaagttcatggtagtttgggcacccctctggttaatatggtggttgagacttctagaggaacaatagagcatgcttgccaggaagccgtatatttggtgatgaccaggatttgagagaagtttgttttcatcttcgatggaattgcttaccgttatcatccaagctgttcagcaggaggcattgctagtagtttcagttcagcttcaagtgagaatgatactacttttggtcgcatgaggactgtgatgagagcgcttgacaagatgcaccaggatcttcaccgagcctcagagacgttgaacgacaagaagcttattcaaatagctcgtttgcaagatgaggttgatcgtctcaaggtcgagagcgcaatgctccaaggtcgtccagcaccaagaagagccaaaatccggacaatgtcgaggaagaggtctacagctcccattcgcatgcagttggcgtcccgccccagtcgatgtcctagccgtcgatcccgttcccgtcccagttcgcgcgtcttcgcagttgccgatgctctccgccgccaaagccgcaacagttagtgatgcagtgaagtggatcgtgtcaatctctagtagcagcagttcgagtggtgatggtaactgtttttctccttccctatttctcttctcgtcttctgcttcagatggtgaacacaaggactacccgttctggaaacaatgtcaatgaggaacagctgttaggaaatggttcaggagatatatcagagaatcctccgcttgcctagacaatagcaagacagactcagataatgacaaccatgataaatcagatgcaacaacagtatcatcagatgatgcaacatatgatgcagcaacagtagcagaaccagcagcacaatggtccccctcagtccaagttgccaaagttttgatgtgtccgtccgctgactttctcgagcacaagtaacccaatggaggcttacgattggttgtacgccattgagaagaaacttaatctacttaagtgcactgatcaggagaaggttgcgtttgccacacatcagttgcaaggtctagctttagcttggtgggataattaaatgattacctattcagccggaatagaagttacttggatgagttttgtcgtgttttcaggaaagcccaggttcccgatggaattgttgcatagaagaagcgagagtttaggtctctacatcaaggaaacatgactgttactgagtatctgcatgagtttaatcgtctagcacgttatgcccctgaggatgtgcgaaccgatgctgagagatgggaaaagttcttggcaggtttgtatgatgagttgactaacgagttgatttctagagattatgctgattttcagagaattgtggacaaagccattcgtcaggaagactagcgtaacaaaatggatcgcaagaggaaagctatacagttcaggagtcagcaagatggacaatagaagctccgctacggtccttgacagcacaatggtccaactactatgattgttcgacagcacaggccgtatcagccaggaaatttcagccaaggcaatagtggaaatcagaacaaccgtaatcccgttccgcgcccgccaatgaaacagtctcaagcttcgcagccccaacagccgaaggagttaggaggaaagcccctcacatgtttcaactgcggagatcccggacattttgcaggtaagtgtcctaaacgaaagcgcaatggacccaagattgttcaagctcgtgttaatcacgtgtctacggaagaagctcaagcagcgctggaagtggttttgggtacgttccctgcgaactcaattcctgctatagtttttttttttctggtgctacgtattcatttatatccaagagatttgttggggtacacgggttaagaaaagtggaacttagttctcccatgaaagttaatacaccgggaaatagctcaacattagttagtttttgtccctctacgatgatagaaatccaagtgtcaccttttctagccaatcttatccttgtggagtgcaaagacctagatgtcatactgggaatggattggttgacaaaacacaacggagtcattgattgtgcaagccgcacagttacgttagttaatggaaaaggagaagtggtagtgatgcagtctccattaactcagaagaaaggagtaagtttgaatcaagtggaaagtgaacaccaggtccctttattaactaaaaatgttcaaattttacactacaaaccttatggcactaagtactatcatacatgtaccatttccttacccatgccccact

SEQ ID NO: 13741 - DNA, 1980 bp, Oryza sativa
  Clone ID: TFbOSC400368j.C1.o20.gm
atgagaccagactactccatcccgctcgccagcgtgcaccggcgatcgggagagcaggtctccggaacctctgccttcgacgtcctgcaccgggagaaggcggcaataaggcactgtgattttactatggctggttttgccgatgcactgaggctggataaattcaccggtgtgcattttaagagatggcagatcagggtcactctgtggctgatagctatgaaatgcttctgggtgagtactggcaaacctgaaggagttcttactgctgaacagcagaagcaattcgaggaagccactactctctttgtgcgatgcattcttagcgttcttggcgatcgtctggtcgaggtgtatatgcatatgaccgacactaaggagttgtggaatgcactgaatactaaattcggtgctactgatgctagcaatgatctgtatatcatggagcagtttcatgactacaagatggctgacaaccgttctgtagtcgaacagactcatgagatacaaacaatggctaaggaactcgaactccttaagtgtgtcttacccgacaaatttgtagccgggtgcattattgcgaaactacctacatcttggagaagtttcggtactgcactcaaacacaagagacaggaatactctgttgaggggttgatagtgtctcttgatgttgaggagaaagctcgggaaaaagatgccgcgtctaagggcgatggtgggcagtccagtgctaatgttgtgcacaaggcccagaacaagagtaaggggaaatacaaagctcagcagaccaccaacttcaagaatcagaagaagaacaacaacaatcttaatcaggatgagaggacttgctttgtgtgtggccaagttagtcatctggctaggaagtgtccacagcgcaaggggatgaaggcatctgcagggcagacttctaagtctgctaatgtgaccattggcaacactagagatggaagcgggtatggtaatttacctactgtcgcacggggttccaccgtcctaatggggaatgggtcacatgcttctgttcatggtgttggcacggtagatctgaagtttacttcgagaaagatcgtgcagctgaagaacgtgcagcatgtcccttctatcgacaggaatcttgttagtggctcccgtctgactagagacggatttaagttggtttttgagtctaataaagtagtcgtgtctaaacatggatattttattggtaaaggttatgagtgcggaggcctgttccgcttttccctttctgatttctgcaataagtctgtgaaccatatttgtggcagtgtggatgatgaggctaatgtttggcactcacactactggaaggaggctgtccgtagtgaaatggattccattatcgctaacgggacttgggaggtgacagagcgaccctatgggtgtaaacctgtggggtgcaagtgggtgttcaagaagaagcttaggcctgacgactactccatcccgctcaccggcgtgcaccggcgatcgggagagcaggtctccggaacctctgccttcgacgtcttgcaccgggagaaggcggcaataagagtaggaggtgagcggcaagagatgatggggatggaggggatcggcgaagggattggcacagcggcggatgaggaggacgtcggcgccggtggcggcggaaagtcagctccggccatggcggatggggccgaggtcggaaccggccgcggcggctccggcggcggggaagaagcagcggctccggcgtcggggatgcgacggcagtccacgtggggaagaagcaccagctccggcggcagggcagaatcagcagctccggcggcggcaatccacgcggggaggatctctagcgaggatgcggcggcacgacggcagaacatgcgaggaggaggaggagaagcaaaataccaactcgatctggatcttgtgttcataaccggccactgggagtgggaacagtga

SEQ ID NO: 13742 - DNA, 375 bp, Oryza sativa
  Clone ID: TFbOSC400628j.C1.o2.np
tgtaaaaaagttatggtttgttacaactgcaaagaaccacgacattactccagggactgtccctaaccaaggaaaaaaaatcggcctccacattttcgccaatttacaagaagcagacatgccaatcgccaagtgttcactggagcaaatgcagtacctgtttctctgaaaggcagtaggcccaaggacctcattgccccagaagcacccacaacatccggagtgaagagtacttggttgagaaagttgacaccaagggtatgaattatgagaagtcctcgaactgaaaccccgtcttcaagtaccgcaccccagtcgaagtcagctcaaggtgcaaccaaggataagtcaggtgaaaagaagattccatctgca

SEQ ID NO: 13743 - DNA, 2970 bp, Oryza sativa
  Clone ID: TFbOSC401122j.C1.o81.fg
atgtatgccgctgccgcacctggagatggcacgctgggagccggatatggcgctgcgaacgacaacaccaacggaggcagttctgcctcacaatccagcggagggacattcacagggtataacttctcatttggatatgaaagtaaaaatgataagagtcacatttatattgagaacatggagatcatgaagagccgccagagccgcaaccggtcagaccgagccgacggcggtctgaccgagccgtggacgctagtgtggcacttgatcatcctcggcaagcatcctagacttgttactcttggaggttgccgcctcctagacggcttgtgtaggtgttgcccggtgacctctccgaggagattgtggtggaagcccggcgccgtttggaaggacatgtgggatgcacttgaggccaagttcggagttcccgacgccggcaatgagctgtatgtcatggaacagtactatgactacaagatggtcaatgaccgttctgtagtagaacaagctcatgagattcagatgctggctaaggaacttgagaacaacaactgtgagttgccggacaagtttgtggcgggtggcattattgccaaattgccaccttcttggtcggactttggcacttctctaaagcacaagagacaagagttcagtgtttctgatctcattggctctttgggtgttgaagagaaggcgagggcaaaggacattgggggcataaaggttgagagaggttctagtgccaatatggtacagaagaagaaccctcatgcatcccacaacaacaagaaagtcaagcctgatgtcaaagccaaggctacagccaattttaagaagaaaggtaaggaaaaggcaaatggagactgttttgtgtgtggcaagtttgggcattgggccaaggattgtcttgagcacaaagacaggaagtttgccaacatggtcattagcgagggcggaggaacatcggggtacgataaattattacctacagttctctctgtttttcattcacctgattggtgggttgatactggtgctaatattcatgtcgggagaggttcctccttgttgatgggaaacgagtcacttgcggttgttcatggtgttggactttccaaggaatggtggggtgaggcagttttgactgcgtgtcatgtcctgaataaaattccaatgaagcataaagaagtaacaccattcgaggaatgggaaaggaagaaattaaatctctcatacctacgaacatggggctgtttggcaaaggtaaatgtacctatagccaaaaagcgtaaacttggaccgaatactgttgattgtgtgttccttggttatgctgctattcacagcgtgggttatagattcttaatagtaaactctagagtactcgacatgcgtgttagtacaattattgagtctagagatgctacattctttgagaatgaatttcccatgaaaaatacacctagcacttctagtcaagaaactgtcataccccataagcactttgcactgatagaacacaatgatcaaacgcctgagggaaatcctgaggaggataacattgtagatactcataagagtaagaaactaagggttgtaaaatcctttgtagatgactacattgtatacctcgtggatgacactccaagaaccatagaagaggcatattcacctcctgacactgactactggaaggaagcagtacgcagtgagatggactcaattatgtctaatggtacttgggaagtcgttgagcgtccatatgggtgcaagcctgtaggatgcaaatgggttttcaagaaaaagcttaggcctgatggtacaattgaaaagtacaaggcaagccttgtggccaagggttatacccaaaaagaaggcgaggattttttcgacacctactcaccagttgcccgtttgaccacgattcgagtactacttgctctggcagcctctcatggtcttctcgtccatcagatggacgttaagacagctttcctaaacggagagttggaggaggagatctatatggatcaaccagacggcctcaatgtgattgaggaggtcaaggactttttgtccaagagttttgaaatgaaggatttgggagaggctgatgttattcttaacattaagctattgagaggagatgagggtgggattacacttgtgcaatcccactatgtggacaaggttttgagtcgctttggatatagtgactgcaagccagctcctactccttatgatcccagcgtgctattaaggaaaaaccgaagaatagcaagggatcaactgagatactcccaaatcattggttcattgatgtacttggtaagtgcaacgaggcctgacatctcatttgctgtaagcaagctgagccggtttgtctcaaatccgggagatgatcattggcaggctctggaaagaataatgcgctatctaaagggcactatgagctatggaattcactataccgggtacccaaaagtactggaaaggtatagtgactcaaactggatatctgatgctgatgagataaaagccataagtggatatatgttcacacttggaggtggcgctggttcctggaagtcttgcaagcagaccatcttaacgaggtcaacaatggaagcagaacttacagcactagatattgcaacagttgaggccgagtggcttcgtgaactcctgatggatttgccggtggttgaaaaaccagtgccagctatcctaatgaactgtgataatcaaacagtgattattaaagtgaacagttcaaaggacaacatgaagtcatctaggcatatcaagagaagactgaaatctgtcagaaagcagaaaaactccggagtgatagcattggactatgtccaaacggctaaaaatctggcagatcagtttaccaaggggctaccacgtaatgtgatagacagtgcatcgagggaaatgggcttgataccgacctaa

SEQ ID NO: 13744 - DNA, 1272 bp, Oryza sativa
  Clone ID: TFbOSC401126j.C1.o53.fg
atgtcaggtgaagaaggtgcaggtgccactgctcatcgacaccaaagatatgacgataaagacgaagagcaatctgttgctgatgatgaggaggaagatgagagtgttggaaatagaagacgacgtcgaattagggacaaagatgatcctttatctaaggtaaaatttactatgccttcttttgatgaaacatactatcaagagatgatgattgctttgtcacgatgtaatttgcaagaaactgaggatgctagaatttctaggttctatggaggtcttaatagagagattcgggatattcttgaatataaagaatacaataccatgaatagattattccattttgcttgcaaagctgaaagagaagtgcagggacgcaacaagcataggagttcttttgcaggtgctacttccacacgacagtcaacaccacgtcaatctactactgctgttcgtccacctacctccacgccatcccatgctcaagaaacaagcaaaaacgcttcagttcagactccagccaagagtgcaacttcagtagattccactagacgtacacgtgatattacatgtcataggtgccatggcattggacacattgcccgcgactgtccaaatcggcgagctctatttgtgaatgctgatggtgagtatacttctgctagcgattatgatgatgaatatgctttagctgccactgaccacgcaggtggacaagataatgatgacatcgaggaagtccaattgcatccagagtcgctagatcagtatcctagcctaattgtcaagctagcacttagtgctaaagagaagtgtgaagagcaaaaccaacgtcacaatttgttccaaagcaaagttcttgtgaaaggccataccgtcaaaatgattattgatagcgggagttgcaacaatttagcaagtgaagagatggtcaagaagcttggcttgactacccatccacatccacatccgtatcatattcagtggtttaatacatgtggtaagatgaaggaatatgaggatgtttttcacgatgagatacctccaaggatggccaatggacgagagagtgcacacaatcaagaagatgggattgagtcgaggacgactccaattctagaagaggaggatgatgaggacatcacttcgttggatacgctcataacttcacacactccaatgataattccaagtccaagtccagttcggcctccagagacagcactgacttcaaacggacctagcgccttcatgccaactcgatttgggtga

SEQ ID NO: 13745 - DNA, 5070 bp, Oryza sativa
  Clone ID: TFbOSC401435j.C1.o51.gm
atgacgaagatcggagatagctcgccaccgaagatcggagaaggctcgagctcgggtgccgccgagcgcgtcatggccaactccagcgtcgtggagctcccgctattgacaaggaccaactaccacgagtggtctttggtgatgcaggtgagcttggaggcgttggagcagtgggacgcggtggaggcggtgagcaaggaccggggcaaggatcggcgcgcgctggccacgatcatccgcgccgttccaagggagatgaaggccgggctcgccgtgaagaagtcggcgaaggaggcgtgggacgtagtgaagaagatgcacgctggcgacgaccgcgtgaaggctacgagtgtccaacgtctcatgaagcagttcgagaacatggcgttccgtgacggagagaacgtcggcgacttcgcaatgcgcatcaacgggctcgtcgccagcctgcgcgagcttggtgaggagatggaggacagtcgcgtcgtgaagaaagttctgcgcgtggtccccaagaggctgaagcaagtcgcggtggcgattgagatgctcgccgacatcgacaccatggagatcgaggagctcgtcggccggttgcaggtggcagaggacgcggacgctgaggatcaagcggcgtctagcgcggagcacgctgggcaactcctgctcacggaggagcaatgggaggcgaggcggcgtcaacgccgtggcaaggaacatgcccacggcggcgttggcgagaagggcggcggccacgacgacgacgacgacgatggcagtagcacaagctcggggcgcggtaagaaacgctaccgaggcaagtgcttcgactgcggcgtgcgcggtcacatggcgcgggactgcccgaagaagaagaaggagagagcgctgctcgtcgacgtcgacgacgagccgacactgctggggagattgttaggaataaacgcgttgtcatggccgtgcctgcgttttgccacggcgcggcagtggcgcatggcgtcaggccaagtcctggcggttgagcgcatgcaggagcacgccatgcgagaaggatggaggcccgttcatgtggaggagtatgtggctcacgaacgcgtgaaaccaggtcgtccaggctgccatgcgtacgtgcgcgtgaagctcgctaagtgggtgcgtgggcgctgcgtcgccgtgggagcgataggctccgcggcgttcgtcgccgaaactccactgttcatcttcaacctccagccattcttgcatgggatggaagcgccggcgaacgtaggtgtcgccatgccaccaccgaagcaggtcatggcggagccgttgcccttgacgacgccacagaggaagtcgtggccgagggcgatgcgggagaagtcgaggcccttgagcaagctcagccccggccactcccagcacgtcgggtcgtgggcgtcggagaggccgcaaacgaccacccagcgcatggcggcgtggctgccgttgggcgccatgaggccgcacaagatgttggtgccagcggcgatggccgcgcgctcgtccaccgccgccgccgcgctccactcctgctctgccgcagccgacgccctgctccactctgccagcctccttcctcgccatctccgccgcgaccgacaccgccccgctaaggagcatgctttgagggagaatatgacaaagatcttttgtctgtgccgtcattgcaagaatcagaaattgttggtagatcctggtgaaatattgggtcacataatggagtacggattcaccgccaactacaaggtttggacctatcacggggaattcgccaatccggaagatgacgatgaagagttaagtttcgagatgagtgaggcagagaattttataatcgaagacatgtcgcgtgaaagaatggttgtcgatgtttccaccgatagtgatgatttcgatggtggttttgatttagaggatatgctacgccatgttgaaccagagggtaagcgcgggaagattccttcaatggtgatgtggtacctaccaattaaggaccgcctgaagcgtctgtactcaaacccgactgatgctgagttgatgagatggcatcaagagagccggaaaatagatggtatgattcgacatcccgccgacgctcgccagtggaagacatttgatgcaaaacacccagaatttgctaaggatcctaggaatgtaaggtttgcgttgagcactgatggaatgaacccgtttgtggagaatgacactgccccagtagcaagaggtggtacatacgtgtatgagataacaaagaagattaaggttgtatatggaaagggaaagaagaagacagtaaagaggaagaaagctgatggtgacaacggtactgcgtcgcctttcaagaagcactcaattttctttaaatacttagattactggaaggacctagagattcgacatgcaattgatgttatgcacctcgagaagaacgtgtttgatagcaccgttggcacattgctggacatcccgagtccgcttcagacatttgccgtcgagactgtatgccagcttgagatgtatttcccaccatcatttttagatatgatggagcatttgatcgttcacatcgtccctcagattattgaacttggtccattatacttacatcagatgtgggcctatgagcgttacatgtcgatcctcaaaggctatgtacgcaatcgcgctcacccggaaggatcaatgatagagggatacacaactgaagaggcagtcgagtgttgtatggactacataaaggatgctaatgccattggcattcctgttcatcgacatgaaggtagattgtctggaaggggtactgttggtaggaagcagttcttcgataatgattacaaaaaggtgtccgcggcacacaacagcgttcttcaacagctcgctatcgttgagccattcattgagcgacacctagaagaaatcaaagcctgcttcccagggcggtccaatgattggatatcaagagagcacaagcgtcgctttcctctgtggttgaaagatctaaacttgccagttggtgattctgtggaggaacttactttacaaagattggcatgtgggccttcaagtattgtcaattcatggcaaggttacgacatcaatggatttaccttgagtacgactacgaaggacatgaaaagcaccacacaaaacagtgggatccgtgtcgaagcgattgacacgagtggagaaaagaggtcgtattatgggaccattcaagaaatatgggaactggactatggcctaaacatccagatccctgtgctccgttgtgaatgggttaaagacacaataggggtttccgttgatgactacgggctaacgatagtcaatcacagtaaaacaagccacaaggatgatccatgggttttagcagagcgtgtggctcaagtgttttatgtgaaggacccttcagatgaaagaaaaactattgtcatatccggaaagcaacagatcgtcggcatcgacaacatcgaagaccccaatgattacaaccagttcgacgatgtaccattgtttactgatcttcctatgcgaattaagaaggttgagagaacaatcgatgaagcaaatatgtcgtacgttcgagcagatggtgttgccaaggctgccaaaatttcccaagtcgccgtcgccgtcgtccccgccaccgccggctcctccccaaagtcgccccgccaccgccggctcctccccgaagtcgccccgcccctcgccgtcgccgacgccactgccaggaccgttgccctcgccgtcgccgtcgccgccgccaggtggccgtcgccgccgcacggacctctcccccctcgccgttgccatcgccgccgccaggtcgtcgccgccgccaggtcgtccccgccgtcgctaggcgggagtgggaaaaaaagacgtggtgagagaagcaagaataaattacccaaggaaacttacaacgtgattgctctcgatcaggatgggaagcccatcgagccaccgatagtgcggtccaagttcagcaacgcctgtggcactctagtcaggacgcgttgtcccattaatgtcaagttgtgggaaacagtggacgacaacatcaagacacttctctggaatgagttgcagaagtattttgtgttccctcctggatcagaggctgactgggacacgtttgttgcggatcgtacaacagctgaagcattggctttgaggaaaaaaatgtccgagctcgcgaagaagaacagatatccccatagattggggtcgagcggatacgctggtcatgtcgatcaatggcgggagatcgagcaaagatttgccgcggccggtaagcccctgctggtagaccccatggttgaacgtagcaagaactgggtcgccaaggtccatagcgaccacgtttccttggaactagacatacctgcacctgaggggattgaacttctcggtgatgcagtgaatcagtttatcttgtggcaccgcagagacataatcctgagcgcggccgttcttgcagcaggatctttaaccccatcctcatcgcaggcaatgactgctgccgctcctgcaccaccgtcgcctcctgaaccaccgtcacctcgacatctgccgtcaccaccaccgcttaggaattctgagaagagaaaagaacttgctcacgtcttgtcagactcccagaagtcagtactagcggcccaagatgaagtgcaatcctggttatctgccgatgtgcctaaaacttatgagtatggcaagccattcttgccaacttatcttatgaacaagctaccatgggaaatgagggtaatgcacgaatgtatgcaattccacgaagctgatagaactggagcaaaggttggatacgtcgatccaacaagaatatgcaaaacacaacacaccgtagagctgagacaggactgcgagcaattggttggcaagaccccggaagaaaaggaagaatatgtgaagacattgcacaagaggaagaagctagaagtagcaacatacttggcaatagcaatgttggcgcacgccgacaaagatgtcttaatggtcccctaccagttcacgtaa

SEQ ID NO: 13746 - DNA, 2304 bp, Oryza sativa
  Clone ID: TFbOSC419986j.C1.o9.fg
atgtcaggtacaagttccgacgaaccaacactggagaatctagcgcataaactgaagggcatggaaaattggtatgaagagttgatgcgtaatagtaaatcatacaaggaaagcacagataaacatttaaaaaccttaagtgaaagcctggtgaaagtagtggatcaaattgagcaaatgaatcgatcacataaacaattaactgaaaacattcagaatataaatattggacatgaaaatattgtgcgacgcattggtttacttgaggctgtaggtgaagaaggtgtaggtgccactgctcatcgacaccaaagatatgatgatgaagatgaagagcaatctgttgctgatgatgaggaggaagacgagagtgttggaaatagaagacgatgtcgaattagggacaaagatgatcctttatctaaggtaaaatttactatgccttcttttgatggtaagtttgaaccttctgtttatctagactgggagctagctgttgagcaaaaattctcttgctatgattttcctgataataagaaagttaaagctgccagtagtgaatttacctcctttgcatctctatggtggaatgatatatgtggtagaggacttagacctagaacctgggatgatatgaaacgtacaatgaggtctagatttgttccttcttactatgctcgtgacatgttaaataaactgcaacttttaagacaaggttccaattctgtagaaacatactatcaagagatgatgattgctttgtcacgatgtaatttgcaagaaactgaggatgctagaatttctaggttctatggaggtcttaatagagagattcgggatattcttgaatataaagaatacaataccatgaatagattattccattttgcttgcaaagctgaaagagaagtgcagggacgcaacaagcataggagttctcttgcaggtgctacttccacacgacagtcaacaccacgtcaatctactactgttgttcgtccacctacctccacgccatcccatgctcaagaaacaagcaaaaacgcttcagttcagactccagccaagagtgcaacttcagtagattccactggacgtacacgtgatattacatgtcataggtgccatggcattggacatattgcccgcgactgtccaaatcggcgagctctatttgtgaatgctgatggtgagtatacttctgctagtgattgtgatgatgaatatgctttagctgccactgaccacgcaggaggacaagatgatgaggacatcgaggaagtccatttgcatccagagtccctagatcagtatcctagcctaattgtcaagctagcacttagtgctaaagagaagtgtgaagagcaaaaccaacgtcacaatttgttccaaagcaaagttcttgtgaaaggccataccgtcaaaatgattattgatagtgggagttgcaacaatttagcaagtgaagagatggtcaagaagcttggcttgactacccatccacatccacatccgtatcatattcagtggtttcatacatgtggtaagatgaaggtaacccgcttggttaaaatacctttttctataggctcctaccatgatcaaattgaatgtgatgttgtacatatgcaagcttgttctgttattttggggcgaccatggcaatatgatagagaagttgtttttgatggtaggactaatacatataaatttatgttcgatggtaaaagagttgttttgcattctatgactccagccgctgctttgaaagatgatcttgcaagacttgaatgtgaaaagaaagcgaaaagtgaaaatcagattattgctaaacatcctgcttcaactagtaaaatagaaccaagtaccacaaagaatgaaattaagttgaagggtgctttgttggcttctaaatataatatttgtgcactagatgagccagattcttgttgctatgctctattttgcaaagatcctatactcacattggctactgctcctagtactttatattctttgccacccgctattactaaccttttgcaggaatatgaggatgtttttcacgatgagatacctccaaggatggccaatggacgagagagtgcacataatcaagaagatgggattgagtcgaggacgactccaattcaagaaggggaggatgatgaggacatcacttcgtcggatatgctcataacttcacacgctccaatgataattccaagtccaagtccagctcggcctccggagacagcactgacttcaaacggacctagcgccttcatgccaactccgatttga

SEQ ID NO: 13747 - DNA, 380 bp, Oryza sativa
  Clone ID: TFbOSC102121j.C1.o11.np
atgaagagaatagcggaaagtaaactgaacataaagaaagtgaatctgagttgcttgttcgtgggagctattcccagttatgaaccaagtgatatgttcgaagatagtctacagacgggtaacttgtatgaggttgactccaaagatatgaactatgcgaagttctggaactgaagccccatcttcaagtgccgcaacccagtcgaagtcagctaaaggttcaaccctggttcgagtcaggtgaaaagaagattccacctgcaacaggagatcgagccaagcagtccagagtggagaagctttgttaggcaagtttgttatagaaagcggagcggaagaagtcagacaagaagagaagaccgcccaacctatcttcatgc

SEQ ID NO: 13748 - DNA, 168 bp, Oryza sativa
  Clone ID: TFbOSC26158j.C1.o1.np
atggctctgataccagcttgtcgcgaccgggaaaattgccttttcccgaacgctagtgtattaatccccgtcccaggaaaagccggggtacaccatacaaacatgatataaaagacacatctttattatatcgataatatttacattattacaaaggcacttaaggcc

SEQ ID NO: 13749 - DNA, 4626 bp, Oryza sativa
  Clone ID: TFbOSC400455j.C1.o1.fg
atggacattgttagatccaacgatcgaaaacgatttggtatcgtgaggtaccagtacttcgagaaggaaaatcgggtgggttttgagatggctggagtattcgcctccatggctatcgaatgggcgatcgacaagctctattccttgctgccagcatgtctggtatcaacacctgcatcgtcatcgtcttccgcagcgccagctgaaagcgaggaccttgaggttctgaagaggcttgagagaacaatgcacaggatccatgcgacactgcacgatgcagaggaacagtggaacatcagggaggaaacagccaagctgcggctcaaggaactgaagaaggtggcctacgacgcggaggacgtggtggatgagtacgggtacgagatgacacgccataaagtggaggcatttgagcaatctgcaagggctaatcgcagcggcaagcgcaggcgcgaagagatgcagccttcttttgcagttttgttttgctgcaaattcggattcgtttttgttttggaaacgttccgaaaaatccgatctaatgatgcgttcatgctagttttcatctgtaatgtcatgatttatttatggaatagattaaatcattatatgtctataatctcaacaatccaaaaaccttattataggcactgtgattttactatggctggttttgctgatgcactgaggccggataaattcaccggtgtgcattttaagagatggcagatcagggtcactctgtggctgacagctatgaaatgcttctgggtgagtactggcaaacctgtaggagttcttactgctgaacagcagaagcaattcgaggaagccactactctctttgtgggatgcattcttagcgttcttggcgatcgtctggtcgaggtgtatatgcatatgaccgacgctaaggagttgtgggatgcactgaatactaaattcggtgctactgatgctagcaatgatctgtatatcatggagcagtttcatgactacaaaatggctgacaaccgttctgtagtcgaacaggctcatgagatacaaaccatggctaaggaactcgaactccttaagtgtgtcttacccgacaaatttgtggccgggtgcattattgcaaaactacctccatcttggaggagtttcggtactgcattcaaatacaagagacaggaatactccgttgaggggttgattgcgtctcttgatgttgaggagaaagctcgggaaaaagatgccgcgtctaagggcgatggtgggcagtccagtgccaatgttgtgcacaaggcccagaacaagagcaaggggaaatacaaagctcagcagaccaccaacttcaagaagcagaagaagaacaacaacaatcctaatcaggatgagaggacttgctttgtgtgtggccaagttcgtcatctggctaggaagtgtccacagcgcaaggggatgaaggcacctgcagggcagacttctaagtctgctaatgtgaccattggcaacactggagatggaagcgggtatggtaatttacctactgttttttcagttaatcaatctactaatttgtgggttgatactggggccaatgtacatgtttgtgctgacatctcattgttttcttcttatcaggtcgcacggggttccaccgtcctaatggggaatgggtcacatgcttctgttcatggtgttggcacggtagatctgaagtttacttcgggaaagatcgtgcagctgaagaacgtgcagcatgtcccttctatcgacaggaatcttgttagtggctcccgtttgactagagacggatttaagttggtttttgagtctaataaagtagtcgtgtctaaacatggatattttattggtaaaggttatgagtgcggaggcctgttccgcttttccctttctgatttctgcaataagtccgtgaaccatatttgtggcagtgtggatgatgaggctaatgtttggcattcacgtttatgtcatattaattttggcttgatgtctcggctttccagcatgtgtttaattcctaagttttccattgtcaaaggttctaagtgccatagttgtgtgcaattgaagcaacctcgcaagcctcacaaggctgccgaggagagaaacttggcaccactagaactcctacattcagatctttgtgaaatgaatggggtgttgacgaagggtggaaaacgatatttcatgacattgattgatgatgctactagattttgctatgtgtacttgttgaaaacgaaagacgaggctctagactattttaaaatttataaggcagaagttgaaaatcaacttgacagaaagataaaaaggcttaggtctgatcgtggtggagagtttttctcgaacgagtttgacttattctgtgaggaacatggcatcatacatgagaggacgcctccctattctcccgagtctaatgggattgctgaaaggaagaaccgcacactgactgacttggtgaatgccatgttggacaccgcgggactgcctaaggcatggtggggggaggcattgttgacctcaaatcatgtgttaaacagagttcctaacagaaataaagacaaaacaccatatgagatatggattggtagaaaaccatcactttcttatttgcgcacatgggggtgcttggcgaaagtcaatgtaccaataacgaagaagcgcaaacttggacctaagactgtggactgtgtttttctgggatatgctcatcatagcattgcctatagatttttaatagttaaatccgaggtaccggacatgcatgttggtacaattatggagtctcgtgatgctaccttctttgagagctttttcccaatgaaggatacacatagtggttcgaaccaaccctctgaaataattcccagttcaatcacaccaccagaacaaactgaacatacacatgaacttgtctctgaggaggatgtcagtgaagctcctcgaaggagtaagagacaaaggacggttaagtcttttggtgatgatttcactgtgtacctcgtggatgacactcctaagtcaatttcagaagcatatgcatctcctgatgcagactactggaaggaggctgtccgtagtgaaatggattccattatcgctaacgggacttgggaggtgacagagcgaccctatgggtgtaaacctgtggggtgcaagtgggtgttcaagaagaagcttaggcctgacggtactattgaaaagtataaggctcggcttgttgctaagggctatactcagaaagaaggcgaagatttctttgacacttactcacctgttgctagattgaccacaattcgtgtgctactttcccttgcagcctcacatggtcttctcgttcatcaaatggacgttaagacagcttttcttaatggagagctggatgaggagatctatatggatcaacctgatgggtttgtagttgaaggtcaagaaggcaaagtgtgtaaattgttgaagtctttgtatggtctgaaacaagctcctaagcaatggcatgagaaatttgacaaaacattgacatctgcaggctttgcagtcaatgaggcagataaatgtatgtactatcgccatggtgggggtgagggagttattttgtgcttgtatgttgacgacatactgatatttgggacaaaccttgaggtgataaatgaggttaaatcattcttgtctcaaaattttgatatgaaagatttgggagtagctgatgttatcttaaacattaagctaattagaggtgagaatgggattacactcttgcagtcccattatgtggagaagatcttgaatcgctttggctacattgatagtaagccttctccaacatcttatgatcctagcttgttgcttcgcaagaacaagagaattgctaggaatcaactagaatactcccaaatcattggctcgttgatgtacctggctagtgcaactaggcctgatatctcctttgctgtgagcaagttgagccgatttacctctaatccgggagatgatcactggcgtgcgcttgagcgagtaatgcgctatctgaaaggtactgtggaattagggcttcactatactgggtatcctgcggtactggagggttatagtgattctaactggatctctgatgtggatgagatcaaagccactagtggatatgttttcacactgggtggtggtgctgtttcatggaggtcttgcaaacagaccattttgacgaggtcaaccatggaagcagagctaacggcactggatactgctactgttgaggcagaatggctgcgtgatctattaatggatctgcctgttgttgaaaaaccggtgccggctatccttatgaactgtgacaatcaaacgacatgtgaaaagacgattgaagtctgtcaggaaattaagaaactccagagttataacgttggattacatccaaacagcgagaaacctggcagatcccttcacgaagggactatcacgaaatgtgataaacaatgcatcgaaggagatgggtttgagacccatagcattcttgaaagaactaacctttgtgagcttgactgttggtcgcagtctatgaagattttgggtgaatcttctaggaagcttactaaagacctaggagtatga

SEQ ID NO: 13750 - DNA, 4569 bp, Oryza sativa
  Clone ID: TFbOSC401054j.C1.o38.fg
atgtcatggcacagggccggtgtcctgctgctaggggctcagtcctgcctgcctgtcccgggtgtcccggccgtaggtgggattgggtcggtactcttgtctatggctaggatgggttggaaactatgtcacgtcttccgtctgtataccgtggtgccgcgccctcggttatgggcaagccgagcaatgtacccaaattccggcaatggtccgccaccacttcccgagaatccgacccttgcccaagttatggcacatcagactcagatgatggcagccatgatacagcagatgcagcagcagcaccagcagatgcaccagaggatgatgcagcacgtcgaacagcagcaccagcagtttggtccccctccccctcagtccaagttgccagagtttctacgcgtcaggccacccaccttctccagcaccaccaaccccatggaggcgaatgactggctccatgccatagagaagaagctgaatctcctgcagtgcaatgatcaggagaaagtcgctttcgccacacaccagcttcagggtcccgcgtcagcttggtgggacaatcacatggccacccgcccaccaggtactgaagtcacatgggcagagttctgccgtagcttaaggaaggcgcaggtgccagacggggtcgtggcacaaaagaagagggaattccgggcactccatcagggcaacaggactgtgacacagtacctccacgagttcaatcgcctcgcgcgatatgcaccagaggatgtccgcaccgacgccgagaagcaggagaagttcatggcgggtctggatgatgagctgaccaaccaactgatatccggggactacgctgactttgagaggctggttgacaaggcaatccgccaggaggatcaacgcaacaagatggacaggaagaggaaggccgcacagttcagggcacctcagggaagtcaccagaggccgcgcttcgctcctgggcagcagggtggacctaccaccatgatcgttcgtcagcaccgcccgttcaaccctagcaactttccccagggcgccagtggcagtcagaaccaccatggaggtcagtccaaccgcggtgcagcttcacgcccaccaatggcaccggcacagtcaggccagcccgcgcaagccaagaaggagactggagcaaaaccagggtcctgcttcaactgtggcaagcttggccacttcgctgacaaatgcccgaagcctaggcgtgccgggccaaggtttatccaggctcgtgtcaaccacgcatctgcggaggaggcacaagcagcaccagaggtcgtactgggtacgtttcctgttaactcaatccctgcaacagtactttttgattctggtgcaacgcattctttcatttcaaagaaatttgtcgggatgcatgggttaataagagaggaacttagcacaccaatgcgggttcataccccagggaatagctccacttcggttcaattcagcccttctataacaatagaaattcaaagatcaccatttctagccaacctcattcttctcgaatccaaagacctagatgtcattcttgggatggattggctgaccaagtttaagggggtcatcgattgtgcaaatcgcacagtcaccttgaccaacgagaagggagaaaccgtggtgtacaaatctctagtctcgccaaagaaaggggtctctttgaatcagattgaagcggaaatcccagtggacaccgtagagaagaactcgagaaaattggaagatatacccatagtctgcgagtatccagaagtgttccccgaagacctcactaccatgccacccaagagagagattgaattccggattgacttggcaccgggaactgctccaatctataagagaccgtacaggatggcggccaacgaactagcagaggtcaagaagcaggttgataagcagctgcagaaagggtacattcgaccaagtacttcaccttggggtgctccggtcatttttgtggagaaaaaggataagacgaagaggatgtgcgttgattaccgcgcactcaacgagttgagaattcgggaagaggatattccgaagacggccttcaccactcggtacgggctatatgagtgcacggttatgtctttcggacttaccaacgcacccgcattcttcatgaatctgatgaacaaagtgttcatggaatttctggacaagtttgttgtggtgttcatcgacgacattcttatctattcaaagtccgaagaagaacatgaacaacatctccgtctggtactcgagaagttgagggagcaccagctatacgccaagttcagcaagtgtgacttctggttgacggaagtcaaatttctgggccatgtcattacagctcagggtgtggcagtcgacccatcgaacgtggagtcagttaccaaatggaccccaccgaagaccgtgtcgcagattcgaagttttcttggacttgcaggttattaccgtcgattcatcgaaaatttctccagaatcgcccgacccatgactcagttgcttaagaaggatgagaagtttaaatggacagccgagtgcgataagagcttcgaggagctcaagaagaaattagtatccgcaccagttttgattctgcccgacccgatgaaagacttccaagtctattgtgatgcatcccgtcacggacttggatgtgtcctaatgcaagaggacagagtggttgcgtatgcctcgcggcagttgcgtccacacgaagggaattatccaactcatgacttggaattggcagcagtggttcatgctttgaagatctggaggcactatctgattggcaaccgctgcgaagtatatacggaccataagagtctgaaatacatcttcacccaaccggacctaaatctccgacaacgaagatggttggaactaatcaaagactatgacatgagtattcactaccacccgggtaaagccaatgtggtggcagacgctttaagccggaaaagttactgcactgccctatgcatcgagggcatgtgtgaggaattgcggcaggagtttgagcatctcaacgtgggaattgttgaactcgggttcgtagccgctctggaggcacggcctacgctcgtggatcaagtcagagcagctcaagcaaatgattctgaaatagcagagctgaaaaagaacatgagagtcggaaaagcccgggatttccacgaagatgagcatggcacaatctggttgggagaaagattgtgtgtacctgacgacaaggaactgaaggatctgatactcaccgaggctcatcagacccagtactccattcacccaggcagcactaaaatgtatcaagacctcaaagaaaagttttggtgggtcagcatgaggagagaaatagctgaattcgtcgcactctgcgatgtttgccaacgagtgaaggcagagcaccaaagaccagcaggtttactccaacctcttcaaatcccggaatggaaatgggaggagattggaatggactttataacaggactgccccggacatcatcgggtcacgatttgatctgggtagtcgtggatcgactcactaaggttgctcacttcataccagtacataccacatatacgggcaaaaggttggcggagctttacctttcgagaatcatgtgcctacatggagtacccaaaaagattgtatctgaccgagggagtcagttcacctcaaaattctggcagaagctacaggaagaactggggacccgtttaaatttcagcacggcctatcacccgcaaactgatggtcagaccgagcgagtcaatcaaatcttggaagatatgttgagagcttgtgctcttgattttggtggagcttgggacaaaagcttgccatatgcggaattctcgtacaacaacagctaccaggccagtctacagatggcaccgtttgaagctttatacggccggaagtgccgcacacctctcttctgggatcagacaggcgaacgtcaactgttcggaacagaagtattagcggaagcagaagagaaagtcagaatcatcagggaaagattgaggattgctcagtctcgacagaagagctacgcggataaccgtcgaagggagctcacttttgaggcaggagattacgtgtatcttcgtgtcactccgctccggggagtacaccggtttcagacgaaaggcaagttggcaccacgcttcgtgggaccatacaaaatcttggaacgaaggggagaagttgcttatcagttagaacttccatccaatatgatcggcatccatgacgtgttccatgtgtcccaattaaagaagtgcttaagggtacctgaagaacaggctgattcgaagcacattgatatccaggaggacctaacatatgtggagaagccggttcgtatacttgataccagcgaaagaagaactagaaataaggtcaccaggttttgccgagttcagtggagtcatcattcagaagaggaagcaacctgggaaagggaagatgagttgaaagccgcccatccgcacctcttcaccagctcctccgaatctcggggccgagattccgtttaa

SEQ ID NO: 13751 - DNA, 3252 bp, Oryza sativa
  Clone ID: TFbOSC900367j.C1.o21.fg
atggctggttttgccgatgcactgaggccggataaattcaccggtgtgcattttaagagatggcagatcagggtcactctgtggctgacagctatgaaatgcttctgggtgagtactggcaaacctgaaggagttcttactgctgaacagcagaagcaattcgaggaagccactactctctttgtgggatgcattcttagcgttcttggcgatcgtctggtcgagtttcatgactacaagatggctgacaaccgttctgtagtcgaacaggctcatgagatacaaaccatggctaaggaactcgaactccttaaatgtgtcttacccgacaaatttgtggccgggtgcattattgcaaaactacctccatcttggagaagtttcggtactgcactcaaacacaagagacaggaatactccgttgaggggttgatagcgtctcttgatgttgaggagaaagctcgggaaaaagatgccgcgtctaagggcgatggtgggcagtccagtgccaatgttgtgcacaaggcccagaacaagagcaaggggaaatacaaagctcagcagaccaccaacttcaagaagcagaagaagaacaacaacaatcctaatcaggatgagaggacttgctttgtgtgtggccaagttggtcatctggataggaagtgtccacagcgcaaggggatgaaggcacctgcagggcagacttctaagtctgctaatgtgaccattggcaacactggagatggaagcgggtatggtaatttacctactgttttttcagttaatcaatctactaattggtgggttgatactggggccaatgtagcacggggttccaccgtcctaatggggaatgggtcacatgcttctgttcatggtgttagcacggtagatctgaagtttacttcgggaaagatcgtgcagctgaagaacgtgcagcatgtcccttctatcgacaggaatcttgttagtggctcccgtctgactagagacggatttaagttggtttttgagtctaataaagtagtcgtgtctaaacatggatattttattggtaaaggttctaagtgccatagttgtgtgcaatcaaagcaacctcgcaagcctcacaaggctgtcgaggagagaaacttggcaccactagaactcctacattcagatctttgtgaaatgaatggggtgttgacgaagggtggaaaacgatatttcatgacattcattgatgatgctactagattttgctatgtgtacttgttgaaaacgaaagacgaggctctagactattttaaaatttataaggcagaagttgaaaatcaacttgacagaaagataaaaaggcttaggtctgatcgtggtggagagtttttctcgaacgagtttgacttattctgtgaggaacatggcatcatacatgagaggacgcctccctattctcccgagtctaatgggattgctgaaaggaagaatcgcacactgactgacttggtgaatgccatgttggacaccgcgggactgcctaaggcatggtggggggaggcattgttgacctcaaatcatgtgttaaacagagttcctaacagaaataaggacaaaacaccatatgagatatggattggtagaaaaccatcactttcttatttgcgcacatgggggtgcttggcgaaagtcaatgtaccaataacgaagaagcgcaaacttggacctaagactgtggactgtgtttttctgggatatgcttatcatagcattgcctatagatttttaatagttaaatccgaggtaccggacatgaatgttggtacaattatggagtctcgtgatgctatcttctttgagagctttttcccaatgaaggatacacatagtggttcgaaccaaccatctgaaataattcccagttcaatcacaccaccagaacaaactgaacatacacatgaacttgtctctgaggaggatgtcagtgaagctcctcgaaggagtaagagacaaaggacggctaagtcttttggtgatgatttcactgtgtacctcgtggatgatactcctaagtcaatttcagaagcatatgcatctcctgatgcagactactggaaggaggctgtccgtagtgaaatggattccattatcgctaacgggacttgggaggtgacagagcgaccctatgggtgtaaacctgtggggtgcaagtgggtgttcaagaagaagcttaggcctgacggtactattgaaaagtacaaggctcggcttgttgctaagggctatactcagaaagaaggcgaagatttctttgacacttactcacctgttgctagattgaccataattcgtgtgctactttccctagcagcctcacatggtcttctcgttcatcaaatggacgttaagacagcttttcttaatggagagctggatgaggagatctatatggatcaacctgatgggtttgtagttgaaggtcaagaaggcaaagtgtgcaaattgttgaagtctttgtatggtctgaaacaagctcctaagcaatggcatgagaaatttgacaaaacattgacatctgcaggctttgcagtcaatgaggcagataaatgtgtgtactatcgccatggtgggggtgagggagttattttgtgcttgtatgttgacgacatactgatatttgggacaaaccttgaggtgataaatgaggttaaatcattcttgtctcaaaattttgatatgaaggatttgggagtagctgatgttatcttaaacattaagctaattagaggtgagaatgggattacactcttgcagtcccattatgtggagaagatcttgaatcgctttggctacattgatagtaagccttctccaacaccttatgatcctagcttgttgcttcgcaagaacaagagaattgctaggaatcaactggaatactcccaaatcattggctcgttgatgtacctggctagtgcaactaggcctgatatctcctttgctgtgagcaagttgagccgatttacctctaatccgggagatgatcactggcgtgcgcttgagcgagtaatgcgctatctgaaaggtactgtggaattggggcttcactatactgggtatcctgcggtactggagggttatagtgattctaactggatctctgatgtggatgagatcaaagccactagtgcatatgttttcacactgggtggtggtgctgtttcatggaggtcttgcaaacagaccattttgacgaggtcaaccatggaagcatag

SEQ ID NO: 13752 - DNA, 1350 bp, Oryza sativa
  Clone ID: TFbOSC101880j.C1.o3.fg
atgggagtcccggcgttctaccggtggctggcggaccggtacccgcagacggtgtcggacgcggtggaggaggagcccgtggagctcgagcccggcgccttcgtccccgtcgacctccgccgccccaaccccaacggcctcgagttcgacaacctctacctcgacatgaacggcatcatccacccctgcttccaccccgagggccgcccggctccgaccacctacgacgaggtgttcaagtcgatttttgcctacattgaccacctcttcggcctcgtccgcccgaggaagctcatctacatggccatcgatggcgtcgcgccaagggcgaagatgaatcagcagaggtctagacgtttccgggctgctaaggatgcggctgacgcggcagctgaggaggaaaggttgaggaaggaatttgaggctgaaggcaggactttggttgcgaaggagaagtcggaagcgattgactcaaatgtcataactcctgggacaccattcatgtttgtactctcttcggcgcttcaatactacatacagctgagattgaaccacacacctgggtggcaatctgtcaaggtaatgctttctgattcgaacgtccctggggagggagaacacaagattatgtcatacatccgcctgcagcgcaatctcccaggatttgacccaaatacacgccattgtttatatggccttgatgctgatttgatcatgctttctctggctactcatgaggtccacttctccattttaagagaggtgattaccatgccagggcaacatgaaaaatgctttctctgtggtcaagttggtcacttggctgctgaatgcagaggatctggtcaggctgataagaccgtggagctccctcctatccataagaagaagtatcagtttcttaacatctgggttctgcgtgaatacctggagaaggatttggaaattgttgatccccccttcaagataaactttgagcgtgttgtggatgattttgttttcatgtgtttctttgttgggaatgactttctgcctcacatgccaactttggagatccgcgagggtgccattaatcttctcatgaatatatatagaagggagttcacatcaatgggtggttacctcaccgatgggggtgaggttttgttggatcgagtggagcatttcattcaatctgttgctgtccatgaagagcaaattttccagaagcgtgcacgcattcagaaggctatccagaacaatgaggagaggaatagagtgcagacagagaactctgaggataatcaatatgtggacaagagcatgatctactgtcctactgtcactgtcaagtattacaaaaacgactag

SEQ ID NO: 13753 - DNA, 720 bp, Oryza sativa
  Clone ID: TFbOSC16994j.C1.o1.fg
atggaacagaaaaagcgtagtagccagaggccgcgcattgctttgggacctcaagctgcaccatacccacagggaggatcctcttcagttgctcgccctcaacgccagttctacaacaacaacactagtaatcacagcaacgataatcgtaatatggtcactcgtcatgtagcagctccaactcagaatcatcctgtcaggaaggaacagggaagcaagccaggggtgtgcttcaattgtggtgatccaggacattatgctgataagtgtccaatgcctcggcgtgtgaagaatgcacctgttcagaacaactccaatgctccagcaccgaaggctcgtgttaatcatgttgcagccgcagaagcccagaatgcacctgatgtggttttggaatccaatgatcttgatgttatcttagggatggactggctaacccatcacataggagttatagattgtgctaaccgtaatgtgactttaacaagtagcaatgggcaaacagtgtctttctttgtgtcatcccctaaatctcacggtttgacattaaatcaagttgctttgcaagagatcccaatagtacgagactatccagatgtgttccctgaggatttgccaggtatgccacctaagagagacatagagttctggatagacttagtacctggaaccaaccctatccataagagaccatacagaatggcagctaatgagttagcagag

SEQ ID NO: 13754 - DNA, 5452 bp, Oryza sativa
  Clone ID: TFbOSC400433j.C1.o6.np
atggccgaccacccacccaaccaccgcggagaaggcatggatgattttgtggcagagttggcttgcatgaccctggtggtgggctaccccaacgcgccggagtactcgaccgttctgctgctcagtggcgagcttccccaccgtgttcgtctggaggtccatggctatgtgggcacctgcctcgctaacatggtggttgaggcatctggaggcaacagagatcacgcctgtcaggaggcagcatatctgatgatggctaggcttcgtgatcgccacaactacatcttctacaacacggcgtaccgcttccaccctcgccgagcaagtggcgacgacgccagcaccttccgcccgacagtcggcgagaaccacaccaccttcgggcacatgtgcaccgtgatgaggggaatggacaagatgcactctaacctgcacaaggcatccaaggccttgaatgatgggaagcttgtgaggatcatagctctgaaggatgagatagcacgcctgaagaaggagaacgctcagttgaagggtctcccagcggcaggaggagtccggatccgcaccacgccccgcaagtctacgattgctcccgtgtgcattcagcttgcgcccaggaacccagcacccacagctcctcccacagttcccgcagctcctcccgcagctcctccagctccagtcccagctcctgttccagtgttagctcccgtgtccgctctctcctttgctccagcgtcagctgccaggggtccagccagtggcaatggaggttggttgcctgctactcctagtggcagccgcgaccacagcagcagcagttccagtggctcagagccgggcagcggtgagacgtatctgccagactccaggagctgctcagagggacccggcctcttccttccgatggtcaacaccaggaatggcagccgtgcagcaggtgagggcagcaacgacgaagaacgcgccgacggtggatatcccaacagcgcctctggcaacggtccgccaccgctccccgagaactcgactcttgcacaagtgatggcccatcagactcagatgatggcggccatgatgcagcagcagcactagcagatgcaccagaggatgcggtagcaagccgagcagcagcagtagcagtttggtccccctccccctcagtccaagctgccaaagtttccacgagtcaggccacccaccttctctagcaccaccaaccccatggaggcaaatgactggctccatgccatagagaagaagctcaatcttctgcagtgcaatgatcaagagaaggtcgccttcgccacacaacagctccagggtcccgcgtcagcttggtgggacaatcacatggctacccatccgccaggtacggaagtcacttgggcggagttctgtcgcagctttaggaaggtgcaggtgccagacggggtagtggcacaaaagaagagagaattccgagcactccactagggcaacaggacagtaaccgaatacctgcatgagttcaatcacctagcatgatatgcaccggaggatgtccgcactgacgcagagaaacatgagaagttcctagcaggcctggatgacgaactgaccaaccagttgatctacggggattacgctgacttcgagaagctggtagacaaggccatccgtcaggaggatcaacgtaacaaaatggacaggaagagaaaggcagctcaattccgatccaaccaaggaagtcaccagcgaccgcgcttcacttccggacagcagggtggacctaccaccatgattgtttgacagcatcgtccttacaacccaagcaacttccaccccggcagtagtggcaaccatcttggccaagggcagcacaaccgcggcgcagccccacacccgccaatggcgcctgttcagcaaactgcacccgctcccccaaagtacaccggaggcaagccaggagcctgcttcaactgtggtgagtctggtcacttcgccgacaagtgtccaaagctcaggcgcgctggacccaagtttgtccaggctcaggttaaccacgcgtccgcagaagagacgcaagcagcaccagaggtcgtactgggaacgtttcctgttaactcaatccctgcaacagtacttctctattctggtgcaacgcattcattcatttcaaagaagtttgttgggtacatgggttaataagagaggaacttagtacaccaatgcgggttcataccctcgggaatagctccacctcggttcaattcagcccttctgtaacaatagaaatccaaagatcaccatttctagccaacctcatccttctcgaatccaaagacctagatgacattcttgggatggattggctgaccaagttcaagggtgtcattgattgtgcgaatcgcacggtcaccttgaccaatgagaaaggagaaacggtggtgtagaagtcaccagtcgcactaaaacagggaatctccttaaatcagattgaggtggaaaattcggtggtcaccgcggagaagagttcgaggaaattggaagatatccccatagtctgcgagtattcagaggtgttccctgaggacctcactaccatgccacccaagagagagattgaattccggattgatttggcaccggggactgctccaatttacaagagaccgtacaaaatggcagccaacgaactagcagaggtcaagaagcaggtggatgagcaactgtagaaacggtacattcaaccaagtacttcgccttggggtgctccggtcatttttgtggagaagaaggacaagacaaagagaatgtgcatcgattatcgcgcactcaatgaggtcccatcaagaataaataccctttgccgcggattgatgatctgtttgatcagctgaaaggagccagggtgttttccaaaatagacctacgatcgggctaccaccagttgaggattcaggaagaggatattcccaagacagccttcaccactcggtatgggttgtatgagcgcacggttatgtcttttggacttaccaatgcacctgcattcttcatgaacctgatgaacaaagtgttcatggaatttctggataagtttgttgtggtattcattgacgacatacttatatattcaaagtctgaagaagaacatgagcaacatctccgtctggtactcgagaagttgaaggagcaccagttatatgccaagttcagtaagtgtgacttttggttgtcggaagtgaaatttttgggtcacgtcattacggctcaaggtgtggtagtggatccatcgaatgtggagtcagttgccaagtggaccccacctaagacagtatcacagattcggagtttccttggacttgcgggttattaccatcggttcattgaaaatttctccaggattgccagacctatgactcagttgcttaagaaagacgagaaattcaagtggacagccgagtgtgacaagagttttgaggagctcaagaagaaattagtgtctgctccagttttgattctgcccgatcagacgaaagacttccaagtctattgcgacacgttccgtcacgggcttggatgcgttctaatgcaagagggcagagtggtcgcttatgcctcgcggcagttgcgtccgcatgaaggaaactatccaacacatgacctgaaattggcagcggtggttcacgccttgaaaatctggaggcattacctgattggcaactgctgtgaagtatatacggatcacaagagtttgaaatatatcttcacccaacctgatctgaacctccgacagcgaagatggttggagttaatcaaagattatgacatgagcattcactaccatccaggcaaagccaatgtggtggcagatgcattaagcaggaagagctactgcaatgctttgtgcaccgagggcatgtgtaaggaattgcagcaggtgcttgaacatctcaacttgggaatcgtagaacacaggttcatggctactctagaggctcggcctacgctcgtggatcaagtcagagcagctcaagtaaatgatcctgagatagctgaactgaaaaagaatatgagggtcggaaaagcccggggtttccttgaggatgaacatggcacaatctggatgagagaaagattgtgcatgcctgatgacaaagagctgaaagatctgatactcaccgaggctcatcagactcagtactccattcatccaggcagtaccaaaatgtaccaagaccttaaagaaaaattttggtgggccagcatgagaagggaaatagctgaattcgttgcactctgtgatgtttgtcagcgagtcaaagcagaacaccagaggcccgcaggattgttacaacctctccagatcccgaaatggaaatgggaagagattggaatggatttcataacaggtctgcccaggacatcatctagccacgattcaatctgggtagtcgtggattgactcactaaagttgcccatttcatcccagtgcataccacgtatacgggaaagaaattggcagagctatacttagcaaggatcatgtgtctgcatggggtacccaagaagattgtatctgatcgagggagtcagttcacctgaaaattttggcagaagctgcaggaagaattggggacccgtttgaatttcagcacagcctaccacccgcagactgatggccagaccgagagggtcaattagatcttggaggatatgttgcgagcctgtgcgcttgattttggtggagcttgggataaaagtctgccttatgctgaattctcatacaacaacagctatcaggccagtctacaaatggcaccattcgaagcgttgtatggtcggaagtgccgcacacctctcttctgggattaaacaggcgaacgtcaactattcggaatagaagtgctaatagaagcagaggagaaagtcagaaccgtcagagagaggctaagagttgcacagtctcgacagaagagctacgcaaacaaccgccgaagagagctcacttttgaagccggggattatgtgtacctccgtgtcactccgctctagggagtacaccgtttccagacgaaaggcaagttggcaccacgcttcgtgggaccatacaaaatcttggaatgaagaggagaagttgcctattagctagaacttccatccaacatgatcggtatccatgacgtgttccatgtgtcccagttaaagaagtgcttgaggctacccgaagaacaagccgattcggagcacattgacatccaagaagatctgacatatgtggagaagccagttcgcatccttgagaccagtgaaaggaggactagaaacaaggtcaccaggttctacagggttcagtggagccaccactcagaagaagaagcaacctgggaaagggaagatgagttaaaggccacccatccgcacctcttcaccagctcttccgaatctcggggtcgagattccgtt

SEQ ID NO: 13755 - DNA, 4815 bp, Oryza sativa
  Clone ID: TFbOSC400575j.C1.o14.gm
atggcaaaagaggacgaggataagacagcattcatcacgccgttcggggtattctgctacgttaagatgccattcggactaataaccacaggaaacactttccagcgcacggtccaaggtgcacttagtgaccagctcggaaacaatgtcgaggcttacgtcgatgacattgttgtcaagaccaagacaagcgactcattgattgacgatctgcgggaaacgttcgacaacctccgacgatatcgccttatgctcaatccagagaagtgcacgttcggagtaccatcgggcaagaccccccgagctctcctctacccgtcgcccccttcgccttcgcctctcgtcgtcggagaagccctagcgccgtgcgccctagctcagccgtcgccgccgtcgctccagccgtgcgccgccgccgttccagccgtcgccgtcgctcgggaaggccaccgttgggatcgccaagttgccgccgtcctcgtccgttgcttcgccgccgtcggagaccgccggagcaccatcgccgtcgtcgaaccgaagagctccgccgcttcttcttcgtcgccgccgccgtccgttgggtttccgccgtcgttttggtcgccgatgccgcgctacaagcctgagtacttgtttggtgttgagggttttgtccaggagttgcgtacaatgtcctttgtcattggatttgggactgcccctttttatgcccagattcctcatgatcgtcatgaagagaagtgccgagtcaaagtcaccttgaacagtaatagtgaagatatcccctcagtgatgttcgaagctggaggaagaaactacatccatgcaagtcaggaggtggcaaggatcgccataggagagctccgcgatcgttacagtgatcagttggccgatactgagtatcgctatcatcctcgtcaaccccagggaagtgaccgtggcagctaccttgagactgaaggaattgagaatgatgctaccacaaggcatttggttgagatgctgtgggctatggatgaaagtcgtgcggagactgtgttagcggctcaagatcgtgaagatcggaatcgtggtaagatttgcaagctagaagacaaggtggatcgtttggagaaggaactagccgcattgaagggagaagcaccaccgcagaaggccaggattcgtcttaccgcaaggaagagagctctatttgtccctcgctatcaattggcgccaaaggttcgtgtggtggagaaagaagttgccccaactctagcagatcctccggtcaacatcataagtgatgatgaggaagaagaatccaagcgcaaccattccaagattgagtgggtagcaactcaagatgatgaagatgagccgaaagagccttcaatcgacctccgatgctcggaagaactagacaagatggtgaatactcgcagcaatgggaatggccccaacaatcccaataataataacaatgaagggaacccaactcttgcccaagtcctggctcaacaggtgcaacttatgaacatgatgatgcagcaacttcagaatcagcagaaccaaggaaataaccatgcacctccgcagaacaggttaactgattttcttcgtgtgaggccacctaccttttctagcactaccaacccagtggaagcaggtgattggttgcatgccatagagaagaagttggatttgcttcaatgcactgatcaggagaaggtctcatttgcatcgcatcagttgcatggccctgcctctgaatggtgggatcatttccgccttaacagaactactgctgaacctatcacttggcttgaatttaccgctgctttccggaagacgcatataccatcgggagtggtgtctctcaagaagaaggaattcaggtcgctcacccagggatcacgctctgttacggagtatctgcacgagttcaatcgtcttgctcgttatgctccggaagatgtgcgcaatgacgaagagcgtcaggagaagttcttagaaggacttaatgatgagctttcttattcactcatgattggagattatcctgatttccagaagctagtggataaggctattcgccaggagaacaagtacaattgcatggagcagaagaaacgccggattgctcaattcaagacacaacaggggaataatcagaagccgcgtcttactttaggaccccagtccataccacatggaagttcttcgtccgttgttcgtccgcagcgtcagttcttcaacaacaatgctggcaacaacatacgtaatcaagttccgcgtcctgttgcagctccaacacagcaacaacctatcaagagggagcaaggcagcaagcccgcggtgtgtttcaactgtggagatccaggacattatgctgacaagtgtccgaagccccgacgcgtgaaggttgtccctgctcagaacaactctactgtaccagtatcaaaggcccgtgtcaatcatgttgctgctgcagaagctcaagatgctccagatgtgattttggacaagttcgtggtggtctttattgatgacattcttatctactcccgaactgaagaagagcatgaagaacatcttcgccttgcactagagaagctaagagaacatcggttgtatgctaagtttagcaagtgtgaattttggttgtctgaagtgaagttccttggtcacgtcatctcagcaggaggagttgccgtcgatcctagtaatgtggaatccgtaaccaattggaagcaaccaaagacagtttcagagattcgcagtttcctaggcctcgcaggatattatcgaagccgtgcgccgccgccgttccagccgtcaccgtcgctcgggaaggccaccgtcgggatcgccaagtcgccgccgtcctcgtccgttgcttcgccgccgtcggagaccgctggagcaccatcgccgtcgtcgaaccgaagagctccgccgcttcttcttcgtcgccgccgccgtccgttgggtttccgccgtcgttttggtcgccggttgagaagtggcggagataagcccacgggggtcgctggggagtccattacctctggttttgagggggagattatgatccaggaacggtgcactgtagtggattgtgttgtgcgagagaggaatagaagcaaatcccgagaagatcatggtaatcgagaacatgaggtcgcctacaagactcaaggaagtacagaagctaaccggatgcatggcagcactaagcaggaggccgaagaggcattcattgcattcaagcgctacctatcaaatccacatgtacttgttgcccctcaacctaatgaagaattatttctctatattgccgccacgccatattccgttagcactatcattgttgttgagagagagaaggtgcaactaccagtctactatgtcagcgaagctctccacgacgtaatgacaagatatccacagatccaaaaactgctctacgcagtaatcatgacatcaagaaagctatgccagtacttccaagcccacagggtcacagttgtctcctccttccctctcggtgaagtcatgagaaataaagatgttgtcagccgcattgccaaatgggtagtcgagctaagccaatttgatatccacttcgtgccacgaacagccatcaagtcccaggtactcgccgatttcgtagccgattggaccatgcccgataacaggtcagacaaccaaatcgacaatgaaacgtggaccatggcattcgacggcgcactcaacagcaagggagcaggggcaggattcatcttgacatcaccttcgggagatcaattcaagcatgcaattcacctcaacttcagggcaaccaataacacagccgaatatgaaggactactcgcggggataagagttgcagctgcgctcgtagtcaggaagctggagaaaaggttcgatgggatcgaggtccgacatgtataccgcaaagacaacatcgaaccagatgatctagcacgacgtgcgtccaggcgagagccactcgaacctggcacctttctggacgtcctaaccaggccatcagtgaaagaggcaagcggcgaagatagcccggtcgcccccgacatcagctcgggggctatagaggcagagcgcaccgttgccgatatcgagaccacggacgactggcgcaccccactcattaaattcataggcagcgaagagttgcccgaggacgacgcagaagtcgagaaaatatcccgtaaagcaaaagtctactgtatgatcggcaatgatctatacaagaaggcaccaaacggggtactcctaaaatgcatcttgtccgacgacggcagacacctcctcctcgacatacatgaagagatctgtgggtcacatgccgccggtcggacattagtcggaaaagctttccaacaagggtttttctggccaaacgccctcaaagacgcctgcgacatggttcaacagtgtgaagcctgtcaattccacagtaaacacacaaagctgccagcgcaagcactccagactatccctttcacttggccgttatcgtgctgggggctagatatactcaggccattcccacgaggacagggcggctacaggttcctattcgtggcgatcgacaaattcaccaagtggattgaagcgacacccacgggggaaatcaaggccgacaacgccatcaaattcatcaaagggatattctgcaaattcggattgccccaccgtatcataacagacaacggctcccagttcatcagtgccgatttccaggattactgcatcaggctgggagtcaagatctgcttcgcctcggtttctcaccctcagagcaattga

SEQ ID NO: 13756 - DNA, 5461 bp, Oryza sativa
  Clone ID: TFbOSC401921j.C1.o15.np
atggccgaccacccacccaaccaccgtggagaaggcatggatgattttgtggcagagttggctcgcatgaccctggtggtgggctaccccaacgcgccggagtactcgaccgttccgccgctcagtggcgagcttccccaccgtgttcgtctggaggttcatggctttgtgggcacctgcctcgctaacatggtggttgaggcctctggaggcacagtagatcacacttgtcaggaggcagcatacctgatgatggccaggcttcgtgatcgccacagctaaatcttctgcaacacggcgtaccgcttccaccctcgccgagcaagtggcgacgacgtcagcaccttccgcccgacggccagtgagaatgacaccaccttcagccacatgtgtgccgtgatgaggggaatggacacgatgcactctgacctgcacaaggcatccaaggcctcgaatgatgggaagcttgtgaggatcatagctctgaaggatgagatagcacgccagaagaaggagaacgctcagctgaagggtctccccgctcccggaggagtccggatccgcaccacgcctcgcaagtcaacgactgcacccgtgcgcattcagcttgcgcccaggaacccacctcctcccgcagctcctccagcacctcccacagttcccgcagcgcccgcagttccagctccagtcccagcttccgttccagtgtcagctcccgcgtccgctctctccttcgctctagcgtcagccgccaggggtccagccattggcaacggaggttggttgcctgctactcacagtggcagccacgaccacagcagcagcagttccagtggctcagagccgggcaacggcgagacgtatctgccagactccaggagccgctcagagggacctggcctcttccttcagatggtcaacaccaggaatggcagccatgcagcaggtgaaggcagcaacggcgaagaacgcaccgacggtggatatcccaacagcgcctctggcaacagtccaccaccgctccccaagaacccgactcttgcacaagtgatggcccatcagacttagatgatggcggccatgatgcagctgatgcagcaccagccctagcagatgcaccagaggatgcagcagcaagccgagcagcagcagcagcagtttggtccccctccccctcagtccaagctgccggaatttctacgcgtcaggccacccaccttctctagcaccaccaaccccatggaggcaaatgactggttccatgccatagagaagaagctcaatcttctgcagtgcaacgatcaggagaaggtcgccttcgccacacaccagctccagggtcccacgtcagcttggtgggataaccacatggctacccgcccgccaggcacagaagttacttgtgcagagttctgtcgcagcttccagaaggcgcaagtactagacggggtcgtggcacaaaagaagagagaattccaggcactccaccagggcaacaggatagtgactgagtacctccatgagttcaattgcctagcgcgatatgcaccggaggatgtccacattgacacattgaaacaggagaagttcctagcaggtctggatgacgagctgaccaaccagttgatctccggggattacactgacttcgagaagctggtagacaaggcaatccgccaggaggatcagcgcaacaaaatggacaggaagaggaggtttcgacagttccggtccaaccaaggaagtcaccagcgaccgcgcttcactcctggacagcagggtgggcctaccaccatgattgttcgacagcatcgcccttacaacccaagcaacttccaccccggcagcagtggcagccatcatggccaaggtcagcacaaccgcagcgcagccccacgcccgccaatggcgccagttcagcaaactgcacccgttcccccaaagaaggacaccggaggcaagccaggagcctgcttcaactgtggtgagtccggtcacttcgccgacaagtgcccgaagcccaggcgtgctggacccaagtttgtccaggctcgggttaaccacgcgtccgcagaagaggcgcaagtagcaccagaggtcgtactgggtacgtttcctgttaactcaatccctgcaacagtacttttcgattctggtgcaacgcattcattcatttcaaagaagtttgttggggtacatgggttaataagagaagaacttagtacaccaatgcgggttcagacccccgggaatagctccacctcgattcaattcagcccttgtgtaacaatagaaatccaaagatcaccatttctagccaacctcatccttctcgaatccaaagacctagatgtcattcttgggatggattggctgaccaagttcaagggtgtcattgattgtgtgaatcgcacggtcaccttgaccaatgagaaaggggaaacagtggtgtacaagtcaccagtcgtactgaagcagggaatctccttaaatcagattgaggtggaaaatccgatggtcaccgaggagaagagttcgaggaaattggaagatatccctatagtcggcgagtatccagaggtgttccctgaggacctcactaccatgccacccaagagggagatcgaattccagattgatttggcaccggggactgccccaatttacaagaggccgtacagaatggcagccaacgagctagcagaggtcaagaagcaggttgatgagcagttgcagaaagggtacattcgaccaagtacttcaccttggggtgctccggtcatttttgtggagaagaaggacaagacgaagagaatgtgcgtcgattatcgcacactcaatgaggtcaccatcaagaacaaatatcctttgccgcggattgatgatctgtttgatcagctgaaaggagccaaggtgttttctaaaacagacctgcgatcaggctatcaccaattgagaattcaggaagaggatattcccaagatggccttcaccactcggtatgggttgtatgagtgcacggttatgtattttggacttacgaatgcaccggccttcttcatgaacctgatgaacaaagtgttcatggaatttctggataagtttgttgtggtattcattgatgacattctaatctattccaagtcggaagaagagcatgagcaacatcttcgtctggtactcgagaagttgcaggagcaccagctttatgccaagttcagcaaatgcgacttttggttatcagaggtcaaattcttgggtcacgtcattacagctcagggcgtggcagtctatccatcgaatgtggagtcagttaccaagtggaccccacctaagaccgtgtcacagattcggagttttcttggacttgcgggttattaccgtcggttcattgaaaatttctccagaattgccagacctatgactcagttgcttaagaaagacgagaaattcaggtggacagccgagtgtgacaagagttttgaggagctcaagaagaaattagtacctgctccagttctgattctgcccgatcagacgaaagacttccaagtctattgcgacacgtcccgtcacgggcttggatgcgttctaaagcaagagagcagagtggtcgcttatgcctcgcggcagttgcgtccgcatgaaggaaactatccaacacatggcagcggtggttcatgctttgaaaatctggaggcactatctgattggcaaccgctgtgaagtatatacggatcacaagagtttgaaatatatcttcacccaacctgatctgaatctccgacagcgaagatggttggagttaatcaaagattatgacatgagcattcactaccatccaggcaaagccaatgtggtggcaaatgcattaagcaggaagagctactgcaatgctttgtgcaccgaaggcatgtgtaaggaattgcagcaggagcttgaacatctcaacttgggaatcgtagaacacgggtttgtggctgctctaaaggcacggcctacgctcgtggatcaagtaagagcagctcaagtaaatgatcctgagatagctgaactgaaaaagaatatgagggtcggaaaagcccgggatttacttgaagatgaacatggcacaatctggctgggagaaagattgtgcatacctgatgacaaagagctgaaagatctgatactcaccaaggctcatcagactcagtactccattcatccaggcagtaccaagatgtaccaagatcttaaagaaaaattttggtaggccagcatgagaagggaaatagctgaattcgtcgcactctgcgatgtttgtcagcgggtcaaggcagaacaccagaggcccataggattgttacaacctcttcaaatcccagaatggaaatgggaagagattggaatggatttcataacaggcctgcccacgacatcatcaggccacgattcaatctgggtagtcgtggatcgacttaccaaagttgctcatttcattccagtgcatactacttatacaggcaaaaggttggcagagctctatctctcaagaatcatgtgtttgcatggagtacccaaaaagatagtatctgatcgagggagtcaattcacctcaaaattttggcagaagttgcaagaggaattgggtacccgttcgaatttcagcacagcttaccatccgcagacagatggccaaaccgagagggtcaatcagatcttggaggataagttgcgagcctgtgcgctcgattttggcggagcttgggataaaagtctgccttatgctgaattctcttacaacaacagctatcaggccagtctacaaatggcaccgttcgaagcgctgtatggccggaagtgccgcatacctctcttctgggatcaaataggcgaacgtcaactgttcggaacagaagtgctaacggaagcagaggagaaagtcagaaccgtcagagagaggctgagaattgcacagtctcgacagaaaagctacgcagacaaccgccgaagagagctcacttttgaagcaggagattatatgtacctccgtgtcactccgctccggggagtacaccgtttccagacgaaaggcaagttggcaccacgcttcgtgggaccatacaaaatcttggaacgaagaggagaagttgcctatcagctagaacttccatccaacatgatcggtatccatgacgtgttccatgtgtcccagttaaagaagtgtttgagtttacccgaagaacaagccaattcggagcacattgacatccaagaagatctgacttatgtggagaagccagttcgcatccttgataccagtgaaaggaggactagaaacaaggtcaccaggttctgtagggttcagtggagccaccactcagaggaagaagcaacctgggaaagggaagatgagttgaaggccgcccatccgcacctcttcaccagctcttccgaatctcggggtcaagattccgtt

SEQ ID NO: 13757 - DNA, 3630 bp, Oryza sativa
  Clone ID: TFbOSC5141j.C1.o2.fg
atggatgcccatccgccgaaaaacttgatcgaggtgctaggattcgtcagggagctgagaatgatggcatttgaagtaggttacgaggttgcccccgagtatcgccagattccccatgaccccaacgaggagaagtgtcgtgttcgcgtgacgttgactagtgatcgtgaagaccttccgtcgataaagtttgaagctgagggaaaaaagtacagccatgtttgtcaggaaacagccttggtggccattggagagctacgtcatcgctttgatgaggagttagagtcatcagctttccagtatcacccacacaagccacatggtcaagactatagaacttacaactgtcccgaaggtgaaggtagcgccactgtgatgcacgccgtgtatatgcttagcgccatggatgcagtaggcgtggagcgagagaaagcagctcatgatagggaaaactggaaccgtggcaggatttgtaagttggagagcaaggtgtaccgtctgcagaaggaactagctgagcttaagggagaagcaccaccgccagcacccaagcttcgcctcaccgcaaggaagagaaccagtctaccacctcgtctccagttagcttcgaagactcgtgtgatggtgaacacccgcactggaagtgaaagtggaagtggaaatggtcacaatgaaggagatcccacacttgcccaagttttggcccagcaaacccagttgattaatctattagtgcagcaagcgcagaaccagcaggcaaataacaacaatcaaccaccacctccgcagaacaagttggcagattttctacgtgtgagaccacctaccttctcaagcaccactaacccagtagaggcaggtgattggctgcatgctgtgggaaagaagttagatttgtttcagtacaccgagcaggagaagttggtggacaaggcgattcgccaagaagacaagtataataggatggaacagaaaaagcgtagtagccagaggccgcgcattgctttgggacctcaagctgcaccatacccacagggaggatcctcttcagttgctcgccctcaacgccagttctacaacaacaacactagtaatcacagcaacgataatcgtaatatggtcactcgtcatgtagcagctccaactcagaatcatcctgtcaggaaggaacagggaagcaagccaggggtgtgcttcaattgtggtgatccaggacattatgctgataagtgtccaatgcctcggcgtgtgaagaatgcacctgttcagaacaactccaatgctccagcaccgaaggctcgtgttaatcatgttgcagccgcagaagcccagaatgcacctgatgtggttttgggtacgtttcctattaactctatacccgcaactgtgttttttgattccggtgctacacattcctttttgtctaaaagttttgcgggcaatcatgggatggaagttattagtcttgggagacctttactagttaataccctaggcaatcaagtatcctcaacgcagtactgtccttccgttactatagaaatagaagaaatacctttcccatcctcacttatctttctagaatccaatgatcttgatgttatcttagggatggactggctaacccatcacataggagttatagattgtgctaaccgtaatgtgactttaacaagtagcaatgggcaaacagtgtctttctttgtgtcatcccctaaatctcacggtttgacattaaatcaagttgctttgcaagagatcccaatagtacgagactatccagatgtgttccctgaggatttgccaggtatgccacctaagagagacatagagttctggatagacttagtacctggaaccaaccctatccataagagaccatacagaatggcagctaatgagttagcagaggtaaagagacaggtggatgatttgcttcaggaaggatatatcagacccagtacttcaccgtggggagcaccagttatcttcgtggagaagaaagatcatacccaaagaatgtgtgtggattatcgagcgttgaatgaggtcactatcaagaataagtatcctctacctaggattgatgacttgtttgatcaactggaaggtgctacagttttctccaagatagatcttcgttccggatatcaccaacttcgaatccgtgaggagtgtaccgttatgtcgtttggactcactaatgccccggcctttttcatgaacttgatgaaccaagtgtttatggaatatctggataagtttgtcgtggtgtttattgatgatatccttatctactccaagaataaagaagagcatgaagagcatcttcgtcttgctttagagaaactacatgagcatcagctctatgccaagtttagtaaatgcgaattttggttgcccgaagtgaagttccttggtcatgtcatctcaactggaggagttgccgtggatccaagcaatgtggagtcagtgctaaattggaagcaacccaagacggtttcagagattcgtagtttccttggtcttgcggggtactaccgcaggtttattgagaacttctcaaagattgctagaccaatgactcgactgcttcagaaggatgtgaagtataagtggacggaagagtgtgaacagagtttccaagaattgaagaaaaggctagcggctgcgccagtgttagtcttgcctgatccaaggaaaggttttcagatttggcgtcattacctttttggtaaccgtacggagatgtatacggatcacaaaagtttgaagtacattttcactcaacctgatttgaacatgcgtcaacgacggtggttagagttgatcaaggattatcatccagaagctcagcctactctttttgatcaagttagagaggctcaaatgaatgatcctgatatccaagaaatcaaaaagaacatgagaagagcgagtcaaggcggagcatcagaagccagccggtctgctgcaaccgttgaagattccagagtggaaatgggaggaaataggaatggattttatcaccggtctacccagaacatcgatgtcggtggaagttgggataagaatctgtcgtatgctgaattctcgtataacaacagttatcaagctagtcttcaaatggctccatacaaagcattgtatggtcgtaagtgccgtacaccgctcctttgggatcaaactggtgagcgtcaagtttttgggacagatgtattgcgagaggcagaagaaaaagtgaagattatccaagaaaggttgcgagttgctcagtcgcgtcaaaagagctatgcagacaatcgtcgtagggatttgactttcgaagaaggggattatgtatacctacgggttacgccgctgcggggagttcatcgttttcagaccaaagagaaattggcaccgcgttttgtgggaccttttaagattttgaagaaatgtttgagtgtacctaccgaggaagcagatcctgagcgtttagagattcaagaagatttaacttatgttgagaagccagtcagaattttggagtttccgacattccggaggagagcgtttacgctgaggaaggttcagaagtgtttgaagaagctcaaggcaagtcacacagatcccaaacagcgcttttag

SEQ ID NO: 13758 - DNA, 4934 bp, Oryza sativa
  Clone ID: TFbOSC900370j.C1.o6.np
gtgacaagttggtatcagagccaccttgaccttaggacaagccaaatggtaaacccccatccgccgaaaaacttgatcgaggtgctaggattcgtcagggagctgagaatgatggcatttgaagtaggttacgaggttgcccccgagtatcgccagattccccatgaccccaacgaggagaagtgtcgtgttcgcgtgacgttgactagtgatcgtgaagaccttccgtcgataaagtttgaagctgagggaaaaaagtacagccatgtttgtcaggaaacagccttggtggccattggagagctacgtcatcgctttgatgaggagttagagtcatcagctttccagtatcacccacacaagccacatggtcaagactatagaacttacaactgtcccgaaggtgaaggtagcgccactgtgatgcacgccgtgtatatgcttagcgccatggatgcagtaggcgtggagcgagagaaagcagctcatgatagggaaaactggaaccgtggcaggatttgtaagttggagagcaaggtgtaccgtctgcagaaggaactagctgagcttaagggagaagcaccaccgccagcacccaagcttcgcctcaccgcaaggaagagaaccagtctaccacctcgtctccagttagcttcgaagactcgtgtggtgggagacgctgtgcctgatcatgctgaacctgtcatccatgtcttaagtgatgaggaagaagaggaagacccaaaagaaagagagccagctactccagaggaggaagatccatctcttcgttccgacgcaaggcgcaccactaacccagtagaggcaggtgattggctgcatgctgtgggaaagaagttagatttgtttcagtacaccgagcaggagaaggtttcctttgcttcacatcagttgcatggtcctgctgctgagcggtgtgaccactttcttctaaacagagccgagggacagcctatcacttggcgggagtttactgctgctttcaagaagacacacataccatcaagtgttgtggcccttaagaagagagagttcagagcactcaactagggatcccgttctgtcagagagtacctccatgactttaatcgcttagctcgttatgccccagaagatgttcgcactgatgaagaacgtcaggagatgtttttagagggactgaatgatgagttgtcttttgcattgatggctatggattaccgggatttccagtagttggtggacaaggcgattcgccaagaagacaagtataataggatggaacagaaaaagcgtagtagccagaggccgcgcattgctttgggacctcaagctgcaccatacccacagggaggatcctcttcagttgctcgccctcaacgccagttctacaacaacaacactagtaatcacagcaacgataatcgtaatatggtcactcgtcatgtagcagctccaactcagaatcatcctgtcaggaaggaacagggaagcaagccaggggtgtgcttcaattgtggtgatccaggacattatgctgataagtgtccaatgcctcggcgtgtgaagaatgcacctgttcagaacaactccaatgctccagcaccgaaggctcgtgttaatcatgttgcagccgcagaagcccagaatgcacctgatgtggttttgggtacgtttcctattaactctatacccgcaactgtgttttttgattccggtgctacacattcctttttgtctaaaagttttgcgggcaatcatgggatggaagttattagtcttgggagacctttactagttaataccctaggcaatcaagtatcctcaacgcagtactgtccttccgttactatagaaatagaagaaatacctttcccatcctcacttatctttctagaatccaatgatcttgatgttatcttagggatggactggctaacccatcacataggagttatagattgtgctaaccgtaatgtgactttaacaagtagcaatgggcaaacagtgtctttctttgtgtcatcccctaaatctcacggtttgacattaaatcaagttgctttgcaagagatcccaatagtacgagactatccagatgtgttccctgaggatttgccaggtatgccacctaagagagacatagagttctggatagacttagtacctggaaccaaccctatccataagagaccatacagaatggcagctaatgagttagcagaggtaaagagacaggtggatgatttgcttcaggaaggatatatcagacccagtacttcaccgtggggagcaccagttatcttcgtggagaagaaagatcatacccaaagaatgtgtgtggattatcgagcgttgaatgaggtcactatcaagaataagtatcctctacctaggattgatgacttgtttgatcaactggaaggtgctacagttttctccaagatagatcttcgttccggatatcaccaacttcgaatccgtgaggaggtatacctaagaccgcttttacaacacggtttggtttgctcgagtgtaccgttatgtcgtttggactcactaatgccccggcctttttcatgaacttgatgaaccaagtgtttatggaatatctggataagtttgtcgtggtgtttattgatgatatccttatctactccaagaataaagaagagcatgaagagcatcttcgtcttgctttagagaaactacatgagcatcagctctatgccaagtttagtaaatgcgaattttggttgcccgaagtgaagttccttggtcatgtcatctcaactggaggagttgccgtggatccaagcaatgtggagtcagtgctaaattggaagcaacccaagacggtttcagagattcgtagtttccttggtcttgcggggtactaccgcaggtttattgagaacttctcaaagattgctagaccaatgactcgactgcttcagaaggatgtgaagtataagtggacggaagagtgtgaacagagtttccaagaattgaagaaaaggctagcggctgcgccagtgttagtcttgcctgatccaaggaaaggttttcaggtgtattgtgatgcttctagacatggtttggggttgtgttttgatgcaagatgggaaggtgattgcctatgcatctagacagttacgcccccacgagaataactatccaacacatgacctagagttggcatctgtagttcatgcattgaagatttggcgtcattacctttttggtaaccgtacggagatgtatacggatcacaaaagtttgaagtacattttcactcaacctgatttgaacatgcgtcaacgacggtggttagagttgatcaaggattatcatccaggtaaagcaaatgttgtagcagatgctctcagcaagaaaagctactgtaagatgttagaaggtcgacacctaccttgggagttatgtgaggaatttgaaaagttgaacttgggaatagtcaacaaaggttttgttgccgctttagaagctcagcctactctttttgatcaagttagagaggctcaaatgaatgatcctgatatccaagaaatcaaaaagaacatgagaagaggtaaagccatcggctatatagaggatgagcaaggaactgtgtggctaggagaaagaaattgcgtgcccgataataaggagctaaaggatactatcatgaaagaagcccatgaaactttgtattccattcatcccgggagcactaagatgtatcaagacctgaagcaacaattctagtgggccagcatgcgacgagagatagcagaatatgtggctctatgcgatgtgtgtcagcgagtcaaggcggagcatcagaagccagccggtctgctgcaaccgttgaagattccagagtggaaatgggaggaaataggaatggattttatcaccggtctacccagaacatcggtaggacatgattctatttgggtagtggttgacaggcgtactaaagttgctcatttcatacccgtcaaaacaacctacatgggaaataagctcgcagagctatatatggcaagagttgtatgtttacatggcgttcccaagaaaatagtgttagacagaggtagtcagtttacttcgaagttttggcagaacttacaagaagggatgggtactcgtttgaatttcagtgctgcctatcaccctcaaactgacggtcagacaaaaagagtaaattaaattctagaagacatgttgagagcctgtgttctagatgtcggtggaagttgggataagaatctgtcgtatgctgaattctcgtataacaacagttatcaagctagtcttcaaatggctccatacaaagcattgtatggtcgtaagtgccgtacaccgctcctttgggatcaaactggtgagcgtcaagtttttgggacagatgtattgcgagaggcagaagaaaaagtgaagattatccaagaaaggttgcgagttgctcagtcgcgtcaaaagagctatgcagacaatcgtcgtagggatttgactttcgaagaaggggattatgtatacctacgggttacgccgctgcggggagttcatcgttttcagaccaaagagaaattggcaccgcgttttgtgggaccttttaagattgtgagtcggagaggtgaagtagcttatcaagtagagttgcctctgtcaatggagggaatacatgatcgtttcccatgtgtcgcagttgaagaaatgtttgagtgtacctaccgaggaagcagatcctgagcgtttagagattcaagaagatttaacttatgttgagaagccagtcagaattttggagtttccgacattccggaggagagcgtttacgctgaggaaggttcagaaccgcccctgccgcgccgctcaggtgcgggccggccgcgccgtctcctccttcggcgtcgccgcgtcgacctcca

SEQ ID NO: 13759 - DNA, 522 bp, Oryza sativa
  Clone ID: TFbOSC9910j.C1.o4.fg
atgacagagtacctccatgagttcaaccgtctagctcgctatgctctagaagatgagctggttgtcaaagcaattcgactggaatataagaagaacaggatggacaaccgtaagagaggaaggattgtttcccaggaggcacagggtagtagccaaaggcagcgtaccaagccactccaaattggtgaatcttcttctgcatgtcaagaacaattacaacagttggacattagtggtgagatcaactcagagactaatacaagaaatgaagttaacatggagaaagctactcaattagtgctagttcagcaggatcagtctcaagaaggtaatagtaatggaagggagcagcagttgtgtttcaattgttatgagccaggtcactttgcaagagagtgttcgaagccgaagcatcaacatccacaaggtcaagtcaacaacatcatcctcacaggagcaaatgcagtgccggttgcgtcttcaagtgatacagctcagcgatcagtttcaaagcagcagtag

SEQ ID NO: 13760 - DNA, 2817 bp, Oryza sativa
  Clone ID: TFbOSC10744j.C1.o25.fg
atggaggcgcttgtcggcggatatactccgcaccttgccgaaggtcggcaagctgcccaaacccttctagattgggacagtacgttagaattggatgatttccgggtggctagtaccgtctcgattgatatagttattaccaggacaatggcagaagggcatgagcaaaaagttatagaaattgcgattactatccatgataatgactacactgatcaactaatcagcttgatgactaagctgaagataaatgagaagccggaattctattcacatgcctatcaatggggagaacgttgggagtgtgatatgactgtgaagatcaatcccccaagaggtgaacgtgatatgtattacttccgaacacgtcatagggaggcttttctacgtcttaatcatatctatcaagataagctgcaacactctcgctattcttaccatcctatgcgaaagccgggcgaagattactgtactcttcaagacgtggattatcatgaacaaccagtaaaagcaactatgtctatctggatggaagctgcagatgacatgtatgaagaagccctagaacacatggatgtacaacgtaaacgtttggaggaagctgaacgcagagaagctgttctcaaacacaaatatcgtatacttcacgaattatatgaggaaagagaaaaacataattctatcctcaatatttgtgttgcaagagcagccttctgtcttcaccaaatcccaaatatgggtagtgatgacgatgatgatgatgatggtatggaaggacatatctcaccagtacgtgaagatgaaccacatcctcaggataatggtgaaggagttttacaaggtttaccaccatcaccaccaccgttgtatcctatttattctgatgatgaagcagaagaaatgcattcagctatcgatatcagtgaacctagccaagaacctgaagtactcaggccaaatcgggacatagcaaaaaatcaaggaaataaaggttatagtgcacatgcagaatttctgaggattaaaccaccagttttctcaaaatccaaagaacctatggatgccgaagactggctaagggctattgaaaagaaactaaccttggtcagaacaaacgaacaagagaaggtaacctttgcaacccatcaactagaaggaccagccaatgaatggtgggaagcatatcaagcttctatagaagatcctacccatatcattacatggatggaatttaccatagctttcagaaatgcttttatacctacagctgtgatcaggatgaaaaagaatgaatttcgaggattaagacaagacattcaagatgagaaagagaggattgaaaggtttatagaaggattacgtgatgaacttcgaggaccaatgattagtcaagatcatgaaagttttcaaagcctagtcaataaagtggttaggctagaaaatgatcgtagaatggtggaaggattccgtaagagaagaatgaatttacaacgacaatcaccaactagaagttcactacaagttcggaggccttatccatttaagccatctctatccaatgcaaggccgggcatgccaccaatactatcaagacctggattaaggatggaagactctccatgctatgtttgtgggaagtttggacattttgcaagactatgccctaatcgtcaaaatatgggtggccaaacttcttatcagaaaccatctactacaggttttataaagaaaaatcctccaattattaagagtggacctaatcttggacgtggtcaagtacatcatattaaagcagaacaagctcaacaagatcctaatatattgatgggaatagggttgatctgcaccggcaagatcaacaatccacggagagttgttgagttgcatcttgggtttgctgactgggcgttcttctattttggccgtgcctgtgtcgtgcatgagaggaggaaggctcgcgtctctaggatacgcaagataattggggatagctgtgctcaacatcgacatcttcgtcgagacatgaggagtgatcaatatgaccattatgaggaagtgcataatcatgaaaaggaggagagagacatgaaagagccgccagttccattgttcacactcaaagtcgaggcacctccatcatctgaagagggcatcaaagcagagcaaccattagtggaaccaactgctgagattcctttgtcacaagttgatttgtttgcagttccttgtgataaagaagagttatgtgataatgcttcacttatatccatgccacaactagtgaatgaacatgctattcctactgttaattcatactgcgctgattttaagcatgttgttcacattgctaatgaagtagagaagcgtgaattgagatcttctttaaatactttgggctatgttcagtttgatgatttttgtgagctcgataatttgaaggagaaattatttgctaagtctgatttgccatatccaaccaatattatatttcacatctttggcgaatataatgatcttggaatatattttgtgcatagagtttacatctgctcggatttagaacttcctgtacatgtggataaaacatacaagctagagagaaatgttattgctaaccaaattgtctcaactttgccttgttttgattggaagaaacaggcacaaggtgctgcgtcacctataatgggcctatgggcttgtaacttcatttgggaccccggcccaggtggggcccatgtggggtgtgccccaaccaggaatagggttgatctgcaccggcaagatcaacaacccacggagaggtgtattgatcgctaa

SEQ ID NO: 13761 - DNA, 1443 bp, Oryza sativa
  Clone ID: TFbOSC15148j.C1.o1.fg
atgggcaagccgagcaatgtacccaagtcagtgtttcaattcttaaaatttgctcaacaactaaaatgtggagtggttggcctgggttggcttgggacgagctgggacccagggtcgggttgccagttcggtctgaatcatcgtaggccttgggttaaggcaggccttaagtgcctttgtaataatatgtttaacagagaaaaaggaaagaatgtcagcgggtatgcctcaagtaactcaagttttcaactcaatccaccactggcctcaagagagttaaccagggcacacccttggtccattccaagcatgctgcttagttcacagctaccattggttggaagtcaagaccaaaatcaatatgtgtttgatcgagcatttgccacccaggtcaatgagcttccaatgccagaagaggatgtccccttttgtcatgattgcagagagcaaggacactatgccctgaattgtccatgggtatatgtcaaagaagccccttcccttggtttagcagggcagacatcgctaaaccagcctcctcacaccaagtcaagcttgcagcctagtgtgcaaagtagagagctcaacggagagaatccattgaatcccgggaaatgctttcctcctagcctctcgtaccacgtggggtcacatactaagcaagccaaaggcaagaagagtaagaatcagaagagaaaagcaccgatgcgaactgaagcagaagtacgtaagatgactattaccagcaccgaatggcctccagcagggataactattcctagacgtcaaagaggaaatactttccgaggtgcacaacagttgacccagcacctcctaagccatgatggcagagtatctgatagtgaagggtcagatcaagtctcctcggattatgaagatgagtctccccgacatctcggcgaggaagagatggaatcaaaggcatgcacccgttgcggggaaattggacacgttgctagcatgtgtctcacactctgcactcattgtgaagaagaccatccaccaggggagtgtctcacccgcaaggtcacatgttttctgtgcgaaggtgcaaaccatgtgcccaaggattgccaactcagtgtgttgttgaccaagaccgtagaaatccaacgaacaaccctacgattgtctcatcagctagtcagctccaacagcaacatcgacgatatcatccccagcaccaatgctcctcctgctgcacctgactttgcaataaatcatagcgataataccttcaacaccaaccattctctgcaccgacagcctcagcaaagaattgtcgtcgatgaaagaagttgtgtctctccccgacctactccaggccaagcaaagggcaatcaacctccggagggcgataccgagcagaagaccgttattcgcctcaaccagcaatcagaaggaaacttctccggtgaataa

SEQ ID NO: 13762 - DNA, 2871 bp, Oryza sativa
  Clone ID: TFbOSC15235j.C1.o1.fg
atggtgggacagctaggtgggccttccaccctgatcgtctgtcagcaccatccctatcacccgagtaacttcaacaatgactacaacggtggcagtcacaacaacagtaagcagcacaaccacaactcgactccacccccattaatggcaccagcccagtcagatctaccagctatgctggctcagttagaacagctcaagaaggagtccggaggaaagccgggaccctgcttcaactgtggcgagcttggccacttcgctgacaaatgcccgaagcctaggcgtgccgggccaaggtttgtccaggcccatgtcaaccacgcgtccacagaggaggcgcaagcagcacaagaggtcgtacggggtacgtttcctgttaagtcaatccctgcaacagtactttttgattctggtgcaacacattcgttcatttcaaagaagtttgtcgggatgcatgggttaataagagaggaacttagcacaccaatgcgggttcataccccagggaatagctccacttcggtacaattcagcccttctataacaatagaaatccaaagatcaccatttctagccaacctcattcttctggaatccaaggacctagatgtcatacttgggatggattggctgaccaagttcaagggagtcattgattgtgcgaaccgcacagtcaccttgaccaacgagaagggagaaacagtagtgtacaaatcactagtctcaccaaagcaaggggtctctttgaatcagattgaggtggaaatcccagtggtcatcgaggagaagaattcgcggaaattggaggatatccccatagtctgcgagtacccagaagtgttccccgaagacctcactaccatgtcacccaagagagaaattgaattccagattgatttggcaccaggaactgcccctatttacaagagaccgtacagaatggcggccaacgagctagcagagggtgctccggtcatttttgtggagaagaaagacaagacgaagagaatgtgtgtcgactatcgcgcactcaatgaggtcacaatcaaaaacaaatatcccttacctcggatagacgatttgtttgatcagctgaaaggagctaaagtgttttctaagatagacctgcgatcaggctactaccagttgagaattcgggaagaggatattccaaagacggccttcaccactcgtcagttgcttaagaaagatgagaagtttaaatggacagctgagtgcgacaagagttttgaggagctcaaaaagaaattagtatccacaccagttttgattctgcacgaccagatgaaagacttccaggtctattgcgatgcatcccgccacgggcttggatgtgttctaatgcaggaaggtagagtggtcgcatatgcctcgcggcagttgcgtccacatgaagggaattatccaactcatgacctggaattggcagcagtggttcatgctttgaagatctggaggcactatctgattagcaaccgctgcgaagtatatacggaccacaagagtctgaaatacatcttcacccaaccggacctaaatctccgacaacgaagatggttggaactaatcaaagactatgacatgagcattcactaccacccgggtaaagccaatgtggtggcagatgcgctaagcaagaaaagctactgcaatgccctatgcatcgagggcatgtgtgaagaattgcagcaggagcttgaacatctcaatgtgggagtcattgaacacgagttcgtagccgctctggaagcacggcctacgcttgtggatcaagtcagagcggctcaagtaaatgatcctgaaatagctgagctcaagaagaatatgagggttggaaaagcccgagattttcatgaggatgagcatggcacaatctggttgggagaaagattgaaaaggttggcagagctttacctttcaagaatcatgtgtttgcttggggtacctaagaagatagtatctgatcgagggagtcagttcacttcaaaattttggcagaagttgcaagaagaattggggactcgtttgaatttcagcacagcctatcatccgcaaactgatggtcagactgagcgagtcaatcaaatattggaagatatgttgcgagcctatgcacttgactttggcggagcttgggataaaagtctaccgtatgctgaattctcttacaataacagctatcaggccagtttgcaaatggcaccgtttgaagcattgtatggacggaagtgccgcactccgctcttctgggatcaaactggagaacgccaactgttcgggacagaggtgctaaccgaggcagaggaaaaagtcagaactgtcagagaaaggctgaggattgcccagtctcgacagaaaagctacgcggacaaccaccgacgagagctcacgtttgaagcaggggactatgtgtaccttcgtgttactccgctccggggagtgcaccgttttcagacgaaaggcaagttgacaccacgcttcgtgggaccatacaaaatcttggaacgaagaggtgaagttgcttaccagcttgagcttccctccaacatgcttggcatccacagtgtgttccacgtctctcagttgaagaaatgtttgagagttcctgaggaacaggcaagtccggatcaaatcgaaatccaagaagacttgacgtatgtggagaagccgactcgtatcctcgaaaccagcgagagaaggaccagaaacaaagtaatcagattttgcaaggttcagtggagtcatcactcagaagaagaggccacctgggaaagagaagatgagttaaaggccgcccatccgcacctcttcgccagctcttccaaatctcggggtcgagattccgtttaa

SEQ ID NO: 13763 - DNA, 708 bp, Oryza sativa
  Clone ID: TFbOSC26960j.C1.o1.fg
atgcgaactgaagaagaagtacgtaagatgactattaccagcaccgaatggcctccagcagggataactattcctagacgtcaaagaggaaataccttccgaggtgcacgacagttgacccagcacctcctaagccatggtggcagagtatctgatagtgaagggtcagatcaagtctcctcggatgttgaagatgagtctccccgacatctcggcgaggaagagatggaatcaaaggcatgcacccgttgtggagaaattggacacattgctagcaggtgtctcacactctgccctcattgtgaagaagaccatccaccaggtgaatgtcccacccgcaaggtcacatgttttctgtgcgaaggtaccaaccatgtgcccaaggattgccaactcagtgtgttgttgaccaagaccgcagaaatccaacgaacaaccctacgattgtctcatcagctagtcagctccaacagcaacctcgacgatatcatccacagcaccaatgctcctcctgctgcacctgactctgcagtaaatcatagcaataataccttcaacaccaaccattctctgcaccgacggcctcagcaaagaattgtcgtcgatggaagaagttgtgtctctccccgacctactccaggccgagcgaagggcaatcaatctcaggagtgcgataccaagcagaagaccgttatctgcttcaaatag

SEQ ID NO: 13764 - DNA, 1252 bp, Oryza sativa
  Clone ID: TFbOSC32656j.C1.o2.np
acacaccatcacctgggacgagttttcatctgtattcaagagatcccatgttcccgcaggaatgatcacactgagaaaacgagagttccgctacctgaagcaagaagatttgaccgtcacagagtacctgcacgagttccatcgtttggctcactatgcaccagaagatgtggaaaatgatgaagacaaacaagagaagtatctccaggggttaaaagatgagatcacagtgcaactactcctagaggaatatgaagattttgagaaacttgtggacaaagccatacaactcgaaagtgagcataatcggatgaagaactgtaagagaaggattgtcagcatcccagtattcccatgtggtaaccaaagacagcgcacggagccacttcagatcaccggatcttctgttgcgcatcaagagtttccgccccaagaagatggacacaatgcagacaacaacattagcaatactaatgatgatgataccaccaacaaccatgcttcttgccccattagtgaccactcaaatcaagcgtgcaatgtcaacatcattcaccaaggtgtcgacgatagtatcaatgatggcacccaaaatgacaaccctagcaattgtgactctgagaaagactccaatggtgatagcaactatggtaccactgatgccaatgttagcaaggatttccaaccaccaattccaactccaagtcagaatgatcgtccccagacggatagctcagcaaagaagacgttgatttgctacaattgcaaaggaccagggcattactcgagggactgcctgcaaccaaggcaaagtcgatctccacattaccgccaatttacacgaagcagacatcccaatcgtattgtggtcactggagcaaacgccgtacccgtttcactgaaaggcagcaagccaaaggatctcatcgtccccagaagcgtccgcaatccacattaaagaataccacctgttagaggttgacgccaaagatatgaatgataagaagttctagaaccgaagccccatcctcaaccaccgcagcctagtctgggtcagttagaagttcaaccagggacaagtcgggtgaagagaagattccatctgcaacaggagatcgagccaagcgttccagagtggagaagtcctgttaggcaagttggttatagaagacggagcggaagaagtcagacaagaagagaagactgcccaacctatcttcatgctagcctgctcgaatctcggggaccagat

SEQ ID NO: 13765 - DNA, 2722 bp, Oryza sativa
  Clone ID: TFbOSC404962j.C1.o3.np
ctccacgcagcagccccccggaggtgcgccatgtccgacgctcggtctcggcgttcggtcgcctcgagcactcggcgtcagcaggacgccgagctcgccgcagcagaagagcgcaggtgagcaacagctcataccgctgcagcagcagcgagggcggccagactggcggcagcggagttggcagcagccagggcggaggcggaggcggcggaagatgcggcacgtgcggcggaggtagaggttgagaccttgcgcagcagcatcaacggctccatcgccggcgacatcaccgccgacagggagcttgaggagctggcaagaggaagggcacgggagcgagcagagcggtgggcagcagcccacctccacggcggcgacggcggcccaagggaccgcgcgcccgccgacgggaacccagacgggcgcgggcttgctggcgggcgcgggcttgctggcggcagcccggagcccgcacgcggccctcgcaggcagcacggctctctctcccctgaccggcgtcatggtcaccacggcgtccagatggtggtcagggactttggtcccggcggtgggtggcctaccctcaccaaaaccaactacatcgagtgggccgcggtgatgagggtgaggctccaggtgcggcacatgtgggatgcagtccggtacggtgacgtcgactacgacgaggatcggcgggcactggatgccctcatcgctgcagtcccgcccgagatgcagttctcgctttcccagaagcggactgccaaggaggcctaggacgccatcgctgcggcacgcatcggcagcgaccgcgcccgcaagtccacactgcaggcactccgcaaggagtgggagaacctggctttcaagccaggtgaggatgttgatgacttgcagaaaatggtgcagtacggcgacgacacctacgatgaggagagagctgtcgagaagctcttccgctgcgtccctgagaagtacaggcagatcgctcgctcgatcgaatctctgctggacctctccacgatgtcgatcgaggaggcgttaggtcgcctcaaggtcgtcgatggtgatgagccacagcctctctcggggcccatcaccatcggcgggaagctccatctcactcaggagcagtgggaggcctctcagggtgatgggaggaagggggagtcatcttccccgacaggcggccataagccgcgcaaggcgcggggaggtgtccagctatggtgggcgcgaagacgtgccgagggtggcgcccgcagaggcgcccagggcgttgccaccggcaaccacaagccggcacgagacgacgcctgccgcaactgtgacaagcttggccattgggccaaagactgtcgacaaccacgacgtggccaggcccacgtcgcacgggtggaggaagagccggctctgctcctggctcacgcaagcatcgagctacctccagcggcaccggccgcagcagctttcctccaccttgatgagccgaaggtactcgtctccctctgcaacggctccagcaacgacaaagctgatgggtggtacctcgacaccggcgccacccatcacatgaccggccgacgggagttcttcaccgagttcgactccagcgtccgaggctccatcaagttcggggacgcctccggcgtggagatcaagggtgttggcttcgtcaccttcaccgccaagtccggtgagcacaggctgctcacccgagtctactacatccccgcgttgaggaattctatcatcagcgtgggacaactggatgagaacggctcacgcgtgttggtcgaggatggactcatgaggatttgggatcgccgtcgtcgccttcttgccaaggtaaccagaggcactaatcgactctacatcctcagcgcgcaggttgcacaaccagtttgcctcgccgctcgtcgggacgacgaggcgtggcagtggcacgagcgcttcgggcacctccacttcgaggccctgaagcagctcagtgccaaggagatggtgtgaggcatgctgtgccttgaccacgtggagcagctctgcgacgtctgcgtggtgacgaagcagcggcggctcccctttccccagcagacgagcttccgagccaacgagcggctcgagctcgtgcacggggacttgtgtggcccagtgacaccggccacaccaggaggacgacgttacttcctgctgctcgtcgacgacctctcccgctacatgtgggtgatggtcctcggcagcaagggagaggctacggacgccatcaggcatgagcaggctgctgcagaggcggagtgcggccgcaagctgtgcgtgctgcgcaccgacaacggcggcgaattcacagcggctgaattcgcgtcgtactgcgctgatgagggcattcagcgccactacaccacgccgtacagcccgcagtagaacggcgtcgtcgaacggcgcaaccagacagttatggggatggctcgggccctcctcaagcagagggggatgccggtcatcttctggggggaggcggtggtgacggccgcctacatcctcaaccgctcgcctaccaaggccctcgatggcaggacaccgtacgaggcttggcatgggcgcaagccggcggtctcccacctgcgggtcttcggctgcctcgcgttcgccaaggagcttggccacatcggcaatggtcagtatagatatagacattcgttctgttttgcatatgctatgaaag

SEQ ID NO: 13766 - DNA, 1323 bp, Oryza sativa
  Clone ID: TFbOSC417494j.C1.o3.fg
atggatgaagtcgggtgtcgatggacattctccagggcaaatgaaggctacacgagctgcggcccgatgtttaacagagaaaaaggaaagaatgtcagcgggtatgcctcaagtaacttaagtttccaactcaatccaccactggcctcaagagagttaaccagggcacacccttggtccattccaagcatgctgcttagttcacagctatcattggttggaagtcaagaccaaaatcagtacgtgtttgatcgagcctttggcacccaggtcaatgagcttccaatgccagaagagcaggtccccttttgtcatgattgtagagagcaaggacactatgccctgaattgtccatgggtatatgtcaaagaagccccttcccttggtttagcagggcagacatcgctaaaccagcctcctcacaccaagtcaagcttgcagcctagtgtgcaaagtagagagctcaacggagagaatccattgaatccaaggaaatgctttcctcctagcctttcgcaccacgtggggtcacgtactaagcaagccaaaggcaagaagagtaagaatcagaagagaaaagcaccgatgcgaactgaagaagaagtacgtaagatgactattaccagcaccgaatggcctccagcagggataactattcctagacgtcaaagaggaaataccttccgaggtgcacgacagttgacccagcacctcctaagccatggtggcagagtatctgatagtgaagggtcagatcaagtctcctcggatgttgaagatgagtctccccgacatctcggcgaggaagggatggaatcaaaggcatgcacccgttgtggagaaattggacacgttgctagcaggtgtctcacactctgccctcattgtgaagaagaccatccaccaggggagtgtcccacccgcaaggtcacatgttttctgtgcgaaggtacaaaccatgtgcccaaggattgccaactcagtgtgttgttgaccaagaccgcagaaatccaacgaacaaccctacgattgtctcatcagctagtcagctccaacagcaacatcgacgatatcatccccagcaccaatgctcctcctgctgcacctgactctgcaataaatcatagcaataataccttcagcaccaaccattctctgcaccgacagcctcagcaaagaattgtcgtcgatggaagaagttgtgtctctccccgacctactccaggccgagcaaagggcaatcaacctcaggagggcgataccaagcagaaaaccgtcatccgcctcaaacagcaatcagaaggaagcttctcctgtgaatga

SEQ ID NO: 13767 - DNA, 1413 bp, Oryza sativa
  Clone ID: TFbOSC900108j.C1.o26.fg
atgtcatggcacagggttggtgccctgctgctgggggctcagtcctgcctgcctgtcccggaggttccggccgtaggtgggattgggtcggtactcttgtctatggctaggatgggttggaaactatgtcacgtcttccgtctgtataccgtggtgatgtttaacagagaaaaaggaaagaatgtcagcgggcatgcctccagtaactcaagttttcaactcaatccaccactggcctcaagagagttaacaagggcacacccttggtccattccaagcatgctgcttagttcacagctaccattggttggaagtcaagaccaaaatcaatatgtgtttgatcgagcatttgccacccaggtcaatgagcttccaatgccagaagagcatgtccccttttgtcatgattgtagagaacaaggacactatgccttgaattgtccatgggtatatgtcaaagaagccccttcctttggtttagcagggcagacatcgctaaaccagcctcctcgcaccaagtcaagcttgcagcctagtgtgcaaagtgaagagcccaatgaagacaatccattgaatcctagaaaatgctttcctcctagcctttcgcaccacgtggggtcacgtactaagcaagccaaaggcaagaagagtaagaatcagaagagaaaagcaccgatgcgaactgaagaagaagtacgtaagatgactattaccagcaccgaatggcctccagcagggataactattcctagacgtcaaagaggaaataccttccgaggtgcacgacagttgacccagcacctcctaagccatggtggcagagtatctgatagtgaagggtcagatcaagtctcctcggatgttgaagatgagtctccccgacatctcggcgaggaagagatggaatcaaaggcatgcacccgttgtggagaaattggacacgttgctagcaggtgtctcacactctgccctcattgtgaagaagaccatccaccaggtgaatgtcccacccgcaaggtcacatgttttctgtgcgaaggtaccaaccatgtgcccaaggattgccaactcagtgtgttgttgaccaagaccgcagaaatccaacgaacaaccctacgattgtctcatcagctagtcagctccaacagcaacctcgacgatatcatccacagcaccaatgctcctcctgctgcacctgactctgcaataaatcatagcaataataccttcagcaccaaccattctctacaccgacagcctcagcaaagaattgtcatcgatagaagaagttgtgtctctccccgacctactccaggccgagcaaagggcaatcaacctcaggagggcgataccaagcagaagaccgttatccgcttcaaccagcaatcagaaggaagcttcccctgtgaatga

SEQ ID NO: 13768 - DNA, 4593 bp, Oryza sativa
  Clone ID: TFbOSC10731j.C1.o5.fg
atgccgcgctacaagcctaaatacttgtttggtgttgagggatttgtccaggagttgcgtacgatgtcctttgccataggatttgggactgcccctttgtatgcccagattcctcatgatcgtcacgaagagaagtgccgagtcaaagtcaccttgaacagtaatagtgaagatatcccatcagtgatgttcgaagctggagaaggaaactacatccatgcatgtcaggaggtggcaaggatcgccataggagagctccgcgatcgctacagtgatcagttggccgacactgagtatcgctaccatcctcgccaaccccagggaagtaaccatggcagctaccttgagactgaggggattgagaatgatgctaccacaaggcatttggttgagatgctgtgggctatggatgaaacccgtgcggaggttgtgctagcagctcaagatcgtgaagactggaatcgtggtaagatttgcaggctagaggacaaggtggatcgtttggagaaggaactagccgcgttgaagggagaagaaccaccgcagaaggccaggattcgtcttaccgcaaggaagagagctctatttgtccctcgctaccaattggcgccaaaggtccgtgtggtggagaaagaagttaccccagccctagcggatcctccggtcgtcaatatggtgcacactcgcagcaacgggaatggccccaacaacaacaataacaacaacaacaatggagagaatcccacacttgcccaagtcctggctcaacaggcacagcttatgaacatgatgatgcagcaactccagaaccaacagaaccagggaaataaccatgcacctccccagaacaagttagcagaatttcttcgtgtgaggccgcccactttctctagaaccactaatcctgttgaagctagcgattggctgcatgccatagagaagaagttggatttgcttcagtgcactgatcaggagaaggtctcatttgcatcacatcagctgcatggccctgcctctgagtggtgggatcacttccgccttaacagaacttctgctgaacctatcacttggcttgaattcaccgctgctttccggaagacgcatataccatcgggagtgcgtcagttcttcaacaacaatgctggcaacaacatccgcaatcaagctccacgccctgttgcagctccaacacagcaacagcctgccaagagggagcaaggtagcaagcccggggtgtgcttcaactgtggagacccaggacattactctgacaagtgtccgaagccccgacgcgtgaaggttgtccctgcccagagcaactctaccacaccagcatcaaaggcccgtgtcaatcatgttgctgctgcagaagctcaaggtgctccagatgtgattttgggtacgttccttgtcaactcagttcctgcaacagtgcttttcgattctggtgctacacattcatttttatctatgagttttgcgggaaatcatgggatggaagtagaagatcttagacgtcctttgatggttagtaccccaagtaatcaagcactctctttgcaacgtagcccctctgtcagaatagaaattcaagaagtaccatttctagccaatcttatcctgttagaatccaaagaccttgatgtcatcctagggatggactggttagccagatataaaggtgtgatagactgtgccaacagaaaagtaactctcaccagcaatgatggtcgagttgtaactgttcatgcattgtcttctgagtctttaaggtcaagactgaaccaaatgactttggaagagattcctatagtccgggagtatcccgatgtgttcccagacaatttacctggtatgccgcctaaaagggatatagagttcagaatagatttggtaccaggaacaactccgatccataagagaccttatataatggcggccaatgaattagcagtagtcaagagacaagtagatgatttgcttcagaaaggatacatcagaccgagttcatctccatggggagctccggttatttttgtggaaaagaaagatcatacccagaggatgtgtgtggactatcgtgcactaaatgatgtgactatcaagaataagtacccgctgcccagaattgatgatttgtttgatcagcttaaaggtgccactgttttctccaagatagatcttcgatcagggtatcaccagttaagaatcaaagaggaagatatacctaagacagcttttaccactaggtatgggttgtttgaatgtactgttatgtcttttggacttaccaattaccccgctttcttcatgaacttgatgaataaggtgtttatggaatatctagacaagttcgtggtggtctttattgatgacattcttatctactctcgaacaaaagaagagcatgaagaacatcttcaccttgcactagagaagctacgagaacatcaactgtatgccaagtttagcaaatgtgaattttggttgtctgaagtgaagttccttggtcatgtcatctcagccggaggagttgccgttgatcctagtaatgtggaatccgtaatcaactggaaacaaccaaagacagtttcagaggttcacagtttcctaggcctcgcaggatattatcggaggtttatagagaatttttccaagattgctaagcccatgacacgattacttcaaaaggatgtaaagtacaagtggtcagaagaatgtgagcagagttttcaagagttgaagaatcgcttaatatcagctcctattttgattttgccttatccaaagaagggttttcaagtgtattgtgatgcatccaagcttgggttaggttgtgttctgatgcaagatgggaaggtggttgcctatgcatctcgtcagttacgtccgcatgagaagaactaccctactcatgatcttgagttagctgcagtggttcatgcgttgaagatttggcgtcattatcttttcggtactcgtacaaaggtatacactgatcacaagagtttaaagtacatctttactcagccagatctgaacatgagacaacggagatggttggaattaattaaggattatgacgtgggaattcattatcacccgggaaaggctaatgttgtagcagatgctcttagcaggaaaggctattgcaatgctacggaaggacgacagctgccattggagttatgcaaggaatttgaaagattaaatttgggaattgtcagtagaggtttcgttgtagccttagaagcaaagcccactctaattgatcaagttagagaagcccaaattaatgatcctgatattcatgaaatcaagaagaatatgagaagaggaaaagctatcggtttcttggaagatgagcaaggaactgtatggttgggcaagagaatctgcgtccccgacaacaaagatttaaaagatgcaattctgaaagaagctcatgatactttatactccattcaccctggtagtaccaagatgtaccaggatctcaaggaaagattttggtgggcaagtatgaagcgtgaaatcgcagaatacatagcagtatgtgatgtttgtcagcgagtcaaggcagaacatcagaaacccgcaggtttgttgcagcctttgaagattcctgaatggaagtgggaggaaatcggtatggatttaatcactggtctacctagaacgtcattaggccatgactctatttgggtgatagacgacagacttaccaaagtggctcatttcatcccagtaaagacaacctattccggaagtcggttggcggaattgtatatggcaaggattgtgtgtttgcaccgcgtccctaagaaaatagtgtctgatcgaggcagtcagtttacttcaaagttttggaagaagcttcaggaagagatgggttctaagctgaactttagtactgcttatcatccgcagacagacggacaaaccgaaagggtaaaccagattttggaagacatgttgagagcttgtgctttagacttcggtggaagttgggataagaatttgccttacgccgaattctcgtacaacaacagttatcaagctagtcttcagatggctccttacgaagcactgtatggtcggaagtgccgcactctgcttttgtgggatcaaacgggagaacgtcaggttttcgggacggatatcctaagggaagcagaagaaaaggtgaaaatcattcaagaaagattgtgcgtggcccagtctcgtcataagagttatgccgacaatcgtcgtagagatctaagttttgacgaaggagattatgtgtactttcgtggcacgcctcttcgaggagttcatcgttttcacaccaaaggaaaattggcaccacgttttgtgggaccttataagattgtcagtagaagaggagaggttgcttatcagttggagttacctcaatctttggcaggagtccataatgtgttccatgtgtcgcaattgaaaaagtgtttaaggattccgacgtttccggagagtccgtttttacaggagaagaatttgaagagttccaaggccagcaaggcaagtcacacagatcccaaacaaccctttgagcatgttgatcctgtttaa

SEQ ID NO: 13769 - DNA, 1767 bp, Oryza sativa
  Clone ID: TFbOSC401125j.C1.o1.fg
atgccgcgctacaagcctgagtacttgtttggtgttgagggatttgtccaggagttgcgtacgatgtcctttgccataggatttgggactgcccctttgtatgcccagattcctcatgatcgtcacgaagagaagtgccgagtcaaagtcaccttgaacagtaatagtgaagatatcccatcagtgatgttcgaagctggaggaggaaactacatccatgcatgtcaggaggtggcaaggatcgccataggagagctccgcgatcgctacagtgatcagttggccgacactgagtatcgctaccatcctcgccaaccccagggaagtgaccgtggcggctaccttgagactgaggagattgagaatgatgctaccacaaggcatttggttgagatgctgtgggctatggatgaaacccgcgcggaggttgtgctagcagctcaagatcgtgaagaccggaatcgtggtaagatttgcaggctagaggacaaggtggatcgtttggaaaaggaactagccgcgttgaagggagaagcaccaccgcagaaggccaggattcgtcttaccgcaaggaagagagctctatttgtccctcgctaccaattggcgccaaaggtccgtgtggtggagaaagaagttaccccagccctagcggatcctccggtcgtcaatcacactaatcctggtgaagctggtgattggctgcatgccatagagaagaagttggatttgcttcagtgcattgatcaggagaaggtctcatttgcatcacaccagctgcatggccctgcctctgagtggtgggatcacttccgccttaacagaactactgctgaacctatcacttggcttgaattcaccgctgcgttccggaagacgcatataccatcgggagtggtgtctctcaagaagaaggaattcaggtcgctcacccagggatctcgcacggtcaccgagtatctgcacgagttcaatcgtctggctcgttatgctccggaagatgtgcgcactgatgaagagcgccaggagaggttcttggaaggacttaatgatgagctttcttacccactcatgactggggattatcatgatttccagaagttagtggataaggctattcgccaggaggacaagtacaaccgcatggagcagaagaaacgccggattgctcacttcaaggcacaacaggggaatagtcagaggccgcgtcttactttaggaccccagtccatgccacagggaggttcttcgtctgttgttcgtccgcagcatcagttcttcaacaacaatgctggcaacaacatccgcaatcaagctccacgccctgttgcagctccaacacagcaacagcctgccaagagggagcaaggcagcaagcccggggtgtgcttcaactgtggagacccaggacattactctgacaagtgtccgaagccccgacgcgtgaaggttgtccctgcccagaacaactctaccgcaccagcatcaaaggcccgtgtcaatcatgttgctgctgcagaagctcaaggtgctccagatgtgattttgggtacgttccttgtcaactcagttcctgcaacagtgcttttcgattctggtgctacacattcatttttatctatgagttttgcgggaaatcatgggatggaagtagaagatcttagacgtcctttgatggttagtaccccaagtaataattgtactctattatcaatttgttattgtgtgcctcggctgattcctggacgagggttcacacacatgtaa

SEQ ID NO: 13770 - DNA, 2070 bp, Oryza sativa
  Clone ID: TFbOSC401249j.C1.o59.np
aaggtgcgctgtggtggattgtgttgtgcgaggggtactgtcacagctcctttccgagctcttggtttggaatggtatattcctggtttggagatagatctgtacagccggatgccgcgctacaagcctgagtacttgtttggtgttgagggatttgtccaggagttgcgtacgatgtcctttgccataggatttgggactgcccctttgtatgcccagattcctcatgatcgtcacgaagagaagtgccgagtcaaagtcaccttgaacagtaatagtgaagatatcccatcagtgatgttcgaagctggaggaggaaactacatccatgcatgtcaggaggtggcaaggatcgccataggagagctccgcgatcgctacagtgatcagttggccgacactgagtatcgctaccatcctcgccaaccccagggaagtgaccgtggcggctaccttgagactgaggagattgagaatgatgctaccacaaggcatttggttgagatgctgtgggctatggatgaaacccgcgcggaggttgtgctagcagctcaagatcgtgaagaccggaatcgtggtaagatttgcaggctagaggacaaggtggatcgtttggaaaaggaactagccgcgttgaagggagaagcaccaccgcagaaggccaggattcgtcttaccgcaaggaagagagctctatttgtccctcgctaccaattggcgccaaaggtccgtgtggtggagaaagaagttaccccagccctagcggatcctccggtcgtcaatatggtgctcactcgcagcaacgggaatggccccaacatcaacaataacaacaacaacaacaatggagagaatcccacacttgcccaagtcctggctcaacaggcacagctgatgaacatgatgatgcagcaactccagaaccagcagaaccagggaaataaccatgcacctccccagaacaagttagcagaatttcttcgtgtgaggccgcccactttctctagcaccactaatcctgttgaagctggtgattggctgcatgccatagagaagaagttggatttgcttcagtgcattgatcaggagaaggtctcatttgcatcacaccagctgcatggccctgcctctgagtggtgggatcacttccgccttaacagaactactgctgaacctatcacttggcttgaattcaccgctgcgttccggaagacgcatataccatcgggagtggtgtctctcaagaagaaggaattcaggtcgctcacccagggatctcgcacggtcaccgagtatctgcacgagttcaatcgtctggctcgttatgctccggaagatgtgcgcactgatgaagagcgccaggagaggttcttggaaggacttaatgatgagctttcttacccactcatgactggggattatcatgatttccagaagttagtggataaggctattcgccaggaggacaagtacaaccgcatggagcagaagaaacgccggattgctcacttcaaggcacaacaggggaatagtcagaggccgcgtcttactttaggaccccagtccatgccacagggaggttcttcgtctgttgttcgtccgcagcatcagttcttcaacaacaatgctggcaacaacatccgcaatcaagctccacgccctgttgcagctccaacacagcaacagcctgccaagagggagcaaggcagcaagcccggggtgtgcttcaactgtggagacccaggacattactctgacaagtgtccgaagccccgacgcgtgaaggttgtccctgcccagaacaactctaccgcaccagcatcaaaggcccgtgtcaatcatgttgctgctgcagaagctcaaggtgctccagatgtgattttgggtacgttccttgtcaactcagttcctgcaacagtgcttttcgattctggtgctacacattcatttttatctatgagttttgcgggaaatcatgggatggaagtagaagatcttagacgtcctttgatggttagtaccccaagtaataattgtactctattacggtctgacccgccagaccgatgg

SEQ ID NO: 13771 - DNA, 4902 bp, Oryza sativa
  Clone ID: TFbOSC401778j.C1.o1.fg
atgcacgcccgagctgccgccggtggtgacgtcaccgccaacgtcatcgtcgtcgttccccgtggcccggttccgacgtttttggagagtctgagtttgcaggagaagattttgaagagttccaaggccagcaaggcaagtcacacagatcccaaacaacccttgagcatgttgatcccgtttaaagctattgtttctattcaactattgcatttattttcgaatatgccgcgctacaagcctgagtacttgtttggtgttgagggatttgtccaggagttgcgtacgatgtcctttgccataggatttgggactgcccctttgtatgcccagattcctcatgatcgtcacgaagagaagtgccgagacaaagtcaccttgaacagtaatagtgaagatatcccatcagtgatgttcgaagctggaggaggaaactacatccatgcatgtcaggaggtggcaaggatcgccataggagagctccgcgatcgctacagtgatcagttggccgatactgagtatcgctaccatcctcgccaaccacagggaagtgactgtggcagctaccttgagactgaggggattgagaatgatgctaccacaaggcatttggttgagatgctgtgggctatggatgaaacccgagcggaggttgtgctagcagctcaagatcgtgaagaccgaaatcgtggtaagatttgcaggctagaggacaaggtggatcgtttggagaaggaactagccgtgttgaagggagaagcaccaccgcagaaggccagggttcgtcttaccgcaaggaagagagctctattcatccctcgctaccaattggtgccaaaggtccgtgtggtggagaaagaagttaccccagccctagcggatcctccggtcgtcaatatggtgctcactcacagcaacgggaatggccccaacatcaacaataacaacaacaacaatggagagaatcccacacttgcccaagtcctggctcaacaggcacagcttatgaacatgatgatgcagcaactccagaaccagcagaaccagggaaataaccatgcacctccccagaacaagttagcagaatttcttcgtgtgaggccgcccactttctctagcaccactaatcctgttgaagctcgtgattggctgcatgccatagagaagaagttggatttgcttcagtgcactgatcaggagaaggtctcatttgcatcacaccagctgcatggccctgcctctgagtggtgggatcacttccgccttaacaggactactgctgaacctatcacttggcttgaattcaccgctgctttccgaaagacgcatataccatcgggagtggtgtctctcaagaagaaggaattcaggtcgctcacccagggatctcgcacggtcaccgagtatctgcacgagttcaaccgtttggctcgttatgctccggaagatgtgcgcactgatgaagagagccaggagaggttcttggaaggacttaatgatgagctttcttaccaactcatgactggggattatcatgatttccagaagttagtggataaggctattcgccacgaggacaagtacaaccgcatggagcagaagaaacgccggattgctcagttcaaggcacaacaggggaatagtcagaggccgcgtcttactttaggaccccagtccatgccacagggaggttcttcgtctattgttcgtttgcagcgtcagttcttcaacaacaatgctggcaacaacatccgcaatcaagctccacgacctgttgcagctccaacacagcaacagcctgccaagagggagcaaggcagcaagcccggggtgtgcttcaactgtggagacccaggacattactctgacaagtgtccgaagccccgacgcgtgaaggttgtctctgcccagagcaactctaccgcaccagcatcaaaggcccatgtcaatcatgttgctgctgcagaagatcaaggtgctccagatgtgattttgggtacattccttgtcaactcagttcctgcaacagtgcttttcgattctggtgctacacattcatttttatctatgagttttgcgggaaatcatgggatggaagtagaagatcttagacgtcctttgatggttagtaccccaagtaatcaagcactttctttgcaacgtagcccctctgtcagaatagaaattcaagaagtaccatttctggccaatcttatcctattagaatccaaagaccttgatgtcatcctagggatggactggttagccagatataaaagtgtgatagtctgtgccaacagaaaagtcaagtctgaaccaatagcttcggaagagattcccatagtacaggaatacccggacgtgttcccggacgatttacctggtatgccgcctaaaagagatattgaattcagaatagatctgaaagatcatacccagaggatgtgtgtagactatcgtgcactaaatgatgtgactatcaagaataagtacccgctgcccagaattggtgatttgtttgatcagcttaaaggtgccaccgttttctccaagatagatcttcgatcagggtatcaccagttgagaatcaaagaggaagatatacctaagacaacttttaccactaggtatgggttgtttgaatgtactgttatgtcttttggacttactaatgcccccgctttcttcatgaacttgatgaataagtttagcaagtgtgaattttggttgtctgaagtgaagttccttggtcacgtcatctcagccggaggagttgccattgatcctagtaatgtggaatccgtaaccaactggaaacaaccaaagacagtttcagagattcgcagtttcctaggcctcgcaggatattatcggaggtttatagagaatttttccaagattgctaagcccatgacacgattacttcaaaaggatgtaaagtacaagtggtcagaagaatgtgagcagagttttcaagagttgaagaatcgcttaatatcagctcctattttgattttgcctgatccaaagaagggttttcaagtgtattgtgatgcatccaagcttgggttaggttgtgttctgatgcaagatgggaaggtggttgcctatgcatctcgtcagttacgtccgcatgagaagaactaccctactcatgatcttgagttagctgcagtggttcatgcgttgaagatttggcgtcattatcttttcggtactcgtacagaggtgtacaccgatcacaagagtttaaagtacatctttactcagccagatctgaacatgagacaacagagatggttggaattaattaaggattatgacatgggaattcattatcacccgggaaaggctaatgttgtagcagatgctcttagcaggaaaggctattgcaatgctacggaaggacgacagttgccattggagttatgcaaggaatttgaaagattaaatttgggaattatcagtagaggtttcgttgcagccttagaagcaaagcccactctaattgatcaagttagagaagcccaaattaatgatcctgatattcaagaaatcaagaagaatatgagaagaggaaaagccatcggtttcgtggaagatgggcaaggaactgtatggttgggcgagagaatctgcgtccccgacaacaaagatttaaaagatgcaattctgaaagaagctcatgatactttatactccattcaccctggtagtaccaagatgtaccaggatctcaaggaaagattttggtgggcaagtatgaagcgtgaaatcgcagaatacgtagcagtatgtgatgtttgtcagcgggtcaaggcagaacatcagaaacccgcaggtttgctgcagcctttgaagattcctgaatggaagtgggaggaaatcggtatggatttcatcactggtctacccagaacgtcatcaggccatgactctatttgggtgatagtcgacagacttaccaaagtggctcatttcatcctagtaaagacaacctattccggaagtcggttggcggaattgtatatggcaaggattgtgtgtttgcatggcgtccctaagaaaatagtgtctgatcgaggcagtcagtttacttcaaagttttggaagaagcttcaggaagagatgggttctaagctgaactttagtactgcttatcatccgcagaccgacggacaagccgaaagggtaaatcagattttggaagacatgttgagagcttgtgctttagacttcggtggaagttgggataagaatctaccttatgcggaattctcgtacaacagcagttatcaagctagtcttcagatggctccttacgaagcactttataatcggaagtgccgcactccgcttttgtgggatcaaacgggagaacgtcaggttttcaggatggacatcctgagggaagcagaagaaaaggtgaaaatcattcaagaaagattgcgtgtggcccagtctcgtcataagagttatgccgacaatcgtcgtagagatctaagttttgacgaaggagattatgtgtaccttcgtgtcacgcctcttcgaggagttcatcgttttcacaccagaggaaagttggcaccgcgttttgtgggaccttataagattgtcagtagaagaggagaggttgcttatcagttggagttacctcaatctttggcaggagtccataatgtgttccatgtgtcgcaattgaaaaagtgtttaagggtacctaccgaagaagctaatcttgaacagatagaagtccaagaggacctgacctatgttgagaaaccaatccgtatcttggaaatagatgagagaagaaccagaaatcgagttatccgtttttgcaaagtccatggagtaatcactcggaagaagaatcaacttgggaacgagaagatgaattga

SEQ ID NO: 13772 - DNA, 1323 bp, Oryza sativa
  Clone ID: TFbOSC401829j.C1.o8.fg
atggatgaagtcgggggtcgatggacattctccagggcaaatgaaggctacacgagctgcggcccgatgtttaacagagaaaaaggaaagaatgtcagcgggtatgcctcaagtaacccaagttttcaactcaatccaccactggcctcaagagagttaaccagggcatacccttggtccattccaagcatgctgcttagttcacagctaccattagttggaagtcaagaccaaaatcagtatgtgtttgatcgagcatttgccacccaggtcaatgagcttccaatgctagaagaggatgtccccttttgtcacgattgtagagagcaaggacactatgccctgaattgtccatgggtatatgccaaagaagccccttcctttggtttagcagggcagacatcgctaaaccagcctcctcgcaccaagtcaagcttgcagcctagtgtacaaaggagagagcctaatggagagaatccattgaatcccgggaattgctttcctcctagcccttcgtaccacgtggggtcacgtgctaagcaagccaaaggcaagaagagtaagaatcagaagagaaaagcaccgatgcgaactgaagaagaagtacgtaagatgactattaccagcaccgaatggcctccagcagggataactattcctagacgtcaaagaggaaataccttccgaggtgcacgacagttgacccagcaccttctaagccatggtggcagagtatctgatagtgaagggtcagatcaagtctcctcggattatgaagatgagtctctccgacatctcggcgaggaagagatggaatcaaaagcatgcccccgttgtggagaaattggacacgttgctagcctgtgtttcacactctgcccttattgtgaggaagaccatccaccaggtaaatgtcccacccgcaaggtcacatgttttctgtgcgaaggtaccaaccatgtgcccaaggattgccaactcagtgtgttgttgaccaagaccgcagaaatccaacgaacaaccctacgattgtctcatcagctagtcagctccaacatcaacatcgacgatatcatccccagcaccaatgctcctcctgctgcacctgactctgcagtaaatcatagcaataataccttcaacaccaaccattctctgcaccgacggcctcagcaaagaattgtcgtcgatggaagaagttgtgtctctccccgacctactccaggccgagcgaagggcaatcaatctcaggagtgcgataccaagcagaagaccgttattcgcctcaatcagcaatcagaaggaaacttctcttgtgaatga

SEQ ID NO: 13773 - DNA, 4113 bp, Oryza sativa
  Clone ID: TFbOSC900386j.C1.o22.fg
atgttcgaagctggaggaggaaactacatccatgcatgtcaggaggtggcaaggattgccataggagagctccgcgatcgctacagtgatcagttggccgacactgagtatcgctaccatcctcgccaaccccagggaagtgaccgtggcagctaccttgagactgagaggattgagaatgatgctaccacaaggcatttggttgagatgctgtgggctatggatgagacccgcgcggagactgtgttagcagctcaagatcgtgaagaccggaatcgtggtaagatttgcaagctagaggacaaggtggatcgtttggagaaggaactagccgcgttgaagggagaagcaccaccgcagaaggccaggattcgtcttacggcaaggaagagagctctatttgtccctcgctaccaaatggcgccaaaggtccgtgtggcggagaaagaagttaccctagccctagcggatcctccggtcgtcaatatggtgctcactcgcagcaacgggaatagccccaacatcaacaataacaacaacaacaatggagagaatcccacacttgcccaagtcctggctcaacaggcacagcttatgaacatgatgatgcagcaactccagaaccagcagaaccagggaaataaccatgcacctccccagaacaagttagcagaatttcttcgtgtgaggccgcccactttctctagcaccactagtcctgttgaacctggtgattggctgcatgccatagagaagaagttggatttgcttcagtgcactgatcaggagaaggtctcatttgcatcacaccaactgcatggccctgcctctgagtggtgggaccacttccgccttaacaggactactgttgaacctatcacttggcttgaattcaccgctgctttccggaagatgcatataccatcgggagtgttgtctctcaagaagaaggaattcaggtcgctcactcaggggtctcgctctgttactgagtatctgcacgagttcaatcgtctggctcgttatgctccggaagatgtgcgcactgataaacagcgccaggagaggttcttggaaggacttaatgatgagctttcttacccactcatgactggggattatcatgatttccagaagttagtggataaggctattcgtcaggaggacaatcagaggccgcatcttactttaggaccccagtccctgccacagggaggttcttcgtctgttgttcgtccgcagcgtcagttcttcaacaacaatgctggcaacaacatccgcaatcaagctccacgccctgttgcagctccaacacagcaacagcctgccaagagggagcaaggcagcaagcccggggtgtgcttcaactgtggagacccaggacattactctgacaagtgtccgaagccccgacgcgtgaaggttgtccctgcccagagcaactctaccgcaccagcattaaaggcccgtgtcaatcatgttgccgctgcagaagctcaaggtgctccagatgtgattttggaatccaaagaccttgatgtcatcctagggatggactggttagccagatataaaggtgtgatagactgtgccaacagaaaagtaactctcaccagcaatgatggtcaagttgtaattgttcatgcattgtcttctgagtctttaaggtcaagtctgaaccaaatgactttggaagagattcctatagtccgggagtatcccgatgtgttcccagacgatttacctggtatgccacctaaaagggatatagagttcagaatagatttagtactaggaacaattccgatccataagagaccttatagaatggcagccaatgagttggcagaagtcaagaggcaagtagacgatttgcttcagaaaggatacatcagaccaagttcatctccatggggagctccggttatttttgtggaaaagaaagatcatacccagaggatgtgtgtggactatcgtgcactaaatgacgtgactatcaagaataagtacccgctgcccagaattgatgatttgtttgatcagcttaaaggtgccaccgttttctccaagatagatcttcgatcagggtatcaccagttgagaatcaaagaggaagatatacctaagacagcttttaccactaggtatgggttgtttgaatgtactgttatatcttttggacttaccaatgcccccgctttcttcatgaacttgatgaataaggtgtttatggaatacctagacaagtgcgtggtggtctttattgatgacattcttatctactcccgaaccaaagaagagcatgaagaacatcttcgccttgcactaaagaagctacgagaacatcaactgtatgccaagtttagcaagtgtgaattttggttgtctgaagtaaagttccttggtcacgtcatctcagcaggaggagttgctgtcgatcctagtaatgtggaatccgtaaccaactggaaacaaccaaagacagtttcagagattcgcagtttcctaggcctcgcaggatattatcggaggtttatagagaatttttccaagattgctaagcccatgacacggttacttcaaaaggacgtaaagtacaagtggtcagaagaatatgagcagagttttcaagagttgaagaatcgcttaatattagctcctattttgattttacctgatccaaagaagagtttccaagtgtattgcgatgcatccaaaattgggttaggttgtgttctgatgcaagatgggaaggtggttgcctatgcatctcgtcagttacgtccgcatgagaagaactaccctactcatgatcttgagttaactgcagtggttcatgcgttgaaaatttggcgtcactatcttttcggtactcgtacagaggtgtacaccgatcacaagagtttaaagtatatctttactcagccagatctgaacatgagacaacggagatggttggaattaattaaggattatgatatgggaattcattatcacccgggaaaggctaatgttgtagcagatgctcttagcaggaaaggctattgcaatgctacggaaggacgactgccattggagttatgcaaggaatttgaaagattaaatttgggaattgtcagtagaggtttcgttgcagccttagaagcaaagcccactctaatcgatcaggttagagaagcccaaattaatgatcctgatattcaagaaatcaagaagaatatgagaagaggaaaagctatcggtttcttggaagatgagcaaggaactgtatggttgggcgagagaatctgcgtccccgacaacaaagatttaaaagatgcaattctgagagaagctcatgatactttatactccattcaccctggtagtaccaagatgtaccaggatctcaaggaaagattttggtgggcaagtatgaagcgtgaaatcgcagaatacgtagcagtatgtgatgtttgtcagcgagtcaaggcagaacatcagaaacccgcaggtttgctgcagcctttgaagattcctgaatggaagtgggaggaaatcgacggacaaaccgaaagggtaaataagattttggaagacatgttgagagcttgtgctttagacttcggtggaagttgggataagaatctaccttatgcggaattctcgtacaacaacagttatcaagctagtcttcagatggctccttacgaagcactgtatggtcggaagtgccgcactccgcttttgtgggatcaaacgggagaacgtcaggttttcgggatggatatcctgagggaagcagaagaaaaggtgaaaatcattcaagaaagattgcgtgtggcccagtctcgtcataagagttatgccgacaatcgtcgtagagatctaagttttgaagaaggagatcatgtgtaccttcgtgtcacgcctcttcgaggagttcatcgttttcacaccaaaggaaaattggcaccgcgttttgtgggaccttataagattgtcagtagaagaggagaggttgcttatcagttggagttacctcaatctttggcaggagtccataatgtgttccatgtgtcgcaattgaaaaagtgtttaagggtacctaccgaagaagctaatcttgaatag

SEQ ID NO: 13774 - DNA, 3135 bp, Oryza sativa
  Clone ID: TFbOSC30542j.C1.o1.fg
atgtcatacacaccgcctggccgccgtggtggtggcggcggcgggggaagcggcaacggccgcggcagcgcgagcggcagcggcgtggggaattgcgcagacggcgcatcactcccgctagtgcctcaggggagagatgctgggcacactgcccgtctcccgatcctgtcgaggacaaattatccggactgggcactgttgatgcgcgtaaacctgcaggcgcaggggctctggacggccatcgatcctggctacgcggagtaccgcgaggatcgtgcagcgctctcggcgattctccaagctgtgccgcgtgagatgttgcgtggcctggcgaagcacaattcggcgaaggcgacgtgggatgccattaaaaccatgcgggtcagtgtcgaccgcgtgcgtgaggcgaaggagcagggattccgccgtcagttcgaggcgatgcgcttcaaggacggggagacgccagaggaatttgcaatgcggctcactgccgtcgttgcggacattcgcgacatgggcggagtcatggaagacgaacacatcaacaagaagctgctgcgtgttgtccccaagaagtacaagccggtggcgatttccctcgagcagctcctcgacgtgaagaccatggccctggaggagctcgtcgggcggctgtcgacggtcgactcttacagtgatgacgaggaggcaagtgatggcagcaaattgtacctcactgaggagcagtggcaggcccgtgtcaagcagcgggagcaggagggatccagcagcagcaacaagggccgggcgggctctagcaaccagaaccgtcgaggtaaggccggcgattcaccgaagggaaagaagatggccaccggcggccatggccgtcgtgacatctctaaggtgaagtgtttcaattgcgatgaatacggtcattactcgaagcagtgccgtaagccgcgtcgccaacgtcggggagaggcgaatgcgaatctggtccaggctgaggaagaaccaactctgctcatggcacacgtgatgggggtgtcgctcgccggcgaagcggccattggtcgaacaccttgtgtgcaggaagtgcatctcacggagaagaaggttgtgcttgaccgcgaggatgggcgtgaggaggagaagacttcagagtggttcctggacaccggggccacgaatcacatgacgggcgcacgctcggcgttcgcggagcttgacactggtgttgtgggcacggttaaattcggcgatggctcggtgattgacatccaggggcacggaactgtggtgtttcagtgcaagaatggtgatcaccgctcactggaggcagtgtactacatccccaagctgagaaaaaacatcgtcagtgttggtcgcctcgacgcgcgcggctacgacgcacacatttggcatggtgttttcacgttgcgttacccggaagggatgctgctagctaaggcacttcggaggttggcacaaggaggcatggtccgcgggctccagcaaattgatcataatgatcagttgtgtgacggggcacagacggcgctcgagctggtgcacggtgacctctgcggaccaatcacgccggcgacgccggggggcaagaagtatttcttgctcctggtcgatgacatgagtcgtcacatgtggatacgactcctctctgccaaacacgaagcatcggcggcgattaagcagttccaagccggcgtggagaaggagagcaatcggaagctcatggcgctgcgcatcgatcgcgggggtgaattcacctctgtagagttcatggagtactgcgcggatacaggggtgaagcgtcaactcactgcaccctactcaccgcagcagaacggcgtagtggagcggcgcaaccagactgtggtggcagcggcgaggtccatgctgaaggcggcaaacatgccggcatatttctggggagaggtggtggttgcagccgtctacgtcctgaacagatcaccaacgaagagtcttgatggggtgacgccgtatgaagcgtggcatggtcgccgacccactgtcgaacacctgcgtgtgtttgggtgtgtgggctatgttaagacggccaagccaaacttgagaaagcttgatgatcatggcacgaggatggtcttcattggctacgagcaaggatcaaaagcctacaggatgtatgatcctgtggcgcgacgcctgtgtgtgtcgcgcgacgtcatttttgatgggacgacgttctgggactggggcagcaacactgatgaagaaggagatcaggatgcctatgtggagtttacggtggagaatttcacagtcccagtccaagggggtgagacacatgcccaggatgcagcagtcactcctaccatgctagcaacatcaccaacatcaagcaccggaactgcaataactctgccatctggtgttgaattctgttcctctccaactgatgctagtgaagggactaatgaagggcccaggaggtacagaacagtggcaaacacgcttgccactacagctccaatccttgattttgattacagtgatcaatgccttatggcagcagaggaaccagcaaatttcttggaggctgagcaggagagctgctggaggaaggccatgcttgaagagatggactcaattgaaggtaacaacacttggtttctctgtgatttgccctctagccacagagcaatagggttggagtgggtttataaaatcaaacgtgatgccaaagatgccattgtgaagtacaaagctcgattggtggcaaagggatatgtccaacaacatggagttgattttgatgaagtgtttgccccagtggcgaggatggagactgtgcgattgctgattgcaatggctgctcatcagggatgggaagttcatcacatggatgtgaaatcagctttcttgaatagggaattggaaaaagatgtttatgtggttcaaccacctggttttgttgttgatggaaaagaagacaaggtgttgaaactgaagaaggccctatatggactaaaacaagcaccacgtgcatggtatgccaaattggattctagtcttgtgagcctgaattttgtcaagagtggtgtcgaaagtgctgtgtatattcaaggagagaagaactcacgacttgtg

SEQ ID NO: 13775 - DNA, 3849 bp, Oryza sativa
  Clone ID: TFbOSC900297j.C1.o6.fg
atgtcatacacaccgcctggccgccgtggtggtggcggcggcgggggaagcggcaacggccgcggcagcgcgagcggcagcggcgtggggaattgcgcagacggcgcatcactcccgctagtgcctcaggggagagatgctgggcacactgcccgtctcccgatcctgtcgaggacaaattatccggactgggcactgttgatgcgcgtaaacctgcaggcgcaggggctctggacggccatcgatcctggctacgcggagtaccgcgaggatcgtgcagcgctctcggcgattctccaagctgtgccgcgtgagatgttgcgtggcctggcgaagcacaattcggcgaaggcgacgtgggatgccattaaaaccatgcgggtcagtgtcgaccgcgtgcgtgaggcgaaggagcagggattccgccgtcagttcgaggcgatgcgcttcaaggacggggagacgccagaggaatttgcaatgcggctcactgccgtcgttgcggacattcgcgacatgggcggagtcatggaagacgaacacatcaacaagaagctgctgcgtgttgtccccaagaagtacaagccggtggcgatttccctcgagcagctcctcgacgtgaagaccatggccctggaggagctcgtcgggcggctgtcgacggtcgactcttacagtgatgacgaggaggcaagtgatggcagcaaattgtacctcactgaggagcagtggcaggcccgtgtcaagcagcgggagcaggagggatccagcagcagcaacaagggccgggcgggctctagcaaccagaaccgtcgaggtaaggccggcgattcaccgaagggaaagaagatggccaccggcggccatggccgtcgtgacatctctaaggtgaagtgtttcaattgcgatgaatacggtcattactcgaagcagtgccgtaagccgcgtcgccaacgtcggggagaggcgaatgcgaatctggtccaggctgaggaagaaccaactctgctcatggcacacgtgatgggggtgtcgctcgccggcgaagcggccattggtcgaacaccttgtgtgcaggaagtgcatctcacggagaagaaggttgtgcttgaccgcgaggatgggcgtgaggaggagaagacttcagagtggttcctggacaccggggccacgaatcacatgacgggcgcacgctcggcgttcgcggagcttgacactggtgttgtgggcacggttaaattcggcgatggctcggtgattgacatccaggggcacggaactgtggtgtttcagtgcaagaatggtgatcaccgctcactggaggcagtgtactacatccccaagctgagaaaaaacatcgtcagtgttggtcgcctcgacgcgcgcggctacgacgcacacatttggcatggtgttttcacgttgcgttacccggaagggatgctgctagctaagttccaagccggcgtggagaaggagagcaatcggaagctcatggcgctgcgcatcgatcgcgggggtgaattcacctctgtagagttcatggagtactgcgcggatacaggggtgaagcgtcaactcactgcaccctactcaccgcagcagaacggcgtagtggagcggcgcaaccagactgtggtggcagcggcgaggtccatgctgaaggcggcaaacatgccggcatatttctggggagaggtggtggttgcagccgtctacgtcctgaacagatcaccaacgaagagtcttgatggggtgacgccgtatgaagcgtggcatggtcgccgacccactgtcgaacacctgcgtgtgtttgggtgtgtgggctatgttaagacggccaagccaaacttgagaaagcttgatgatcatggcacgaggatggtcttcattggctacgagcaaggatcaaaagcctacaggatgtatgatcctgtggcgcgacgcctgtgtgtgtcgcgcgacgtcatttttgatgggacgacgttctgggactggggcagcaacactgatgaagaaggagatcaggatgcctatgtggagtttacggtggagaatttcacagtcccagtccaagggggtgagacacatgcccaggatgcagcagtcactcctaccatgctagcaacatcaccaacatcaagcaccggaactgcaataactctgccatctggtgttgaattctgttcctctccaactgatgctagtgaagggactaatgaagggcccaggaggtacagaacagtggcaaacacgcttgccactacagctccaatccttgattttgattacagtgatcaatgccttatggcagcagaggaaccagcaaatttcttggaggctgagcaggagagctgctggaggaaggccatgcttgaagagatggactcaattgaaggtaacaacacttggtttctctgtgatttgccctctagccacagagcaatagggttggagtgggtttataaaatcaaacgtgatgccaaagatgccattgtgaagtacaaagctcgattggtggcaaagggatatgtccaacaacatggagttgattttgatgaagtgtttgccccagtggcgaggatggagactgtgcgattgctgattgcaatggctgctcatcagggatgggaagttcatcacatggatgtgaaatcagctttcttgaatagggaattggaaaaagatgtttatgtggttcaaccacctggttttgttgttgatggaaaagaagacaaggtgttgaaactgaagaaggccctatatggactaaaacaagcaccacgtgcatggtatgccaaattggattctagtcttgtgagcctgaattttgtcaagagtggtgtcgaaagtgctgtgtatactcaaggagagaagaactcacgacttgtggttggtgtatatgtggatgatctcattattacaggagcaagtctgatggaaataaacaagtttaaggagcagatgcaagctctttttaaaatgagtgatctcggtctgctctcttattatctcgggatggaggtgaaacagggaaaggaagggatcacagtgtctcaaggtgcatatgcagcaaagatacttgacaaagctgggatgagggattgtaatccatgtcagactcccatggatgctcggttgaagttgagcaaggagggtggagaatgtgtggaggaaactcaattcagaagcataattgggagcttaaggtacttggtgaacacaagacctgatctaagttattcggttggttatgttagcaggtttatggagaaaccgacctctgaacattgggctgccatgaaacatattttgaggtatgtggcaggtactctgaatctcggggtggaattcagaaagaagcagcatcaggttcctcagctgaatggctatagtgacagtgatatggctggggatattgatgatagaaagagtacaaccggagttctattcaaactgggagacagtttgattagttggcagtcacaaaaacaaaaggtggtagcattatcttcgtgtgaggctgaatatatagctgctgcaactgctgctgtacaaggagtatggctggctcgaccgataggtgagttggaaggccaagaacctggttgtgcactgatcaaggttgataacaagtctgctataagtctctgcaagaatcctgtgcttcatgatcgcagtaaacatattgatacaaagtttcatttcatccgggattgtgttgatcaaaaacgggtggaggtggaatacataaggtcagaggaccaacttgcagatattttaacaaagcctcttggtaagattcgatttctggagttgagaggcaagctgggattagttccagtctga

SEQ ID NO: 13776 - DNA, 258 bp, Oryza sativa
  Clone ID: TFbOSC23022j.C1.o3.np
atgaagggaatagtgggaagtaaactgaatgtaaagaaagtgaatccgagttgcctgttcgtgggaactattcccagttatgaaccaagtgaaatgttcgaagatagtctatagaggagatcgagccaagcagtccagagtggagaagtttagttagataagtttgttatagaagatgaagcggaagaagtcagacaagaagagaagaccgcccaacctatcttcttgctagcctcctcgaatctcggggacgagatt

SEQ ID NO: 13777 - DNA, 496 bp, Oryza sativa
  Clone ID: TFbOSC25029j.C1.o1.np
atcaaaggcatgcacccgttgtggagaaattggacacgttgctagcatgtgtctcacactctgcactcactaggaagaagaccatccaccaggggagtgtcccactcgcaaggtgacatgttttctgtgcgaaggaacaaaccatgtgcccaaggattgccaactcagtgtgttgttgaccaagaccgcagaaatccaacgaacaaccctacgattgtctcatcagctagtcagctccaacagcaacatcgacgatatcatccacagcaccaatgctccacctagctctgcaataaatcatagcaataatacctttagcaccaaccattctctgcaccgacagcctcagcaaagaattgtcgtcgatggaagaagttgtgtctctccccgacctactccaggccgagcaaagggcaatcaacctccggagggcgataccaagcagaagaccgtcatccgcttcaacccacaatcagaaggaagcttctcctgtgaa

SEQ ID NO: 13778 - DNA, 639 bp, Oryza sativa
  Clone ID: TFbOSC32065j.C1.o1.np
actctagaggatcccctcgtaagctcataatctattatgaaccaaataacctagcgattgatggcgattaaaatcaagtgatcaaccaaagagacatttgtttggaccaagggtttcagatatgtcttctttggatcaaaggcatgcacccgttgtggagaaattggacacgttgctagcatgtgcctcaccctctgccctcattgtgaagaagaccatccaccaggggagtgtcccatccgcaaggtcacatgttttctgtgcgagggtacaaaccatgtgcccaaggattgccaacttagtgtgttgttgaccaagaccgcagaaatccaacgaacaaccctacgattgtctcgtcagctagtcagctccaacaacaacatcgatgatatcatccacagcaccaatgctcctcttgctccacctaactctgcaataaatcatggcaataatacctttagcactaaccattctctgcaccgacagcctcagcaaagaattgtcgtcgatggaagaagttgtgtctctccccgacctactccaggccaagcaaagggcaatcaacctccggagggcgataccaagcagaagaccgtcatccgcttcaaccagcaatcagaaggaagcttctcctgtgaa

SEQ ID NO: 13779 - DNA, 3330 bp, Oryza sativa
  Clone ID: TFbOSC400192j.C1.o34.fg
atggaggcgaatgactggctccatgccatagagaagaagctgaatctcctgcagtgcaatgatcaggagaaggttgcttttgccacacaccagcttcaaggtcctgcgtcagcttggtgggacaatcacatggccacccgcccaccagacgatgtccgcaccgacgccgagaagcaggaaaagttcatggcaggtctggatgacgagctgaccaaccaattgatatcaggggactacgctgactttgagaggctggttgacaaggcaatccgtcaggaggatcaacgcaacaagatggacaggaagaggaaggccgctcagttcagggcacatcagggaagtcaccagaggccgcgcttcactcccggacagcagggtggacctaccaccatgatcgtccgccagtaccgcccgttcaaccctagcaacttccaccagggcgccagtggcagtcaggaccaacacggaggtcagctcaaccgcggtgcagctccacgcccaccagtggcaccggcacagtcaggcccgtccgcgcaagccaagaaggagactggaacaaaaccagggtcctgcttcaactgtggcgagcttggccacctcgctgacaaatgcccgaagcctaggcgtgccgggccaaggtttgtccaggctcgtgtcaaccacgcatctgcggaggaggcacaagcagcaccagaggtcgtactgggtacgtttcctgttaactcaatccctgcaacagtactttttgattctggtgcaacgcattcgttcatttcaaagaagtttgtcgggatgcatgggttagtaagagaggaacttagcacaccaatgcgggttcataccccagggaatagttccacttcggttcaattcagcccctctataacaatagaaattcaaagatcaccatttctagccaacctcattcttctcgaatccaaagatctagatgtcattcttgggatggattggctgaccaagttcaagggagtcattaattgtgcgaatcgcacagtcaccttgaccaacgagaagggagaaacagtagtgtacaaatcaccagactcaccaaagcaaggggtccctttgaatcagattgaggtggaaatcccagtggtcaccgaggagaagaattcgaggaaattggaagagattcccatagtctgcgagtacccagaagtgtttcccgaagacctcactaccatgccacccaagagagagattgaattccggattgatttggcaccgggaactgctccaatttacaagagaccgtacataatggcggccaacgaactagcagaggtcaagaagcaggttgatgagcagctacagaaagggtacattcgaccaagtacttcaccttggggtgcttcggtcatttttgtggagaaaaaggataagacgaagaggatgtgcgttgattatcgcgcactcaacgaggtcacaatcaagaataaatatcctttaccgcggatcgatgatttgtttgatcaactgaaaggagctaaagtgttttctaagatagacctgcgatcaggctaccaccagttgagaattcgggaagaggatattccaaagacggccttcaccactcggtacgagctgtatgagtgcacggttatgtccttcggacttaccaacgcacccgcattcttcatgaatctgatgaacaaagtgttcatggaatttctggacaagtttgttgtcgttttcatcgacgacatacttatctattcaaagtctgaagaagaacacgagcagcatctccgtctggtactcgagaagttgaaggagcaccagctatacgccaagttcagcaagtgtgacttctggttgacagaagtcaaatttctgggccatgtcattacagctcagggttattaccgccgattcatcgaaaacttctccaggatcgcccgacccatgactcagttgcttaagaaagatgagaagtttaaatggacagctgagtgcgacaagagttttgaggagctcaaaaagaaattagtatctgcagcagttttgattctgcccgaccagatgaaagacttccaagtctattgcgatgcatcccgccacggacttggatgtgtcctaatgcaagagggcagagtggttgcgtatgcctcgtggctgttgcgtccacacgaagggaattatccaactcatgacctggaattggcagcagtggttcatgctttgaagatctggaggcactatctgattggcaaccgctgcgaagtatatacggaccataagagtctgaaatacatcttcacccaaccggacctaaatcttcgacaacgaagatggttggaattaatcaaagactatgatatgagcattcactaccacccggggaaagccaatgtggtggcagacgcattaagcaggaagagttactgcactgccctatgcatcgagggcatgtgtgaggaattgcagcaggagtttgagcatctcaacgtgggaattgttgaacaggggttcgtagccgctctggaggcacggcctacgctcgtggatcaagtcagagcagctcaagtgaatgatcctgaaatagcagagctgaaaaagaacatgagagtcggaaaggctcgggatttccttgaggatgaacacggcacaatctggttgagagaaagattgtgtgtacctgacgacaaggaactgaaggatctgatactcaccgaggctcatcagacccagtactccattcatctaggcagcaccaaaatgcgagcgtcaactgttcgggatagaggtattagcggaagcagaagagaaagtcagaaccatcaggaaaggttgaggattgcccagtctcgacagaagagctacgcggataactgccgaagggagctcacttttgaagtaggggattacgtgtatcttcgtgtcactccgctctggggagtacaccgttttcagacgaaaggcaagttggcaccacgcttcgtgggaccatacaaaatcttggaacgaaggggggaagttgcttatcagctagaacttccatccaatatgatcgacatccatgatgtgttccacatgtcccaactaaagaagtgcttaagagtacctgaagaacaagctgattcggagcatattgatatccaggaggacctgacatatgtagagaagccggttcgtatacttgataccagcgaaagaagaaccagaaacaaggtcaccaggttttgccgagttcagtggagtcaccattcagaggaagaagcaacctgggaaagggaagatgagttgaaagccgcccatccgcacctcttcgccagctcctccgaatctcggggccgagattccgtttaa

SEQ ID NO: 13780 - DNA, 5011 bp, Oryza sativa
  Clone ID: TFbOSC100051j.C1.o6.np
tgggattaaatacgactgccacgtggctctaaaggcctcgaacaatgggaagctagtgaggatcatagctctgaaggatgagatagcacgcttgaagaaggagaatgctcagttgaagggtctcccagcgccaggaggagtccggatccgcaccacgccccgcaagacggcgactgcacccgtgcgcattcagcttgcgcccaggaacccacctccgcccgcaattctcgcagctccagctccaaccccagctccagttccagtgccagctcccgcgtccgctctctccttcgctccagcgtcagctgccaggggtccagccagtggcaacggaggttggttgtctgctactcccagtggcagccgcgaccacagcagcagcagttccagtggctcagagccgggcagcagggagacgtatctgccagactccaggagccgctaagagggatctggtctcttcctcaagatggtctacaccaggaatggtaaccgtgcaataggcgagggcagcaacggcgaagaacgcactaacggtgtgcatcccaaccgtgattccggcaatggtccgccaccactccccgagaatccgacccttgcccaagtaatggctcatcagacgcagatgatgacagctatgatgcagcagatgcagcagcagcaccagcagatgtaccagaggatgcagcagcaagccgagtagcagtagtttggtccccctccccctcagtccaaactgccggagtttctacgcgttagaccacccaccttctccagcaccaccaaccctatggaggtaaatgactggctccatgccatagagaagaagctcaatctcctgcagtgcaatgatctggagaaggtcgccttcgccacacaccagctccaaggtcccgcgtcagcttggtgggacaatcatatggctacccgcccaccaggcacggaagtcacttgggcggagttctgccgcagcttcaggaaggcgcaagtgccagatggggtcgtggcacaaaagaagagggaattccgggcactccaccagggcaacaggacagtgacggagtatctccatgagttcaatcgcctcgcgcgatatgcaccggaggatgtccgtactgacgccgagaagcaggagaaattcctagcaggtctggatgatgagctaaccaaccagttgatatctggagattacgccgactttgagaggttggttgacaaggcaatccgtcagaggatcagcgcaactaaatggaaaggaagaggaaggcagcgcagttccggtccaaccaagggagccaccagcgaccgcgcttcactcccggacagcaaggtggacctaccaccctaatcgtccgccagcaccgccctttcagtgccagcaacttccatcagggcgccagtggcagccagaaccaccatggcggtcagcccaaccgcagtgcagctccactcccaccaatggctccagcacagtcagctccgtccgcgcaagccaagaaggagactgggacaaagccagggtcttgcttcaactgtggcgagcttggccacttcgctgacaaatgcccaaagcctaggcgtgtcgggccaaggtttgtccaggcccgtgtcaaccacgcgtccgcagaggaggcgcaagcagcaccagaggtcgtactgggtacattccctgtcaactcagttcctgctacagtactttttgattctggtgcaacgcattctttcatttcaaagaaatttgtggggatgtatgggttaagaaaaaaagagcttagtacaccaatgaaggttcataccccaggaaatagttcaacctcggtcagttatagcccttcagtgctaatagaaattcaaagatcaccatttctagccaacctcatccttctcgaatccaaggatctagacgtcattcttgggatggattggctgaccaagtttaagggcgtcattgattgtgcgaatcacacagtcaccttgaccaatgagaagggagaaaccgtggtgtacaagtcaccagtctcaccgaagcaaggaatctccttaaatcagattaaggtggaaaaccctgtgaccaccggggagaagagttcgcggaaattggacgatatccccatagtctgcgagtacccagaagtgttccccaaagacctcactaccatgccacccaagagagaaattgaattccggattgatttggcaccaggaactgcccctatttacaagagaccgtacagaatgacggccaacgagctagcagaggtcaagaagcaagttgatgagtagctgcagaaagggtacattcgaccaagtacttcaccttggggtgctccggtcatttttgtggagaagaaggacaagacgaagagaatgtgtgtcgactatcgcgtactcaatgaggtcacaatcaagaacaaatatcctttaccgcggattgatgatttgtttgatcagctgaaaggagctaaagtgttttctaagatagacctgcgatcaggctaccactagttgagaattcgggaagaggatattccaaagacagccttcaccactcggtatgggttgtatgagtgcacggttatgtctttcggacttaccaacacacccgcattcttcatgaatctgatgaacaaagtgttcatggaatttctggacaagtttgttgtggtcttcatcgacgacatacttatctattcaaagtccgaagaagaacatgagcaacatctccgtctggtactcgagaagttgaaggagcacaggttatacgccaagttcagcaagtgtgacttctggttgtcggaagttaaatttctgggtcacgttattacagctcagggcgtggcagttgatccatcgaacgtggagtcagttaccaaatggaccccaccgaagaccgtgtcgcagattcagagttttcttggacttgcgggttattaccgccgattcatcgaaaacttctcaaggatcgcccgacccatgacttagttgcttaagaaagatgagagtttaaatggacagctgagtgcgacaagagttttgaggagctcaaaaagaaattagtatccgcaccagttttgattctgcccgaccagatgaaagacttccaagtctgttgcgacgcatcccgccacgggcttggatgtgttctaatgcaagagggcagagtggtcgcgtatgccttgcggcagttgcatccacacgaagggaattatccaactcatgacctggaattggcagcagtggttcatgctttaaagatctggagacactatctgattggcaaccactgcgaagtatatacggaccataagagtctgaaatacatcttcacccaaccggacctaaatctctgacaacgaagatggttggaactaatcaaagactatgacatgagcattcactaccacccgggtaaagccaatgtggtggcagatgcgctaagcaggaaaagctactgcaatgccctatgcatcgagggcatgtgcgaagaattgcagcaggagcttgaacatctcaatgtgggagtcgttgaacacggattcgtagccgctctagaagcacggcctacgctcgtcgatcaagttagagcagtgaatgatcttgaaatagcagagctgaaaaagaacatgagagtcggaaaggctcgggatttccttgaagatgaacacggcacaatctggttggcagaaagattgtgtgtacctgacgacaaagaactgaaggatctgatactcaccgaggctcatcagactcactactccattcatccaggcagcatcaaaatgtatcaagacctcaaagaaaagttttggtgggtcagcatgagaagggaaatagctgaattcatcgcactctgcgacgtttgccagtgagtgaaggcagagcaccaaagaccagcaggtttactccaacctcttcaaatcccggaatggaaatgggaggagattggaatggactttataacaggactgccccggacatcatcgggccacgattcaatctgggtagtcgtggatcgactcactaaggttgctcacttcataccagtacataccacgtatacgggcaaaaggttggcagagctctacctctcgagaatcatgtgtctacatggagtacccaaaaagatagtatctgatcgagggagccaattcacttcaaagttctagcagaaattgcaagaggaattgggaacccggttgaatttcagcacagcctaccatccgcagaccgatggtcagaccgagcgagtcaatcaaatattggaggacatgttaagggcctgcgcacttgattttggtggagcttgggacaaaagcttgccgtatgcggagttctcttacaacaacagttaccaggctagtcttcaaatggcaccgttcgaagcattatacggccggaagtgtcgcacccctctcttctgggatcagacaggcgagtgtttggaacagaggtgctaagggaagcagaagagaaagtcagaaccatcagggaaaggttgagaattgcccaatctcgacagaagaactacgcggacaaccgccgaagggagctcacttttgaaacaggggattacgtgtatcttcgtgttactccgctccggggagtgcaccgttttcaaaccaaaggcaagttggcaccacgtttcgtgggaccatacaaaatcttggaacgaaggggagaagttgcttatcagctagagcttccttccaacatgatcggcatccatgacgtgttccatgtatcccaattaaagaagtgcttgagggtacccgaggaacaagccaattcggagcacattgatattcaagaagatctgacgtatgtggagaggccacttcgaattcttaagaccagtgaaagaagaaccagaaacaaggtcactaggttctgcagggttcagtggagtcaccattcagaggaggaagcaacctgggaaagggaagatgagttgaaggccgcccatccgcacctcttcgccagctcctccgaatctcggggtcgagattccgtt

SEQ ID NO: 13781 - DNA, 3639 bp, Oryza sativa
  Clone ID: TFbOSC100217j.C1.o1.np
atggccgatcacccacccaatcaccgcggagaagccatggatgactttgtggcagagttggctcgcatgacactggtggtgggctaccccaatgtgcccgagtattcgactgttctgccgctcagtggtgagttccctcaccgtgttcgcccggaggttcatggctatgtgggtacctgtctcgctaacatggtggttgaggcatccggaggcacagcagatcacacctgtcaggaggcagcatagctgatgatggccagactacggaagcgccacaactacatcttctgcaacacggcgtaccgttttcaccctcgtcgagcaagtggcgatgacgtcagcaccttccgtccgacagccggcgagaacgacaccacctttggtcacatgtgtgccgtgatgaggggtatggacaggatgcactcggatctacgcaaggcgtccaaggccttgaatgacgggaagctcgtgaggatcatagctctgaaggatgaaatcgcgcgcctgaagaaggagaatgcgcagttgaagggtctccccattcccggaggagtccggatccgcaacacgccccgcaagtcgacgacggcacccgtgcgcattcagcttgcgcctaggaacccacctccgcctgcacctccagcagctcctccagttccgcccgcagtttcagaagttcccacagctcctgcagctccagctccagtcccagctcctgtcccagtgtcagctcccacgtccgctctctccttcgctcctgcatcagccgtcaggggtccagccagtggtaacgggggttggttgcctgctactcccagtggcagccacgaccacagcagtagcagttccagtggctcggagccgggcagcggcgagacgtatttgccagagtccaggagccactcagagggacctggcctcttcctccagatggtctacaccaggaatggtagccgtacaacaggcgagggcagcaacggcgaagagcgcaccgacggtgtgcatcccaacagcaactccggcaatggtccgccaccgctccccaaaaatctgacccttgcccaagtaatggctcatcagactcagatgatggcagccatgatgcagcagatgcaccagaggatgcagcagcaagccgagcagcagcagcagcagtttggtccccctcgccctcagtccaagttgccggagttcttacgtgtcaggccacccaccttctccagtaccaccaaccctatggaggcaaacgactggctccacgctatagagaagaagctcaatctcctacagtacaatgatcaggagaaggttgctttcgctacacaccagctccagggtcccgcgtcagcttggtgggacaatcacatggccacccgcccgctaggcacggaagtcacttgggcggagttctgtcgcagcttcaggaaggcgcaggtgcctgacggggttgtggcacagaagaagagggagttccgggcactccaccagggcaacaggacagtgataaagtatctccatgagttcaatcgcctagcgcgatatgcaccggaggatgtccgtactgacgccgagaagcaggagaaattcctagcaggcctggatgacgagctgaccaaccagctgatctctggagactacgccgattttgagaagctggttgacaaagcgatccgtcaggaggatcagcgcaacaaaatggacaggaagagaaaggcagcgcaattccggtccaaccaaggaagccacccgtgaccgcgcgtcacttccggacagcagagtggacctaccaccatgatcgtccgccagcaccgccctttcaactcgagcaacttccaccatggcaccagtggcagccagaaccaccatggaggtcagcccaatcgcagtgcagctccgcgcccaccaatggcaccagcacagtcagctccatctgcgcaagtcaagaaggagactggaacaaagccagggtcctgcttcaactgtggcgagcttggccacttcgctgacaaatgcccgaagccaaggcgtgctgggccaaggtttgtctaggctcgtgtcaaccacgcgtccgcagaggaggcgcaagcagcaccagaggtcgtactgggtacgttttctgtcaactcagtccctgctacagtactttttgattctggtgcaacacattctttcatttcaaagaagtttgtggggatgcatgggttaagaaaagaagagcttagtacaccaatgagggttcataccccaggaaatagttcaacctcggtcagttatagcccttcagtgctaatagaaattcaaagatcaccatttctagccaaccttatccttctcgaatccaaagacttagatgtcattcttgggatggattggctgaccaagttcaagagagtcattgattgtgcgaatcgcacagtcaccttgaccaatgagaagggagaaaccgtggtgtacaagtcaccggcctcaccaaagcagagaatctccttaaaccagattgaagtggaggaacctgtgaccaccgagcagaagagttcgccgaaattggaggatatccccatagtctgcgagtatcccgaagtgttccctgaagatctcactactatgccacccaagagagaatttgaattccggattgatttggcaccaggaactgccccaatttacaagaggccgtagagaatggcagccaacgagctagcagaggtcaagaagcaggttgatgagcagctgcagaaagggtacactcgaccaagtacttcaccttggggtgctccggtcatttttgtggagaagaaggataaagcaaagaggatgtgcgtcgattatcgcgcactcaatgaggtcacaatcaagaacaaatatcctttgccacggattgatgatttgttcaaccaactaaagggggctaaagtgttctctaaaatcgacctgcgatcaggttatcactagttgagaattcgggaagaggatattcccaagacggccttcaccactcgatatgggttgtacgagtgcatggttatgtctttcggacttaccaacgcacctgcattcttcatgaatctgatgaacaaagtgttcatggaatttctggacaagtttgttgtggtattcatcgacgacattcttatctattcaaagtccgaagaagaacatgagcaacatctccgtctggtactcgagaagttgaaggagcaccaattatatgccaagttcagcaagtttgacttttggctgttggaggtcaaattcttgggtcacgtcattacagctcagggcgtggcagtcgatccatcgaatgtggagtcagttaccaagtggaccccacctaagaccgtgtcatagattagaagttttcttggactcgcgggttattatcgtcggttcattgaaaatttctcaagcattgccagacctatgacccagttgcttaagaaagatgagaaatttaaatggacagctgagtttgacaagagttttgaggagctcaagaagaaattagtatccgctccagttctgattctgcccgaccaaagaaaagacttccaagtctattgcgacgcgtcccgccacggactcggatgtgttttagtgcaagaggcccgcgtttcgtcaagtgtgcagcagccccgtcgg

SEQ ID NO: 13782 - DNA, 4716 bp, Oryza sativa
  Clone ID: TFbOSC101121j.C1.o1.fg
atgggttgcaagatggccggtcacccacccaaccaccgcggagaaggcatgatcaactttgtggcagagttggcacgcatgacactggtggtgggctaccccaacgcgccagagtacacgacgattccaccgctcagtggcgagcttcctcaccgtgttcgcttggaggtccacggctacgtgggtacctgcctagctaacatggtggttgaggcatccggaggctcaacagatcacgcctgtcaggaggcagcatacctgatgatggctagactacgggagcgccacaactacatcttccacgacacggcgtaccgatttcaccctcgtcgagccagtggtgatgatatcagtaccttccgtccgacagccggcgagaacgacaccacctttagtcacatgtgtgctgtgatgaggggattggataggatgcactcggacctgcacaaggcgaccaaggccttgaacgatgggaagctcatgaggatcgtcactctgaaggacgagatagcgcgcctgaagagggagaatgctcagttaaagggtcttcccgcgccaggaggagtccggatccgcactacgcccgcaagacgacgacggcacccgtgcgcatccagcttgcgcccaggaacccacctccatcagcagctcccgcagcacctccagttccgcccgcagttcctgcagctccagctccagctcccgcgtccgctctctccttcgctccagcatcagccgccagaggtccagccagtggcaccggaagttggttgtctgctactcccagtggcagccgcgatctcagtagcagcagctccagtggctcacagtcaggcagcggcgagacttacctgccaggctccgggagtcgctcagaggtaccggatggtctacaccaggaatggtagccgcgcgacaggcgagggcagcaacggcgaagagcgcactgatggggcgcatccccacagcgattctggcaatggtccgccaccacttcccgagaatccgacgctagcccaagtaatggcacatcagacccagatgatggcagccatgatgcagcagatgcagcagcagcaccagcagatgcaccagcggatgctgcagcacgccgaacagcagcatcaacagtttggtccccctccccctcagtccaagttgcctgagttcctgcgtgtcaggccacccaccttttccagcaccaccaaccctatggaggcgaatgactggctccatgccatagagaagaagctgaatctcctgcagtgcaatgatcaggagaaggttgctttcgccacacaccagcttcaaggtcctgcgtcagcttggtgggacaatcacatggccacccgcccaccagatggggtcgtggcacaaaagaagagggaattccgggcgctccatcagggcaacaggactgtgacagagtacctccatgagttcaatcgcctcgcgcgatatgcaccagaggatgtccgcaccgacgccgagaagcaggaaaagttcatggcgggtctggatgacgagctgaccaaccaactgatatctggggactacgctgattttgagaggctggtggacaaggcaatccgtcaggaggatcaacgcaacaagatggacaggaagaggaaggccgcacagttcagggcacctcagggaagtcaccagaggccgcgcttcactcccggacagcagggtggacctaccaccatgatcgtccgccagtaccgcccgttcaatcctagcaactttcctcagggcgccagtggcagtcagaaccaccatggaggtcagcccaaccgcggtgcagctccacgcccaccaatggcaccggcacagtcaggcccgcccgcgcaagccaagaaggagactggagcaaaaccagggtcctgcttcaactgtggtgagcttggccacttcgctgacaaatgcccgaagcctaggcgtgctgggccaaggtttatccaggctcgtgtcaaccacgcatctgcggaggaggcacaagcagcaccagaggttgtactggacctagatgtcattcttgggatggattggctgaccaagtttaagggggtcatcgattgtgcgaatcacacagtcaccttgaccaacgagaagggagaaaccgtggtgtacaaatcactagtctcaccaaagcaaggggtctctttgaatcagattgagacggaaatcccagtcgacaccgtggagaaaaacttgaggaaattggaatatatacccatagtctgcgagtatccagaagtgttccccgaagacctcactaccatgccacccaagagagagattgaattccggattgacttggcaccgggaaccgctccaatttacaagagaccgtacagaatggcagccaacgaattagcagaggtcaagaagcaggttgatgagcagctgcagaaagggtacattcgaccaagtacttcaccttggggtgctccggtcatttttgtggagaaaaaggataagacgaagaggatgtgcgttgattattgcgcactcaacgaggtcaccatcaagaacaaatatcccttgctgcgaatcgatgatttgtttgatcaactgaaaggagctgaagtgttttctaagatagacctgcgatcaggctaccaccagttgagaattcaggaagaggatattccaaagacggccttcaccactcggtacgggctatatgagtgcacggttatgtctttcggacttaccaacgcacccgcattcttcatgaatctgatgaacaaagtattcatggaatttctggacaagtttgttgtggtgttcatcgacgacattcttatctactcaaaatccgaagaagaacatgagcaacatctccgtttggtactcgagaagttgaaggagcaccagctatacgccaagttcagcaagtgtgacttctggttgacggaagtcaaatttctgggccatgtcattacagctcagggtgtggcagttgatccgtcgaacttacttaagaaagatgagaagtttaaatggacagctgagtgcgataagagtattgaggagctcaagaagaaattagtatccgcaccagttttgattctgcccgaccagatgaaagacttccaagtctattgcgatgcatcccgccacggacttggatgtgtcctaatgcaagagggcagggtggttgcgtatgcctcgcggcagttgcgtccacacgaagggaattatccaactcatgacctggaattggcagcagtggttcatgctttgaagatctggaggcactatctgattggcaaccgctgcgaagtatatacggaccataagagtctgaaatacatcttcacccaaccggacctaaatctccgacaacgaagatggttggaactaatcaaagactatgacatgagtattcactaccacccgggtaaagccaatgtggtggcagacgcattaagccggaaaagttactgcactgccctatgcatcgagggcatgtgtgaggaattgcggcaggagtttgagcatctcaacgtgggaattgttgaacatggttttgtagccgctctggaggcacggcctacgctcgtggatcaagtcagagcagctcaagtaaatgattctgaaatagcagagctgaaaaagaacatgagagtcggaaaagcccgggatttccacgaagatgagcatggcacaatctggttgggagaaagattgtgtgtacctgacgacaaggaactgaaggatctgatactcaccgaggctcatcagacccagtactccattcatccaggcagcactaaaatgtatcaagacctcaaagaaaagttttggtgggcagagcaccaaagaccagcaggtttactccaacctcttcaaatcccggaatggaaatgggaggagattggaatggacattataacgggactgccccggacatcgtcaggtcacgattcgatctgggtagtcgtggatcgactcactaaggttgctcacttcataccagtacataccacatatacgggcaaaaggttggcggagctttacctttcgagaatcatgtgcctacatggagtacccaaaaagattgtatctgaccgagggagtcagttcacctcaaaattctggcagaagctgcaggaaaaattggggacccgtttaaatttcagcacggcctatcacccgcaaactgatggtcagaccgagcgggtcaatcaaatcttggaagatatgttgagagcttgcgctcttgattttggtggagcttgggacaaaaatttgccatatgcggaattctcgtacaacaacagctaccaggccagtctacagatggcaccgtttgaagctttatacggccggaagtgccgcacacctctcttctgggatcagacaggcgagcgtcaactgttcggaacagaggtattagcggaagcagaagagaaagtcagaatcatcagggaaaggttgaggattgcccagtctcgacagaagagctacgcggataaccgtcgaaggaagctcacttttgaggcaggagattacgtgtatcttcgtgtcactccgctccggggagtacaccgttttcagacgaaaggcaagttggcaccacgattcgtgggaccatacaaaatcctggaacgaaggggggaagttgcttatcagttagaacttccatccaacatgatcggcatccatgacgtgttccacgtgtcccaattaaagaagtgctaa

SEQ ID NO: 13783 - DNA, 4422 bp, Oryza sativa
  Clone ID: TFbOSC102114j.C1.o1.fg
atgtcgacgactgcacccgtgcgcatccaacttgcgcccaggaacccacctccgccagcagctcccgcagcacctccagttccgcccgcagttcctgcagctccagcaccagctccagctcccgttcacatgtccgctcccgcgtccgctctctccttcgctccagcatcagccgccaggggtccagccagtggcaacggaggttgcttgtttgggatggtctacaccaggaatggtagccgcgcaacaggcgagggcagcaacggcgaagagcgcactgagggtgtgcatcccaacagcaattccggcaatgttccgccaccacttcccgagaatccgacgctagcccaagtgatggcacatcagactcagatgatggcagccatgatgcaacagatgcagcagcagcaccagcagatgtaccagaggatgttgcagcacgccgaacagcagcaccagcagtttggtccccctccccctcagtccaagttgccagagtttctacgtgtcaggccacccaccttctccagcaccaccaaccctatggaggcgaatgactggctccatgccatagagaagaagctgaatctcctgcagtgcaatgatcaggagaaggttgctttcaccacacaccagcttcaaggtcctgcgtcagcttggtgggataatcacatggccacccgcccaccaggtactgaagtcacttgggcagagttctgccgtagcttcaggaaggcgcaggtgccagacggggtcgtggcacaaaagaagagggaatttcgggcactccatcaaggcaacaggactgtgacggagtatctccatgagttcaatcgcctcgcgcgatatgcacccgaggatgtccgtaccgacgccgagaagcaggaaaggttcatggcaggtctggatgatgagctgaccaaccaactgatatctggggactacgccgactttgagaggctagttgacaaggcaatccgtcaggaggatcaacgcaacaagatggacaggaagaggaaggccgctcagttcagggcacctcagggaagtcaccagaggccgcgcttcgctcccgggcagcagggtggacctaccaccatgatcgttcgccagtaccgcccgttccaccctagcaactttccccagggcgccagtggcagtcagaaccaccatggaggtcagcccaaccgcggtgcagctccacgcccaccaatggcaccggcacagtccggcccgtccgcgcaagccaggaaggagactggagcaaaaccagggtcttgcttcaactgtggcgagcttggccacttcgccgacaaatgcccgaagcctaggcgtgccgggccaaggtttatccaggctcgtgtcaaccacgcatctgcggaggaggcacaagcagcaccagaggttgtactgggtacgtttcctgttaactcaatccctacaacagtactttttgattctggtgcaacgcattcgttcatttcaaagaagtttgtcgggatgcatgggttaataagagaggaacttagcacaccaatgcggctgaccaagtttaagggagtcatcgattgtgtgaatcgcacagtcaccctgaccaacgagaagggagaaacggtagtgtacaaatcaccaaactcaccaaagcaaggggtctccttgaatcagattgaagcggaaatcccagtggtcaccatggagaagaatttgaggaaattggaagatatccccatagtctacgagtatccagaagtgttccccgaagacctcactaccatgccacccaagagagagattgaattccggattaacttggcaccgggaaccgctccaatttacaagagaccgtacagaatggcggccaacgaactagcagaggtcaagaagcaggttgatgagcagctgcagaaagggtacattcgaccaagtacttcaccttggggtgctccagtcatttttgtggagaaaaaggataagacgaagaggatgtgcgttgattatcgcgcactcaacgaggtcacaatcaagaacaaatatcctttgccacgaatcgatgatttgtttgatcaactgaaaggagctaaagtgttttctaagatagacctgcgatcagcctaccaccagttgataatccgggaagaggatattccaaagacggccttcaccactcgcaagtgtgacttctggttaacggaagtcaaatttctgggccatgtcattacagctcaaggtgtggcagttgatccatcgaacgtggagtcagttaccaaatggaccccaccgaagaccgtgtcgcagattcaaagttttcttggacttgcgggatattaccgccgattcatcgaaaacttctccaggatcgcccgacccatgactcagttgcttaagaaagatgagaagtttaaatggacagctgagtgcgataagagttttgaggagctcaaaaagaaattagtatccgcaccagttttgattctgcccgatcagatgaaagacttccaagtctattgcgatgcatcccgccacggacttggatgtgtcctaatgcaagagggcagggtggttgcgtatgcctcgcggcagttgcgtccacacgaagggaattatccaactcatgacctggaattggcagcagtggttcatgctttgaagatctggaggcactatctgattggcaaccgctgcgaagtatatacggaccataagaatctgaaatacatcttcacccaaccggacctaaatctccgacaacgaagatggttggaactaatcaaagattataacatgagcattcactaccacccgggtaaagccaatgtggtggcagacgcattaagcaggaaaagtcactgcactgccctgtgcatcgagggcatgtgtgaggaattgcggcaggactttgagcatctcaacatgggaattgttgaatacgggttcgtagccgctctggaggcacggcctacgctcgtggataaagtcagagtagctcaagtaaatgattctgaaatagcagagctgaaaaagaacatgagagtcggaaaagcccgggatttccacgaagatgagcatggcacaatctggttgggagaaagattgtgtgtacctgacgacaaggaactgaaggatctgatactcaccgaggctcatcagacccagtactccatccatccaggcagcaccaaaatgtatcaagacctcaaagaaaagttttggtgggtcagcatgaggagagaaatagctgaattcgtcgcactctgcgatgtttgccaacgagtgaaggcagagcaccaaagaccagcaggtttactccaacctcttcaaatcccggaatggaaatgggaggagattggaatggactttataataggactgccctggacatcatcgggtcacgattcaatctggatagtcatggatcgactcactaaggttgctcacttcataccagtacataccacgtatacgggcaaaaggttggcggagctctacctctcgagaatcatgtgtctacatagagtacccaaaaagattgtatctaaccgagggagtcagttcacctcaaaattctggcagaagctgcaggaagaattggggacccgtttaaatttcagcacggcctatcacccgcaaactgatggtcaaaccgagcgagtcaatcaaatcttggaagatatattgagagcttgcgctcttgattttggtggagcttgggacaaaagcttgccatatgcggaattctcgtacaacaacagctaccaggccagtctacagatggcaccgtttgaagctttatacggccggaagtgccgcacacccctcttctgggatcagacaggcgagcgtcaactgttcgggacagaggtattagcggaagcagaagagaaagtcagaatcatcaaggaaaggttgaggattgcccagtctcgacagaagagctacgcggataaccgtcgaagggagctcacttttgaggcaggggattacgtgtatcttcgtgtcactccgctccggggagtacaccgctttcagacgaaaggcaagttggtaccacgcttcgtgggaccatacaaaatcctggaacgaaggggggaagttgcttatcagttagaacttccatccaatatgatcggcatccatgacgtgttccacgtgtcccaattaaagaagtgcttaagggtacctgaagaacaggctgattcggaacacattgatttccaggaggacctaacatacgtggagaagccggttcatatacttgataccagcgaaagaagaaccagaaacaaggtcaccaggttttgccgagttcagtggagtcatcattcagaagaggaagcaacctgggaaagggaggatgagttgaaagccgcccatccgcacctcttcgccagctcctccgaatctcggggccaagattccgtttaa

SEQ ID NO: 13784 - DNA, 4488 bp, Oryza sativa
  Clone ID: TFbOSC102349j.C1.o22.fg
atggtctacaccaggaatggtagccgcgcaacaggcgagggcagcaacggcgaagagcgcactgatggggcgcatccccacagcgattccggcaatggtccgccaccacttcccgagaatccgacgctagcccatgtaatggcacatcagacccagatgatggcagccatgatgcaacagatgcagcagcaccagcagatgcaccagcggatgctgcagcacgccgaacagcagcatcagcagtttggtccccctccccctcagtccaagttgccagagtttctacgtgtcaggccacccaccttctccagcaccaccaaccatatggaggcgaatgactggctccatgccatagagaagaaactgaatctcctgcagtgcaatgaccaggagaaggttgctttcgccacacaccagcttcaaggtcctgcgtcagcttggtgggacaatcacatggccacccgcccaccaggtactgaagtcacttgggcagagttctgccgtagcttcaggaaggcgcaggtgccagacggggtcgtggcacaaaagaagagggaatttcgggcactccatcagggcaacgggactgtgacggagtacctccatgagttcaatcgtctcgcgcgatatgcacccgaggatgtccataccgacgccgagaagcaggaaaagttcatggcaggtctggatgatgagctgaccaaccaactgatatctggagactacgccgactttgagaggctagttgacaaggcaatccgtcaggaggatcaacgcaacaagatggacaggaagaggaaggccgctcagttcagggcacctcaggggagtcaccagaggccgcgcttcgcttccgggcagcagggtggacctaccaccatgatcgtccgccagtaccgcccgttcaaccctagcaactttccccagggcgccagaggcagtcagaaccaccatggaggtcagcccagccgcggtgcagctccacgcccaccaacggcaccggcacagtcaggcccgtccgcgcaagccaagaaggagactggaacaaaaccagggtcttgcttcaactgtggcgagcttggccacttcgctgacaaatgcccaaagcctaggcgtgccgggacaaggtttatccaggctcgtgtcaaccacgcgtccgcggaggaggctcaagcagcaccagaggttgtactgggtacgtttcctgttaactcaatccctgcaacagtactttttgattctggtgcaacgcattcgttcatttcaaagaagtttgtcgagatgcatgggttaataagagaggaacttagcacaccgatgcgggttcataccccagggaatagctccacttcggttcaattcagcccttctataacaatagaaattcaaggatcaccatttctagccaacctcattcttctcgaatccaaagacctagatgtcattcttgggatggattggctgaccaagtttaagggagtcatcgattgtgcgaatcgtaccgtcaccttgaccaacgagaagggagaaacggtagtgtacgaatcaccagacgcaccaaagcgaggggtctctttgaatcagattgaagcggaaatcccagtggacactgtggagaagaacttgaggaaattggaagatatacccatagtctgcgagtatccagaagtattccccgaagacctcactaccattgcacccaagagagagattgaattccggattgacttggcaccgggaaccgctccaatttataagagaccgtacagaatggcggctaacgaattagccgaggtcaagaagcagaaaaaggataagacgaagaggatgtgcgttgattatcgtgcactcaacgaggtcacaatcaagaacaaatatcctttgccgcgaatcgatgatttgtttgatcaactgaaaggagctaaagtgttttctaagatagacctgcgatcaagctaccaccagttgagaattcgggaggaggatattccaaagacggccttcaccactcggtacggattatatgagtgcacggttatgtcgttcggacttaccaacgcacccgcattcttcatgaatctgatgaacaaagtgttcatgaaatttctggacaagtttgttgtggtattcatcgacgacatacttatctattcaaagtccaaagaagaacatgagcaacatctccgcctggtactcgagaagttgaaggagcaccagctatacgccaagttcagcaagtgtgacttctggttgacggaagtcaaatttttgggccatgtcattacagctcagggtgtggcagttgacccatcaaacgtagagtcagttaccaaatggaccccaccgaagaccgtgtcgcagattcgaagttttctaggactggcaggttattaccgccgattcatcgaaaacttctccagaatcgcccgacccatgactcagttgcttaagaaagatgagaagtttaaatggacagttgagtgcgataagagttttgaggagctcaagaagaaattagtatccgcaccagttttaattctgcccgaccagatgaaagacttccaagtctattgcgatgcatcccgtcacggacttggatgtgtcctaatgcaagagggcaaagtggttgcgtatgcctcgcggcagttgcgtccacatgaagggaattatccaactcatgacctggaattggcagcagtggttcatgctttgaagatctggaggcactatctgattggcaaccgctgcaaagtatatacggaccataagagtctgaaatacatcttcacccaaccggacctaaatctccgacaacgaagatggttggaactaatcaaagactatgacatgagcattcactaccacccgggtaaagccaatgtggtggcagacgcgttaagcaggaaaagttactgcactgccctatgcatcgagagcatgtgtgaagaattgcggcaggagtttgagcatctcaacgtgggaattgttgaacacgggttcgtagccgctctggaggcacggcctatgctcgtggatcaagtcagagcagctcaagtaaatgattctgaaatagcagagctgaaaaagaacatgagggtcggaaaagcccgagatttccacgaagatgagcatggcacaatctggttgggagaaagattgtgtgtacctgacgacaaggaactgaaggatctaatactcaccgaggctcatcaggcccagtactccattcatccaggcagcaccaaaatgtatcaagacctcaaagaaaagttttggtgggtcagcatgagcaaagaaatagctgaattcgtcgcactctgcgatgtttgccaacgagtgaaggcagagcaccaaagaccagcaggtttactccaacctcttcaaatcccggaatggaaatgggaggagattggaatggactttataacaggactgccccggacatcatcgggtcacgattcaatctgggtagtcgtggatcgactcactaaggttgctcacttcataccagtacataccacgtatacgggcaaaaggttggcggagctctatctctcgagaatcatgtgtctacatggagtacccaaaaagattgtatctgaccgagggagtcagttcacctcaaaattctggcagaagctgcaggaagaattggggacccgtttaaatttcagcacggcctatcacccgcaaactgatggtcagaccgagcgagtcaatcaaatcttggaagatatgttgagagcttgcgctcttgattttggtggagcttgggacaaaagcttgccatatacggaattctcgtacaacaacagctaccaggccagtctacaggtggcaccgtttgaagctttatacggccggaagtgccgcacacctctcttctgggagcagacaggcgagcgtcaactgttcgggacagaggtattagcggaagcagaagagaaagtcagaacaatcagggaaaggttgaggattgcccagtctcgacagaaaagttacgcggataaccgccgaagggagctcatttttgaagcaggggattacgtgtatcttcgtgtcactccgctctggggagtacaccgttttcagacgaaaggcaagttggtaccacgcttcgtgggaccatacaaaatcctggaacgaaggggggaagttgcttatcagctagaacttccatccaatatgatcggcatccatgacgtgttccacgtgtcccaattaaagaagtgcttaagggtacctgaagaacaggctgattcggaacacattgatatccaggaggacctaacatacgtggagaagccggttcgtatacttgataccagcgaaagaagaaccagaaacaaggtcaccaagttttgccgaattcagtggagtcatcactcaaaagaggaagcaacctgggaaagggaggatgagttgaaagccgcccatctgcacctcttcaccagctcctccgaatctcggggccgagattccgtttaa

SEQ ID NO: 13785 - DNA, 4220 bp, Oryza sativa
  Clone ID: TFbOSC11733j.C1.o1.gm
atggtggttgaggcatccggaggcacagcagatcacgcctgtcaggaggcagcatacctgatgatggccagattacgggagcgccacaactacatcttctgcaacacggcgtaccggtttcaccctcgtcaagcaagtggcgacgacgtcagcaccttccgttcgacagccggcgagaacgacaccacctttggtcatatgtgtgccgtgatgaggggaatggacaggatgcactcggatctgcgcaaggcatccagggccttgaatgacgggaagctcgtgaggatcatagctctgaaggatgagatcgcacgcctgaagaaggatgagatcgcacgcctaaagaaggagaatgctcagttgaagaatccgcaacacgccccgcaagtcgacgacggcacccctccagctccagtcccagctcctgtcccagtgtcagctcccgcgtccgctctctccttcgctccagcattagccgccaggggtccagccagtggcaacgggggttggttgcctgctactcccagtggcagccgcgaccacagcagcagcagttccagtggctcggagccgggcagcggcgagatgtatctgccaaactccaggagccgctcagagggacgtggtgacgagcaggaggacgccctcgactccaccgaccgcaggagccgttccgagtctgttcgcttggggatggtctacaccaggaatggtagccgtacagcaggcgagggcagcaacggcgaagaacgcattgatggtgtgcatcccaacagcgactccggcaatggtccgccactgctccccgagaatccgactctggcccaatccaaactgccggagtttctacacgtcaggccacccaccttctctagcaccaccaaccccatggaggcgaatgactggctccatgccattgagaagaagctaaatctcctgcagtgcaatgatcaggagaaggtcgccttcgccacacaccagctccagggtcccgcgtcagcttggtgggacaatcacatggctacccgcccgccaggcacggaagtcacttgggcggagttctgtcgcaacttcaggaaggcgcaggtgccagacggggttgtggcacagaagaaaagggagttccaggcactccaccagggcaacaggacagtgactgagtatctccatgagttcaatcggctagcgcgatatgcatcggaggatgtccgcactgacgccgagaagcaggagaaattcctagcaggcctagatgacgagctgaccaaccagttaatctctggaggctacgccgattttgagaagctggttgacaaagcaatccatcaggaggatcagtgcaacaaaatggacaggaagagaaaggcagcgcaattccggtccaaccaaggaagccacccgcgaccgcgcttcactcccagacagcaaagtggacctaccaccatgatcgtccgccagcaccgccctttcaactcgagcagcttccaccagggcgccagtggcagccagaaccaccatggaggtcagcccaaccgcagagcagctccgcgcccaccaataacaccagcacagtcagctccatccgcccaagccaagaaggagactggaacaaagccagggtcctgcttcaactgtggcgagcttggccactttgctgacaaatgcccgaagccaaggcgtgtcgggccaaggtttgtccaggctcgtgacaaccacgcgtccgcagaggaggcgcgagcagcaccagaggttgtactggtcaccttgaccaatgagaagggagagaccgtggtgtacatgtcaccagtctcaccaaagcagagaatctccttaaaccagattgaagtggaaaaccctgtgaccaccgagcagaagggtttgcagaaattggaggatatccccatagtctgcgagtatcccgaagtgttccttgaagacctcactaccatgccacccaagagagaacttgaattccggattgatttggcaccaggaactgccccaatttacaagaaaccgtacagaatggcaaccaacaagctagcacaggtcaagaagcaggttgatgagcagctgcagaaagggtacattcgaccaagtactttaccttggggtgctccggtcatttttgtggagaagaaggataagacgaaaagaatgtgcgtcgattatcgcgcactcaatgaggtcacaatcaagaacaaatatcctttgccgcggattgatgatttgttcgaccaactaaaaggggctaaagtgttttctaaaatcgacctgcgatcaggctatcaccagttgagaatccgggaagaggatattcccaagacagccttcaccactcgatatgggttgtacgagtgcacggtgatgtcttttagacttaccaatgcacccgcattcttcatgaacctgatgaacaaagtgttcatggaatttctggataagtttgtggtggaacaccagttatatgccaagttcagtaaatgcgacttttggctattggaagtcaaattcttgggtcacgtcattacagctcagtgcgtggcaatcgatccgtcgaatgtggagtcagttaccaagtggaccccacctaagaccgtgtcacagattagaagttttcttggactcgcggctgagtgtgaccagagttttgagaagctcaaaaagaaattagtaaccgccccagttctgattctgcccgaccagactaaagacttccaagtctactacgacgcgtcccgccacgggcttggatgtgttctaatgcaagagggcagagtggtcgcttatgcctcgcggcagttgcgtccacatgaagggaactatccaactcatgacctggaattggcagcggtggtacatgctttgaagatctggaggcactatctgattggcaaccgttgcgaagtatatacggatcacaagagtctgaagaagagctactgcaatgccctatgcaccgagggcatgtgtaaagaattgcagcaggagcttgaacacctcaacttggggcttgtagaatacgggtacgtggctgtcctcgaggcacgacctacactcgtggatcaagtcagagcagctcaagtaaatgatcctgaaatagcagagctgaaaaagaacatgagggtcggaaaagcccaggattttcacgaagatgaacacggcacaatctggtttggagaaagattatgtgtaccggacgataaggaactaaaggatttgatactcaccgaggctcatcagactcagtactccattcatccaggcagcaccaaaatgtaccaagacctcaaagaaaagttctggtttactccagcctcttcagatcccggaatggaaatgggaggagattggaatggactttataacaggactgccctggacatcatctggccacgattcaatctagaagagaaagttagaaccgtcagagagaggttgagaattgcccagtctcgacagaagagctatgcggacaaccgccgaagggaactcacttttgaagcaggggattacatgtatctccgtgttactccgctccggggagtacaccgtttccagacaaaaggtaagttggcaccacgcttcgtgggaccatacaaaatcttggaacgaagaggagaagtggcttatcagctagaacttccatccaacatgatcggtatccatgacgtgttccacgtgtcccagttaaagaagtgtctaagggtactcgaagaacaagccgattcggagcacattgacatccaagaagatctgacctacgtggagaagccagttcgtatccttgagaccaccggcgccgacgcgctccacaaccaccgccgcgcccacgttcccgccttctccgggccacgtcagccacgccagcgcatgcgccgtgtcttccgcacctactccccctccctgtcgcacgcgcccgcgcccgagacggccgggattcgaaatttcgaatcccacctctctctcctcctccacctccccaccaccaccgccaccccttctctctttttccccatctcgtcgagccctcccgagccctctaacgccctagcgccatcgcccttctttttgacgacgacgccaccgttccggtcgtcagtagccgacacgccgagccgcgccgacaacgccgtcgcgttcgccgtcgtgcgggccaccccggtcacccctttttcgttggatcccgccgccggaacccaacttcgggccggtcaccg

SEQ ID NO: 13786 - DNA, 3693 bp, Oryza sativa
  Clone ID: TFbOSC12096j.C1.o12.fg
atggaggcgaatgactggctccatgccatagagaagaagctgaatctcctgcagtgcaatgatcaggagaaggttgctttcgccacacaccagcttcaaggtcctgcgtcagcttggtgggacaatcacatggccacccgcccgccaggcactgaagtcacttgggcggagttctgtcgtagcttcaggaaggcgcaggtgccagacggggtcgtggcacaaaagaagaggaaattccgggcactccatcagggaaacaggacagtgaccgagtacctccatgagttcaatcgcctcgcgcgatatgcatcggaggatgtccgcactgacgccgagaagcaggaaaagttcatggcaggtctggatgacgagctgaccaaccaactgatatctggggactacgcggattttgaaaggctggtggacaaggcaatctgtcaggaggatcagcgaaataaaatggacaggaagagaaaggcggcacagttccggtccaaccaaggaaaccatcagcgaccgcgcttcgctcccgggcagcagggtggacctaccaccatgatcgtccgccagtaccgcccgttcaactctagcaacttccaccagggcgccagtggcagtcagaaccaccatggaggtcagcccaaccgcggtgcagctccacgcccaccagtggcaccggcacagtcaggcccgtccgcgcaagccaagaaggagactggaacaaaaccagggtcttgcttcaactgtggcgagcttggccactttgctgacaaatgcccgaagcccaggcgtgccgggccaaggtttgtccaggctcgtgtcaaccacgcgtctgcagaggaggcgcaagcagaaccaaaggtcgtactgggtacatttcctgttaactcaatccctgcaatagtactttttgattccggtgcaacgcattctttcatttcaaagaaatttgtggggatgcatgggttaaggaaagaagagcttaatacaccaatgagggttcataccccgggaaatagttcaacctcggtcagttttagcccttcagtgctaatagaaatccaaagatcaccatttctagccaacctcattcttcctgaatccaaagacctagatgtcattcttgggatggattggctgaccaagatcaagggagtcattgattgtgcgaatcgcacagtcaccttgaccaacgagaagggagaaaccgtagtgtacaaatcactagtctcaccaaagcaaggggtctccttgaatcagattgaggcggaaatcccagtggtcacgaaggagaagaatccgaggaaattggaagagattcccatagtttgcgagtacccagaagtctttcctgaagacctcactaccatgccacccaagcgagagattgaattccgaattgatttggcaccgggaaccgcgccaatttacaagagaccgtacaggatggcggccaacgaactagcagaggtcaagaagcaggttgatgagcagctgcagaaagggtacattcgaccaagtacttcaccttggggtgctccggtcatttttgtggagaaaaaggataagacgaagaggatgtgcgttgattatcgcgcactcaatgagtttgttgtcgttttcatcgacgacatacttatctattcaaagtctgaagaagaacatgagcagcatctccgtctggtactcgagaagttgaaggagcaccagctatacgccaagttcagcaagtgtgacttctggttgacggaagtcaaacttctgggccatgtcattacagctcagggtgtggcagttgatccatcaaacgtggagttagttaccaaatggaccccactgaagaccgtgtcgcagattcgaagttttcttggactcgcagatgaaagacttccaagtctattgcgatgcatcccgccacggacttggatgtgtcctaatgcaagagggcagagtggttgcgtatgctcgcggcagttgcgtccacacgaagggaattatccaactcatgacctggaattggcagcagtggttcatgctttgaagatctggaggcactatctgattggcaaccgctgtgaagtatatacggatcacaagagtctgaaatacatattcacccaaccggacctaaatctccgacaacgaagatggttggaattaatcaaagactatgatatgagcattcactaccacccggggaaagccaatatggtggcagacacattaagcaggaagagttactgcactgccctatgcatcgagggcatgtgtgaggaattgcggcaggagtttgagcatctcaacgtgggaattgttgaacacgggttcgtagccactctggatgcacggcctacgctcgtggatcaagtcagagcagctcaagaactgaaggatctgatactcaccgaggctcatcagacccagtactccattcatccaggcagcaccaaaatgtatcaagacctcaaagaaaagttttggtgggtcagcatgaggagagaaatagctgaattcgtcgcactctgcgatgtttgccaacgagtgaaggcagagcaccaaagactagcaggtttactccaacctcttcaaatcccggaatggaaatgggaggagattggaatggactttataacaggactgccccggacatcatctggtcacgattcaatctgggtagtcgtggatcgactgactaaggtttctcacttcataccagtacataccacgtatacgggcaaaaggttggtggagctctacctctcgagaatcatgtgtctacatggagtacccaaaaagattgtaactgatcgagggagtcagttcacctcaaaattctggcagaagctgcaggaagaattggggacccgtttaaatttcagcacggcctatcacccgcaaactgatggtcagaccaagcgagtcaatcaaatcttggaagatatgttgagagctagcgctcttgattttggtggagcttgggacaaaagcttgccatatgcggaattctcgtacaacaacagctaccaggctagtctacagatggcaccgtttaaagctttatacgaccggaagtgccgcacacctctcttctgggatcagataggcgagcatcaactattcgggacagaggtattagcggaagcagaagagaaagtcagaaccatcagggaaaggttgaggattgcccagtctcgacagaagagctacgcggataaccgccgaagggagctcacttttgaagcaggggattacgtgtatcttcgtgtcactccgctccggcgagtacaccgttttcagacgaaaggcaagttggcaccacgcttcgtgggaccatacaaaatcttggaacgaaggggggaagttgcttatcagctagaacttccatccaatatgatcggcatccatgacgtgttccacgtgtcccaattaaagaagtgcttaagagtacccaaagaacaagctgattcggagcatattgatatccaggaggacctgacatatgtggagaagccggttcatatacttgataccagcaaaagaagaaccagaaacaaggtcaccaggttttgccgagttcagtggagtcaccattcagaggaggaagcaacctgggaaagggaagatgagttgaaagctgcccatccgcacctcttcaccagctcctccgaatctcggggccgagattccgtttaa

SEQ ID NO: 13787 - DNA, 177 bp, Oryza sativa
  Clone ID: TFbOSC12096j.C1.o15.gm
atggcgatcgatggtttcccggtgatccgcttgccagaaaacaaggcgggggcaatggtgcgggaataccactccacaggcaccctcgacggcacggacgaagcctactcctcggagaacccgccatcggacacatactcgcactctggggttggggaaaaaatagagcaagactga

SEQ ID NO: 13788 - DNA, 4044 bp, Oryza sativa
  Clone ID: TFbOSC12919j.C1.o2.gm
atggtttacaccaggactggcaaccgcacgacaggcgagggcagcaacggcgaagaacgcgtggatggtgtgcaccccaacagtgattctggcaatggtccgccaccacttcccgagaatccgacccttgcccaagttatggcacatcagactcagatgatggcagccatgatgcagcagatgcagcagcagcaccagcagatgcaccagaggatgatgcagcacgccgaacagcagcaccagcagtttggtccccctccccctcagtccaagttgccggagtttctacgtgtcaggccacccaccttctccagcaccaccaaccctatggaggcaaatgactggctccatgcgatagagaagaagctgaatctcctgcagtgcaatgatcaggagaaggtcgctttcgccacacaccagcttcagggtcccgcgtcagcttggtgggacaaccacatggccacccgcccaccgggtactgaagtcacgtgggcagagttctgccgtagcttcaggaaggcacaggtgccagacggggtcgtggcacaaaagaagagggaattccgggcgctccatcagggcaacaggactgtgacagagtacctccatgagttcaatcgcctcgcgcgatatgcaccagaggatgtccgcaccgacgccgagaagcaggagaagttcatggcgggtctggatgacgagctgaccaaccaactgatatctggggactacgccgactttgagaggctggttgacaaggcaatccgccaggagaatcaacgcaacaagatggacaggaagaggaaggccgctcagttcagggcaccccaggaaagtcaccagaggtcgcgcttcactcccgggcaacagggtggacctaccaccatgattgttcgtcaacaccgcccgttcaaccccagcaacttccaccagggctccagtggcagccagaatcaccatggaagtcagcccaaccgcggtacagctccacgcccaccgatggcaccggcacagtcaggccagcccgcacaagccaagaaggagacgggagcaaaaccagggtcctgcttcaactgtggcgagcttggccacttcgctgacaaatgcccgaagcccaggcgtgccggaccaaggtttatccaggctcgtgtcaaccacgcatctgcggaggaggcacaagcagcaccagaggtcgtactggtcaccctgaccaatgagaaaggagaaaccgtggtgtacaaatctctagtctcgccaaagaaaggagcctcgttgaatcagattgagacggaaatcccagtggacgccgaagagaagaacttgagaaaattggaggacatacccatagtctgcgagtatccagaggtgttccccgaagacctcaccaccatgccacccaagagggagattgaattccggattgatttggcaccaggaaccgctccaatctataagagaccgtacagaatggcggccaacgaattagcggaggtcaagaagcaagttgatgaacagctgcagaaagggtacatacgaccaagcacttcaccttggggcgctccggtcatttttgtggagaaaaaggataagacaaagaggatgtgcgtcgattatcgcgcacttaacgaggtcacaatcaagaataaatatcctttgccgcgaatcgacgatttatttgatcaactgaaaggagctaaagtgttctctaagatagacctgcgatcaggctaccaccagttgagaatccgggaagaggatattccgaagacggccttcaccactcggtacgggctatatgagtgcacggttatgtccttcggacttactaacgcacccgcattcttcatgaatctgatgaacaaagtgttcatggaatttctggacaagtttgttgtggtattcatcgacgacattcttatctattcaaagtccgaggaagaacatgaacaacatctccgtctagtactcgagaagttgaaggagcaccagctatacgccaagttcagcaagtgtgacttctggttgacggaagtcaaatttctgggccatgtcattacagctcagggtgtagcagttgatccatcgaacgtggagtcagttaccaagtggaccccaccgaagacagtgtcgcagattcgaagttttctaggactggctggttattaccgtcgtttcatcgaaaacttctcaagaatcgcccgacccatgactcagttgcttaagaaagacgagaagtttaaatggacagctgagtgcgacaagagctttgaggagctcaaaaggaaattagtatccgcaccggttttgatcctgcccgaccagacgaaagacttccaagtctattgcgatgcatcccgtcacggacttggatgtgtcctaatgcaagagggcagagtggttgcatatgcctcgcggcagttgcgtccacacgaaggaaattatccaactcatgacttggaattggcagcagtggtccatgctttgaagatctggaggcactatctgatcggcaaccgctgcgaagtatatacggaccataaaagtctgaaatacatcttcacccaaccagacctaaaccttcgacaacgaagatggttggaactaatcaaagactatgacatgagtattcactaccacccgggtaaagccaatgtggtggcagacgctttaagccggaaaagttactgcactgctctatgcatcgagggcatgtgtgaggaattgcgacaggagcttgaacatctcaacatgggaattgttgaacacgggttcgtagccgctctggaggcacggcctacgctcgtggatcaagttagagccgctcaagtaaatgatccggaaatagcagaactgaaaaagaacatgagagtcggaaaggctcgggatttccttgaggatgagcatggcacaatctggatgggagaaagattgtgtgtaccggacgacaaggaattgaaggatctgatactcaccgaagctcatcagacccagtactccattcatccaggcagcactaaaatgtatcaagacctcaaggaaaaattttggtgggtcagcatgaggagagaaatagctgaattcgtcgcactctgcgatgtttgccaacgagtgaaagcagagcaccaaagaccagcaggtttactccaacctcttcaaatcccggaatggaaatgggaggagattggaatggactttataacaggactgccccggacatcatcgggtcacgattcaatctgggaagaattggggacccgtttaaacttcagcacggcctatcacccgcaaactgatggtcagaccgagcgtgtcaatcaaatcttggaggatatgttgagagcttgcgctcttgattttggtggagcctgggacaaaagcttaccatatgcggaattctcgtataacaacagctaccaggccagtttacagatggcaccgtttgaagctctatacggccggaagtgccgcacacctcttttctgggatcagacaggcgaacgtcaactgttcggaacagaagtattagcgggagcagaagagaaagtcagaatcatcagggagagattgaggattgctcagtctcgacagaagagctacgcggataaccgtcgaagggagctaacttttgaggccggagactacgtgtatcttcgtgtcactccgctccggggagtacaccgtttccagacgaaaggcaagttggcaccacgcttcgtgggaccatacagaatcttggaacgaaggggagaagttgcttatcagctagaacttccatccaatatgatcggcatccatgacgtgttccacgtgtcccaattaaagaagtgtttaagggtacctgaagaacaggctgattcggaacacatcgatatccaggaggacctgacatatgtggagaagccggaggttccggagctcgtcccgccgtcgtcgtcgtcctccgtcggccgccgtcgtcgaccgttgtcgccgccgctccccgccgccggtcggtcgccgtcggtcgccgccttgcgccgctgccgcatgcgcgccgccgccgtgtga

SEQ ID NO: 13789 - DNA, 3342 bp, Oryza sativa
  Clone ID: TFbOSC13101j.C1.o3.fg
atggccatacgtccgccaggcatggaagtcacttgggcggagttctgtcgcagcttcaggaaggcgcaggtgccagatggggtcgtggcacaaaagaagagggaattccgggcactccaccagggcaacaggacagtgacggagtatctccatgagttcaatcgcctcgcgcgatatgcaccggaggatgtccgaactgacgcagagaagcaggaaaagttcctggcaggtctggatgacgagctaaccaaccagctgatatcgggaggctacaccgactttgagaggctggttgacaaggcaatccgtcaggaggatcagcgcaataaaatggacaggaagaggaaggtggcgcagttctggtccaaccaagggagccaccagcgaccgcgcttcactcccggacaacagggtggacctaccaccatgatcgtccgccagcaccgccctttcaatgccagcaacttccatcagggtgccagtagcagccagaaccaccatggaggtcagcccaaccgcggtgcagctccacgcccaccaatgcaaccagcacagtcagctccatccgcgcaagccaagaaggagactggagcaaagccagggtcctgcttcaactgtggtgagcttggccacttcgctgacaaatgcccgaagcctaagcgtgccgggccaagttttagcccttcagtgctaatagaaattcaaagatcaccatttctagccaacctcattcttcttgaatccaaagacctagatgtcattctggggatggattggctgaccaagttcaagggagtcattgattgtgcgaatcgcacagtcaccttgaccaacgagaagggagaaacagtagtgtacaaatcactagtctcaccaaaacaaggggtctccttgaatcagattgaggtggaaatcccagtggtcaccgaggagaggaattcgaggaagttggaagagattcccatagtctgcgagtacccagaagtgtttcctgaagacctcactaccaagccacccaagagggagattgagttccggattgatttggcaccgggaaccgctccaatctacaagagaccatacaggatggcagccaatgaactagcagaggtcaagaagcaggttgatgagcaactgcagaaaaggtacattcgaccaagtacttcaccttggggtgctccggtcatttttgtggagaaaaaggataagacgaagaggatgtgcgtcgattatcgcgcactcaacgaggtcacaatcaagaacaaatatcctttaccacggatcgatgatttgtttgatcaactgaagggagctaagctaagaattcgggaagaggatattccaaagacggccttcaccactcggtacgggctgtatgagtgcacggttatgtctttcggacttaccaacgcacccgtattcttcatgaatctgatgaacaaagtgttcatggaatttcttgacaagtttgttgcggtattcatcgacgacatacttatctattcaaagtccgaagaagaacatgagcaacatctccgtctggtactcgagaagttaaaggagcaccagttatatgccaaattcagcaagtgtgacttctggttgtcggaagtcaagtttctgggtcacgtgattacagctcaaggcgtggcagttgatccagcaaatgtggagtcagttaccaaatggaccccacctaagaccgtgtcgcaaattcggagttttcttggacttcaaggttattaccgccgattcatcgaaaacttctccaggattgcccgacccatgactcagttgcttaagaaagatgagaagtttaaatggatagccgagtgcgacaagaattttgaggagctcaaaaagaaattagtgtccgcaccggttttggtcctgcccaatcagatgaaagacttccaagtctattgcgacgcatctcgccatgggcttgaatggaattatccaactcatgacctggaattggcagcagtggttcatgctttgaagatctggaggcattatctgattggcaaccgctgcgaagtatatacagaccacaagagtctgaaatacatcttcacccaaccggacctaaatctccgacaacgaagatggttggaactaatcaaagactacgacatgagcattcactaccacccgggtaaagccaatgtggtggcagatgcgctaagcaggaaaagctactgcaatgccctatgcatcgagggcatgtgtgaagaattgcagcaggagcttgagcgtctcaaagtgggaattgttgaacacgggttcgtagccgctctggaagcacggcctacgctcgtggatcaggttagagccgctcaagtaaatgaccctgaaatagctgaattgaaaaagaatatgagggttggaaaagcccgggacttccttgaggatgagcacggcacaatttggatgggagaaagattgtgtgtacctgatgacaaggaattgaaggatctgatactcaccgaggctcatcagacacagtattccattcacccaggcagcaccaaaatgtaccaagacctcaaagaaaagttttggtgggacagcatgagaagagaaatagctgaattcatcgcactctgcgacgtttgccaacgagtgaaggcagagcaccaaaggccagcaggtttactccaacctcttcaaatcccggaatggaaatgggaggaaattggaatggattttatagctggactgccgcagacatcatcgggtcacgattcaatctgggtagtcgtggaccgactcactaaggtagctcacttcataccagtgcataccacctatacgggaaagaaattggcagagttgtacctgggaaggatcatgtgtctgcatggggtacccagaaagataatatctgatcgagggagccaattcacttcaaagttctggcagaaattgcaaaaagaattggggacccgtttaaatttcagtacagcctaccatctgcggacagatggccagactgagagggtcaatcagattttggaggatatgctgcgagcttgtgcacttgactttggtggagcatgggataagagcctgccatatgcggaattctcgtacaacaatagttaccaggttagtctccaaatggcaccatttgaagctttatacggccggaagtgtcgcacccctctcttctgggatcagacaggtgagcgtcaactgtttggaacagaggtgttaacggaagcagaagagaaagtcagaaccatcagggaaaggttgagaattgcccagtctcgacagaagagctacacggataaccgccgaagggagctcactttcgaagcaggagattatgtgtaa

SEQ ID NO: 13790 - DNA, 5339 bp, Oryza sativa
  Clone ID: TFbOSC13598j.C1.o1.np
atggccggtcacccacccaaccaccgcggagaaggcatgatcgacttcgtggcagagctggcacgcatgacactggtggtgggctaccccaatgcgccggagtacacgaccatcccaccgctcagtggcgagcttcctcaccgtgtccgcttggaggtccatggctacgtggggacttgcctcgctaacatggcggttgaggcgtcaggaggcacagcagatcatgcctgtcaggaggcagcctacttgatgatggccaggttacgggagcgccacgactacatcttccacgacacggcgtaccgctaccacccccgtcgagcccatggtgatggcgtcagctccttccgtccgacagctggcgagaacgacaccaccttcggtcacatgtgtgctgtgatgaggggattggaccggatgcactcggacctgcacaaggcgaccaaggccttgaatgatgggaagctcatgaggatcgtcgctctgaaggacgagatagcgcgcctgaagaaagagaatgctcagttgaagggtcttccagcaccaggaggagtccggatccgcactacgccccgtaagaggacgactgcacccgtgcgcatccagcttgcgcccaggaacccacctccagcagcagcagctccggcagttcctccagctccagctccagctccagctccagctccagctcccgctcccgcgttcactctctccttcgctccagcatcagccgccagaggaccagccagtggtaccggaggttgtcccctccagatggtctacaccaggactggtagccgcgcaacaggcgagggcagcaacggtgaagaacgcgctgatggtgtgcaccccaacagtgagtccggcaatggtccgccaccacttcccgagaatccgacgcttgcccaagttatggcacatcaaactcagatgatggcagccatgatgcagcagatgcagcagcagcaccagcagatgcaccagaggatgatgcagcacgccgaacagcagcatcaacagtttggtccccctccccctcagtccaagttgccggagtttctacgtgtcaggctacccaccttctccagcaccaccaaccctatggaggcaaatgactggctccatgcgatagagaagaagctgaatctcctgcagtgcaatgatcaggagaaggtcgctttcgccacacaccagcttcagggtcctgcgtcagcttggtgggacaaccacatggccacccgcccaccgggtactgaagtcacatgggcagagttctgccgtagcttcaggaaggcacaggtgccagatggggtcgtggcacaaaagaagagggaattccgggcgctccatcagggtaacaggactgtgacagagtacctccatgagttcaatcgcctcgcgcgatatgcaccagaggatgtccgcaccgacgccgagaagcaggagaagttcatggcgggtttggatgatgagctgaccaaccaactgatatctggggactacgttgactttgagaggctggtcgacaaggcaatccgccaggaggatcaacgcaacaagatggacaggaagaggaaggccgctcagttcagggcaccccagggaagtcaccagaggccgcgcttcactcccgggcaacagggtggacctaccaccatgatcgtccgtcagcaccgcccgttcaaccctagcaacttccaccagggcactagtggcagtcagaaccaccatggaagtcagcccaaccgcggtacagctccacgcccaccaatggcaccggcacagtcaggccagcccgcacaagccaagaaggagacgggagcaaaaccagggtcctgcttcaactgtggcgagcttggccacttcgctgacaaatgcccgaagcccaggcgtgccgggccaaggtttatccaggctcgtgtcaaccacgcgtctgcggaggaggcacaagcagcaccagaggtcgtactgggtacgtttcctgttaactcaatccctgcaacagtactttttgattctggtgcaacgcattctttcatctcaaagaaatttgtcgggatgcatgggttaataagagaggaacttagcacaccgatgcgggttcataccccagggaatagctccacttcggttcaattcagcccttctataacaatagaaattcaaaggtcaccatttctagccaacctcattcttctcgaatccaaagacctagatgtcattcttgggatggattggctgaccaagttcaagggagtcatcgattgtgcgagtcgcacagtcaccttgaccaacgagaagggagaaaccgtggtgtacaaatctctagtctcgccaaagaaaggggtctcgttgaatcagattgagacggaaatcccagtggacaccgtagagaagaacttgagaaaattggaagatatacccatagtctgcgagtatccggaagtgtttcctgaagacctcactaccatgccacccaagagagagattgaattccggattgacttggcaccgggaaccgctccaatttacaagagaccatacaggatggcggccaacgaattagcagaggtcaagaagcaagttgatgagcagctgcagaaagggtacatacgaccaagcacttcaccttggggcgctccggtcatttttgtggagaaaaaggataagacgaagaggatgtgcgtcgattatcgcgcacttaacgaggtcacaatcaagaataaatatcctttaccgcgaatcgacgatttatttgatcaactaaaaggagctaaagtgttttctaagatagacctgcgatcaggctaccaccagttgagaatccgggaagaggatattccgaagacggccttcaccactcggtacgggctatatgagtgcacggttatgtctttcggacttaccaacgcacccgcattcttcatgaatctgatgaacaaagtgttcatggaatttctggacaagtttgttgtggtgttcatcgacgacattcttatctattcaaagtccggagaagaacatgaacaacatctccgtctagtactcgagaagttgaaggagcaccagctatacgccaagttcagcaagtgtgacttctggttgacggaagtcaaatttctgggccatgtcattacaactcagggtgtggcagttgacccatcgaacgtggagtcagttaccaaatggaccccacctaagaccgtgtcgcagattcggagttttctaggactggcaggttattaccgccgattcatcgaaaatttctccaggatcgcccgacccatgactcagttgcttaagaaagatgagaagtttaaatggacagctgagtgcgataagagttttgaggagctcaagaagaagttagtatccgcaccagtattgattctgcccgacccgacgaaagacttccaagtctattgtgatgcatcccgtcacggacttggatgtgtcctaatgcaagagggcagagtggttgcgtatgcctcgcggcagttgcgtccacacgaaggaaattatccaactcatgacttggaattggcagcagtggttcatgctttgaagatctggaggcactatctgattggaaaccgctgcgaagtatatacggaccataagagtctgaaatacatcttcacccaaccggatctaaaccttcgacaacgaagatggttggaactaatcaaagactatgacatgagtattcactaccacccgggtaaagccaatgtggtggcagacgctttaagccggaaaagttactgcactgccctatgcatcgagggcatgtgtgaggaattgcggcaggagtttgagcatctcaacgtgggaattgttgaacacgggttcgtagccgctctggaggcacggcctacgctcgtggatcaagttagagccgctcaagtaaatgatccggaaatagcagaactgaaaaagaacatgagagtcggaaaggctcgggatttccacgaagatgagcatggcaccatctggatgggagaaagattgtgtgtacctgacgacaaggaactgaaggatctgatactcaccgaggctcatcatacccagtactccattcatccaggcagcactaaaatgtaccaagaccttaaagaaaaattttggtgggtcagcatgaggagagaaatagctgaattcgtcgcactctgcgatgtttgccaacgagtgaaagcagagcaccaaagaccagcaggtttactccaacctcttcaaatcccggaatggaaatgggaggagattggaatggactttataacaggactgccccggacatcatcgggacatgattcaatctgggtagtcgtggatcgactcaccaaggtggctcactttatacccgtacataccacctatacgggaaagagactggcagaattgtacctcgcaaggatcatgtgtttgcatggggtacccaggaaaatagtatccgaccgaggtagtcagttcacctcaaagttttggcagaaactgcaggaagaattggggacccgtttgaatttcagcacggcctatcacccgcaaactgatggtcagaccgagcgagtcaatcaaatcttggaggatatgttgagagcttgcgctcttgattttggtggagcttgggacaaaagcttgccatacgcggaattctcgtacaacaacagctaccaggccagtctacagatggcaccgtttgaagctttgtacggccggaagtgccgcacacacctctcttctgggatcagacaggcgaacgtcaactgttcggaacagaagtattagcggaagcagaagagaaagtcagaatcatcagggaaaggttgagaattgctcagtctcgacagaagagctacgcggataaccgtcgaagggagctcatttttgaggcaggagattacgtgtatcttcgtgtcactccgctccggggagtacaccgttttcagacgaaaggctagttggcaccacgcttcgtgggaccatacaaaatcttggaacgaaggggagaagttgcttatcagctagaacttccatccaatatgatcggcatccatgacgtgttccacgtgtcccaattaaagaagtgtttaagggtacctgaagaacaggctgattcggagcacattgatatccaagaggacctaacatatgtggagaagccggttcgtatacttgataccagcgaaaggagaaccagaaataaggtcaccaggttttgccgagttcagtggagtcatcattcagaagaggaagcaacctgggaaagggaagatgagttgaaagccgcccatccgcacctcttcaccagctcctccgaatctcggggccgagattccgtt

SEQ ID NO: 13791 - DNA, 1869 bp, Oryza sativa
  Clone ID: TFbOSC1567j.C1.o2.fg
atggcggtcgaggcatctggaggcacagcagatcacgcctgtcaggaggcagcctacttgatgatggccagactacgggagcgccacgactacatcttccacgacacggcgtaccgctaccacccccgtcgagcccatggtgatggcgtcagctccttccgtccgacagctggcgagaacgacaccaccttcggtcacatgtgtgctgtgatgaggggattggaccagatgcactcggacctgcacaaggcgaccaaggccttgaatgatgggaagctcatgaggatcgtcgctctgaaggacgagatagcgcgcctgaagaaggagaatgctcagttgaagggtcttccagcaccaggaggagtccggatccgcactacgccccgttgcttgtttgggatggtctacaccaggactggcaaccgcacgacaggcgagggcagcaacggtgaagaacgcgctgatggtgtgcaccccaacagtgattctggcaatggtccgccaccacttcccgagaatccgacccttgcccaagttatggcacatcagactcagatgatggcagccatgatgcagcagatgcagcagcagcaccagcagatgcaccagaggatgatgcagcacgccgaacagcagcaccagcagtttggtccccctccccctcagtccaagttgccggagtttctacgtgtcaggccacccaccttctccagcaccaccaacactatggaggcaaatgactggctccatgcgatagagaagaagctgaatctcctgcagtgcaatgatcaggagaaggtcgctttcgccacacaccagcttcagggtcctgcgtcagcttggtgggacaaccacatggccacccgcccaccgggtactgaagtcacatgggcagagttctgccgtagcttcaggaaggcacaggtgccagacggggtcgtggcacaaaagaagagggaattccgggcgctccatcagggcagcaggactgtgacagagtacctccatgagttcaatcgcctcgcgcgatatgcaccagaggatgtccgcaccgacgccgagaagcaggagaagttcatggcgggtctggatgacgagctgaccaaccaactgatatctggggactacgccgactttgagaggctggttgacaaggcaatccgccaggaggatcaacgcaacaagatggataggaagaggaaggccgcgcagttcagggcacatcagggaagtcaccagaggccgcgcttcactcccgggcagcagggtggacctaccaccatgattgttcgtcaacaccgcccattcaaccccagcaacttccaccagggctccagtggcagccagaatcaccatggaagtcagcccaaccgcggtacagctccacgcccaccgatggcaccggcacagtcaggccagcccgcacaagccaagaaggagacgggagcaaaaccagggtcctgcttcaactgtggcgagcttggccacttcgctgacaaatgcccgaagcccaggcgtgccggaccaaggtttatccaggctcgtgtcaaccacgcatctgcggaggaggcacaagcagcaccagaggtcgtactgggtacgtttcctgttaactcaatccctgcaacagtactttttgattctggtgcaacgcattctttcatctccaagaaatttgtcgggatgcatgggttaataagagaggaacttagcacaccgatgcgggttcataccccagggaatagctccacttcggttcaattcagcccttctataacaatagaaattcaaaggtcacccggttttgccgagttcagtggagtcatcattcggaagaggaagcgacctgggaaagggaagatgagttga

SEQ ID NO: 13792 - DNA, 377 bp, Oryza sativa
  Clone ID: TFbOSC16992j.C1.o1.gm
ggttacataacgtcaagggggttcatgggcccttgatggccatcgggcgatcgccggccctatggcctctaagcttggtgggccgagaaggctacttcggccctcgcgggggcgaaccggtcctggcgaagtcgtccttctctgggctggatgccggggcgaaccggtcctggcgaagtcgtctttcttcggcatgcactcacccgacccttcgcctcgcatcatccttggctcgtggtcttcgccatgggtttcggcagattcggtcgaagggactcatgccatccgccaacagctatgaacccgtgttcaacaattcccacgttgagccgcttaaactcttgctgcaattcctcacacatgccctcgatgcatag

SEQ ID NO: 13793 - DNA, 2019 bp, Oryza sativa
  Clone ID: TFbOSC16992j.C1.o2.gm
atggtctacaccaggaatggcacccgcacgacaagcgagggcagcaacggcgaagaacgcgctgatggtgtgcaccccaacagtgattccggcaatggtccgccaccatttcccgagaatctgacgctggcccaagtaatggcacatcagactcagatgatggcagccatgatgcagcagatgcagcagcagcaccagcagatgcaccagaggatgctgcagcacgccgaacagcagcaccagcagtttggtccccctcctcctcagtccaagctgcccgagtttctacgcgtcaggccacccaccttctccagcaccaccaaccccatggaggcgaatgactggctccatgccatagagaagaagctgaatctcctgcagtgcaatgatcaggagaaggtcgctttcgccacacaccagcttcaaggtcctgcgtcagcttggtgggacaatcacgtggccacccgcccgccaggcactgaagtcacttgggcggagttctgtcgtagcttcaggaaggcgcaggtgccagacggggtcgtggcacaaaagaagaggggattccgggcactccatcagggcaacaggacagtgacagagtacctccatgagttcaatcgcctcgcgcgatatgcaccggaggatgtctgcaccgacgccgagaagcaggagaaattcctagcaggcctggatgatgagctaaccaaccagctgatatctggagactatgccgactttgaaaggttggttgacaaggcaatccgtcaggaggatcagcgcaacaaaatggacaggaagagaaaggcggcacagttccggtccaaccaaggaaaccatcagcgaccgcgcttcactctcggacagcagggtggacctaccaccatgatcgtccgccagcaccgcacgttcaagtctagcaacttccaccagggcgccagtggcagtcagaaccaccatggaggtcagcctaaccacggtgcagctccacacccaccagtggcaccagcacagtcaggcccgtccgcgcaagccaaggagactggagcaaagccagggtcctgcttcaactgtggtgagcttggccacttcgccgacaaatgcccgaagcctaggcgtgccgggtcaaagtttgtccaggctcgtgtcaaccacgcgtctgcaaaggaggcgcaagcagcaccagaggtcgtactggccaatgaactagccgaggtcaagaaacaggttgatgagcagctgcagaaagggtacatacgaccaagtacctcaccttggggtgctccggtcatttttgtggagaaaaaggataagacgaagaggatgtgcgtcgattatcgcgcactcaacgaggtcacaatcaagaataaataccctttaccacgaatcgatgacttgtttgaccaactgaagggagctaaggtgttctctaagatagacctgcgatcaggctatcaccagttaagaattcgggaagaagatattccaaagacggctttcaccacccggtacgggctgcatgagtgcacggttatgtctttcggacttaccaacgcacccgcattcttcatgaatctgatgaacaaagtgttcatggaatttctcgacaagtttgtggtggttttcatcgacgacatacttatctattcaaagtctgaagaagaacatgagcagcatctccgtctggtactcgagaagttgaaggagcaccaattatacgccaagttcagcaagtgtgacttctggttgacggaaggcatggcagttgatccatcgaacgtggagtcagttaccaaatggaccccaccgaagaccgtgtcgcagattcgaagttttcttagactggcggctgagtgcgataagagctttgaggagctcaaaaagaaattagtatccgccccagttctgattctgcccgaccagatgaaagatttccaggtctattgcgacgcatctcgccacgggcttggtggttcatgctttgaagatctggaggcactatctgattggcaaccgctgtga

SEQ ID NO: 13794 - DNA, 5334 bp, Oryza sativa
  Clone ID: TFbOSC18057j.C1.o2.fg
atggccggtcacccacccaaccaccgcggagaaggcatgatcgactttgtggcagagttggcacgcatgacactggtggtgggctaccccaacgcgccggagtacacgactattccaccgctcagtggcgagcttcctcaccgtgtcagcttggaggtccatggctacgtggggacttgcctcgctaacatggcagttgaggcgtcaggaggcacagcagatcacgcctgtcaggaggcagcctacttgatgatggccagactgcgggagcgccacaactacatcttccatgacacggcgtaccgcttccacccccgtcgagccaacggtgatgatgtcagttccttccgtccgacagccggcgagaacgacaccacctttggtcacatgtgtgctgtgatgaggggactggataggatgcactcggacctgcacaaggcgaccaaggccttgaacgatgggaagctcatgaggatcgtcgctctgaaggacgagatagcgcgcctgaagagggagaacgctcagctaaagggtcttccagcgccaggaggagtccggatccgcactacgccccgcaagactatgacggcacccgtgcgcatccagcttgcgcccaggaacccgcctccagcagcagctcccgcagcacctccagttccgcccgcagttcctgcagctccagctccagctcccgcgtccgctctctccttcgctccagcatcagccgccagaggtccagccagtggcaccggaggttgcttgtttgggatggtctacaccaggactggcacccgcacgataggcgagggcagcaacggcgaagaacgtgctgatggtgtgcaccccagcagtgattccggcaatggtctgccaccacttcccgagaatccgacccttgcccaagttatggcacatcagactcagatgatggcagccatgatgcagcagatgcagcagcagcaccagcagatgcaccagaggatgatgcagcacgccgaacagcagcaccagcagtttggtccccctccccctcagtccaagttgcctgagttcctacgtgtcaggccacccaccttctccagcaccaccaaccctatggaggcaaatgactggctccatgcaatagagaagaagctgaatctcctgcagtgcaatgatcaggagaaggtcgcttttgccacacaccagcttcaagggcctgcgtcggcttggtgggacaatcacatggccacccgcccaccgggtactgaagtcacatgggcagagttctgccgtagcttcaggaaggcacaggtgccagatggggtcgtggcacaaaagaagagggaatttcgtgcactccatcagggcaacaggactgtgacggagtacctccatgagtttaatcgcctcgcacgatatgcaccagaggatgtccgcaccgacgccgagaagcaggaaaagttcatggcaggtctggatgacgagctgaccaaccaactgatatctggggactacgccgactttgagaggctagttgacaaggcaattcgtcaggaggaccaacgcaacaagatggacaggaagaggaaggccgcacagttcagggcacctcagggaagtcgccagaggccgcgcttcactcccgggcagcagggtggacctaccaccatgatcgtccgccagtaccgcccgttcaatcctagcaactttcctcagggcgccagtggcagtcagaaccaccatggaggtcagtccaaccgcggtgcagctccacgtccaccaatggcaccggcacagtcaggcccgcccgcgcaagccaagaaggagactggagcaaaaacagggtcctgcttcaactgtggcgagcttggccacttcgctgacaaatgcccgaagcccaggcgtgccgggccaaggtttatccaggctcgtgtcaaccacgcatctgcggaggaggcacaagcagcaccagaggttgtactgggtacgtttcctgttaactcaatccctgcaacagtactttttgattctggtgcaacgcattctttcatttcaaagaaattcgtggggaggtatgggttaaggaaagaagagcttagcacaccaatgagagttcataccccgggaaatagttcaacctcagtcagttttagcccttcagtgctaatagaaatccaaagatcaccatttctagccaacctcattcttcttgaatccaaagacctagacgtcattcttgggatggattggctgaccaagttcaagggagtcatcgattgtgcgaatcgcacagtcaccctgaccaacgagaagggagaaaccgtggcgtacaaatcactagtctcaccaaagcaaggggtctctttgaatcagattgaagcagaaatcccagtggacaccgtggagaagaacttgaggaaaatggaatatatacccatagtctgcgagtatccggaagtgttccccgaagacctcactaccatgccacccaagagagagattgaattccggattgacttggcaccgggaaccgccccaatttacaagagaccgtacaggatggcagccaacgaactagcagaggtcaagaagcaagttgatgagcagctgcagaaagggtacattcgaccaagtacttcaccttggggtgctccggtcatttttgtggagaaaaaggataagacgaagaggatgtgcgttgattatcgcgcactcaatgaggtcacaatcaagaacaaatatcccttgccgcggatcgacgatttatttgatcaactgaaaggagctaaagtgttttctaagatagacctgcgatcaggctaccaccagttgagaattcgggaagaggatattccgaagacggccttcaccactcggtacgggctatatgagtgcacggttatgtccttcggacctactaacgcacctgcattcttcatgaatctgatgaacaaagtgttcatggaatttctggacaagtttgttgtggtattcatcgacgacatacttatctactcaaaatccgaggaagaacatgagcaacatctccgtctggtactcgagaagttgaaggagcaccagctatacgccaagttcagcaagtgtgacttctggttgacggaagtcaaatttctgggccatgtcattacagcccagggtgtggcagttgatccgtcaaacgtagagtcagtcaccaagtggatcccaccgaagaccgtgtcgcagattcgaagttttctaggactggcaggttattaccgccgattcatcgaaaacttctccagaatcgcccgacccatgactcagttgcttaagaaagatgagaagtttaagtggacagctgagtgcgataagagttttgaggagctcaagaagaaattagtatccgcaccggttttgattttgcccgaccagatgaaagacttccaagtctattgcgatgcatcccgtcacggacttggatgtgtcctaatgcaagagggcagagtggttgcgtatgcctcacggcagttgcgtccacacgaagggaattatccaactcatgacctagaattggcagcagtggttcatgctttgaagatctggaggcactatctaattggcaaccgctgcgaagtatatacggaccataagagtctgaaatacatcttcacccaaccggacctaaatctccgacaacgaagatggttggaactaatcaaagactatgacatgagtattcactaccacccgggtaaagccaatgtggtggcagacgcattaagccggaaaagttactgcactgccctatgcatcgagggcatgtgtgaggaattgcggcaggagtttgagcatctcaacgtgggaattgttgaacacgggttcgtagccgctctggaggcacggcctacgctcgtggatcaagtcagagtagctcaagtaaatgattctgaaatagcagagctgaaaaagaatatgagagtcgggaaagcccgggatttccacgaagatgaacacggcacaatctggttgggagaaagattatgtgtacctgacgacaaggaactgaaggatctgatactcactgaggctcatcagacccagtactccattcatccaggcagcactaaaatgtatcaagacctcaaagaaaagttttggtgggtcagcatgaggagagaaatagctgaattcgtcgcactctgtgatgtttgccaacgagtgaaggcagagcaccaaagaccagcaggtttactccaacctcttcaaatcccggaatggaaatgggaggagattggaatttactttataacgggactgccccggacatcgtcgggtcacgattcgatctgggtagtcgtggatcgactcactaaggttgctcacttcataccagtacataccacatatacgggcaaaaggttggcggagctttacctttcgagaatcatgtgcctacatggagtacccaaaaagattgtatctgaccgagggagtcagttcacctcaaaattctggcagaagctgcaggaagaaatggggacccgtttaaatttcagcacggcctatcacccgcaaactgatggtcagaccgagcgagtcaatcaaatcttggaagatatgttgagagcttgcgctcttgattttggtggagcttgggacaaaagcttgccatatgcggaattctcgtacaacaacaactaccaggccagtctacagatggcaccgtttgaagctttatacggccggaagtgccgcacacctctcttctgggatcagacaggcgagcgtcaactgttcggaacagaggtattagcggaagcagaagagaaagtcaggatcatcagggaaaggttgagaattgcccagtctcgacagaagagctacgcggataaccgtcgaagggagctcacttttgaggtaggagattacgtgtatcttcgtgtcactccgctccggggagtacaccggtttcagacgaaaggcaagttggcaccacgcttcgtgggaccatacaaaatcttggaacgaaggggagaagttgcttatcagctagaacttccatccaacatgatcggcatccatgacgtgttccacgtgtcccaactaaagaagtgcttaagggtacctgaagaacaggctgattcggaacacattgatatccaggaggacctaacatatgtggagaagccggttcgtatacttgataccagcgaaaggagaaccagaaacaaggtcacccggttttgccgagttcagtggagtcatcattcggaagaggaagcaacctgggaaagggaagatgagttgaaagccgcccatccgcacctcttcaccagctcctccgaatctcggggccgagattccgtttaa

SEQ ID NO: 13795 - DNA, 3924 bp, Oryza sativa
  Clone ID: TFbOSC18656j.C1.o6.gm
atggtctacaccaggactggcaaccgcacgacaggcgagggcagcaacggcgaagaacgcgccgatggtgtgcaccccaacagtgattctggcaatggtccgccaccacttcccgagaatccgacgcttgcccaagttatggcacatcagactcagatgatggcagccatgatgcagcagatgcagcagcagcaccagcaaatgcaccaaaggatgatgcagcacgccgaacagcagcatcaacagtttggtccccctccccctcagtccaagttgccagaatttctacgcgtcaggccacccaccttctccagcaccaccaaccctatggaggcgaacgactggctccatgcaatagagaagaagctgaatctcctgcagtgcaatgatcaggagaaggtcgctttcgccacacaccagcttcagggtcccgcgtcagcttggtgggacaaccacatggccacccgcccaccgggtactgaagtcacatgggcagagttctgccgtagcttcaggaaggcacaggtgccagatggggtcgtggcacaaaagaagagggaatttcgtgcactccatcagggcaaccggactgtgacagagtacctccacgagttcaatcgcctcgcgcgatatgcaccagaggatgtccgcaccgacgccgagaagcaggagaagttcatggcgggtttggatgacgagttgaccaaccaactgatatccggggactacgctgactttgaaaggctggttgacaaggcaatccgtcaggaggatcagcgcaacaaaatggacaggaaaagaaaggcggcgcagttccggtccaaccaaggtagtcagcaccgaccgcgcttcactcccggacagcagggtggacctaccaccatgatcgtccgtcagcaccgcccgttcaactccagcaacttccaccagggcactagtggcagtcagaaccaccagggaggccagcccaaccgcggtgcagctccacgcccaccaatggcaccggcacagtcaggccagcccgcgcaagccaagaaggagacgggagcaaaaccagggtcctgcttcaactgtggcgagcttggccacttcgctgacaaatgcccgaagcccaggcgtgccgggccaaggtttatccaggctcgtgtcaaccacgcgtctgcggaggaggcacaagcagcaccagaggtcgtactggtcaccttgaccaacgagaagggagaaaccgtagtgtacaaatcaccagactcaccaaagcaaggagtctccttgaatcaaattgaaacggaaatcccagtggacaccgtggagaagaacttgagaaaattggaagatatacccatagtctgcgagtatccggaagtgttccccgaagacctcactaccatgccacccaagagagagattgaattccggattgacttggcaccgggaaccgctccaatttacaagagaccatacaggatggcggccaacgaattagcagaggtcaagaagcaagttgatgagcagctgcagaaagggtacgtacgaccgagcacttcgccttggggcgctccggtcatatttgtggagaaaaaggataagacgaagaggatgtgcgtcgattatcgcgcacttaacgaggtcacaatcaagaataaatatcctttaccgcgaatcgacgatttatttgatcaactgaaaggagctaaagtgttctctaagatagacctgcgatcaggctaccaccagttgagaattcgggaagaggatattccgaagacggccttcaccactcggtacgggctatatgagtgcacggttatgtctttcagacttaccaacgcacccgcattcttcatgaatctgatgaacaaagtgttcatggaatttctggacaagtttgttgtggtgtttatcgacgacattcttatctattcaaagtccggagaagaacatgaacaacatctccgtctggtactcgaaaagttgaaggagcaccagctatacgccaagttcagcaagtgtgacttctggttgacggaagtcaaatttctgggtcatgtcattacagctcagggtgtggcagttgatccgtcgaacgtggagtcagttaccaaatggaccccacctaagaccgtgtcgcagattcgaagttttctaggactggcgggttattaccgccgattcatcgaaaatttctccagaatcgcccgacccatgactcagttgcttaagaaggatgagaagtttaaatggacagctgagtgcgataagagctttgaggagctcaagaagaaattagtatccgcaccagttttgattctgcccgacccgactaaggacttccaagtctattgtgatgcatcccgtcacggacttggatgtgtcctaatgcaggaaggcagagtggttgcgtatgcctcgcggcagttgcgtccacacgaaggaaattatcccactcatgacttggaattggcagcagtggttcatgctttgaagatctggaggcactatctgattggaaaccgctgcgaagtatatacggaccataagagtctgaaatacatcttcacccaaccggatctaaaccttcggcaacgaagatggttggaactaatcaaagactatgacatgagtattcactaccacccgggtaaagccaatgtggtggcagacgcattaagccggaaaagttactgcactgccctatgcatcgagggcatgtgtgaggaattgcggcaggagtttgagcatctcaacgtgggaattgttgaacacgggttcgtagccgctctggaggcacggcctacgctcgtggatcaagttagagccgctcaagtaaatgatccggaaatagcagagctgaaaaagaacatgagagtcggaaaggctcgggacttctttgaggatgagcatggcacaatctggatgggagaaagattgtgtgtacctgacgacaaggaattgaaggatctgatactcaccgaggctcatcagacccagtactccattcatccaggcagcaccaaaatgtatcaagacctcaaagaaaagttttggtgggtcagcatgaggagagaaatagctgaattcgtcgcactctgcgatgtttgccaacgagtgaaggcagagcaccaaagacccgcaggtttactccaacctcttcaaatcccggaatggaaatgggaggagattggaatggactttataacgggactgccccggacatcatcgggacatgattcaatctgggtagtcgtggatcgactcaccaaggaagaattggggacccgtttaaatttcagcacggcctatcacccgcaaactgatggtcagaccgagcgagtcaatcaaatcttggaagatatgttgagagcttgcgctcttgattttggtggagcttgggacaaaagcttgccatatgcggaattctcgtacaacaacagctaccaggccagtctacagatggcaccgtttgaagctttatacggccggaagtgccgcacacctctcttctgggatcagacaggcgaacgtcaactgttcggaacagaagtattagcggaagcagaagagaaagtcagaaccatcagggaaaggttgaggattgctcagtctcgacagaagagctacgcggataaccgccgaagggagctcacttttgaggccggagattacgtgtatcttcgtgtcactccgctccggggagtacaccgttttcagacgaaaggcaagttggcaccacgcttcgtgggaccatacaaaattttggaacgaagaggagaagttgcttatcagctagaacttccatccaacatgatcggcatccatgacgtgttccatgtgtcccaattaaagaagtgcttaagggtacctgaagaacaggctgattcggagcacattgatatccaagaggacctaacatatgtggagaagccg

SEQ ID NO: 13796 - DNA, 4081 bp, Oryza sativa
  Clone ID: TFbOSC18884j.C1.o4.gm
atggtctacaccaggaatggcacccgcaccacgggcgagggcagcaacggcgaagagcgcactgatggtgtgcatcccaatagtgattccggcaatggtccgccaccactccccgagaatccgacccttgcccaagtaatggctcatcagacgcagatgatgacagccatgatgcagcaaatgcaacagcagcaccaacagatgtaccagaggatgcagcagcaagccgagcagcaccagcagcagtttggcccccctccccctcagtccaaactgccagagtttctacgcgtcaggccacccaccttttctagcaccaccaaccctatgaaggcaaatgattggctccatgccatagagaagaagctcaatctcctgcagtgcaatgatcaggagaaggtcgccttcgccacacaccagctccaaggtcccgcgtcagcttggtgggacaatcacatgactacccgcccgccaggcactgaagtcacttgggcagagttctgccgcaacttcaggaaggcgcaggtgctagatggggtcgtggcacaaaagaagagggaattccgagcactccaccagggcaacaggacagtgacggagtatctccatgagttcgatcgcctcgcgcgatatgcaccggaggatgtccgtactgacgccaagaagcaggagaaattcctagcaggtctggatgatgagctaaccaaccagttgatatccggagattacgccgactttgagaggctggttgacaaggcaatccgtcaggaggatcagcacaacaaaatggataggaagaggaaggcggcgcagttccggtccaaccaagcaagccaccagcgaccgcgcttcattcccagacagcagggtgaacctaccaccatgatcgtccgccagcaccgccctttcaactcaagcaacttccaccagggcgctagtggcagccagaaccaccgtggaggtcagcccaaccgcagtgcaactccgcgcccaccaatggcaccagcacagtcagctccgtctgtgcaagccaagaaggagaccggagcaaagccagggtcctgcttcaactgtggtgagcttggccacttcgctgacaaatgcccgaagcctaggcgtgctgggccaaggtttgtccaggcccgtgtcaaccacgcgtctacagaggaggcacaagcagcaccagaggtcgtactggtcaccttgatcaatgagaagggagaaacagtagtgtacaaatcactagtctcaccaaaacaaggggtctctttgaatcagattgaggtggagatcccagtggtcaccgaggagaagaattcgaggaaattggaagagattcccatagtctgcgagtacccagaagtgtttcccgaagacctcactaccatgccacccaagagagagattgaattccggattgatttggcaccgggaaccgctccaatttacaagagaccgtacaggatggcagccaacgaactagcagaggtcaagaagcaggttgatgagcagctgcagaaagggtacattcgaccaagtacttcaccttggggtgcaccggtcatttttgtggagaaaaaggataagacgaagaggatgtgcgtcgactatcgcgcactcaatgaggtcacaatcaagaacaaatatcctttaccgcggatcgatgatttgtttgatcaactgaagggagctaaagtgttttctaagatagacctacgatcaggctaccaccagttgagaattcgggaagaggatattccaaagacggccttcaccactcagtatgggttgtatgagtgcacggttatgtctttcggacttaccaatgcacccgcattcttcatgaacttgatgaacaaagtgttcatggaatttctggataagtttgtggtggtattcattgacgacatactcatctattccaaattggaagaagaacatgagcaacatctccgtctggtactcgagaaattgaaggagcaccagttgtatgccaagttcagcaagtgtgacttctggttgtcggaagtcaaatttctgggtcacattattacagctcaaggcgtggcagttgattcatcgaacgtggagtcagttaccaaatggaccccacctaagaccgtgtcgcagattcggagttttcttggacttgcagggtattaccgtcggttcattgaaaatttctccaggatcgcccgacccatgactcagttgcttaagaaagatgagaaatttaaatggacagccgagtgtgacaagagttttgaggagctcaagaagaaattagtatccgccccagttctgattctgcccgaccagatgaaagacttccaagtctattgcgacgcatcccgccacgggcttggatgtgttctaatgcaagagggtagagtggtcgcatacgcctcgcggcagttgcgtccacatgaagggaattatccaactcatgacctggaattggcagtagtggttcatgctttgaagatctggaggcactatctgattggcaaccgctgcgaagtatatacggaccacaagagtctgaaatacatcttcacccaaccggacctaaatctccgacaacgaagatggttggaactaatcaaagattatgacatgagcattcactaccacccgggtaaagccaatgtggtggcagatgcattaagcaggaaaagctactgcaatgccctatgcaccgaggacatgtgtgaagaattgcagcaggagcttgagcgtctcaacgtgggaattgttgaacataggttcgtagccgctctggaagcacggcctacgcttgtggatcaattcagagcagctcaagtaaatgaccccgaaatagttgaactgaaaaagaatatgagagtgggaaaagcccgggacttccttgaggatgaacatcgcacaatctggatgggagaaagattgtgtgtacctgacgacaaggaactgaaggatctgatactcaccgaggctcatcagactcagtactccattcatccaggcagcaccaaaatgtatcaagacctcaaagaaaagttttggtgggtcagcatgagaagggaaatagctgaattcgtcgcactctgcgacgtttgccaacgagtgaaggcagagcaccaaaggccagtaggtttattccaacctcttcaaatcccgaaatggaagtgggaggagattggaatggactttataacaggactgccccggacatcatcgggctccgttaaaggcaaattaccgaagccgggattgactgacatcattgatgacaatgtcctgccgatcgatcccgagaaattcacgcctgaccagaagcaaaaatttgaagcaatgatgcagcaagcacgggatcagtatctaagctcgttcatgcaaacccgcaagggaatgctggttcagaagtacaagttaaaactggttgctgacaaccctggaaccggttcttctaaagatggagaagtgaaacaagctccagatggctcggctcagccgagcaacaagggtgctaccagtggttctataggaaatcaaggcgataaccctcaagaagtgcacggagctccaggcgactccatctgtcgaacccacgactcaaccaacagcgccagcatcaacgcccttacctgctacatcggccacggctgcagcagcagccgatccagcagacgtcatcaattcagccggttgtacagccgatccaacaacaggtcgcgcagccagctcagcaaacaccaccaattcagccggtggtacggccgatccaacaacaggtcttgcagccagttcagcaagcaccatcaacgcagcagcatctccaaccaatccagcaaacaccgccaaggcaacgccttcagccgatccaacggactccggtacgacagcaggtcgttcagccgattcagcacctggggccagccaatgcatcggctggatttgcagcacatggggggcaacctgcgcagcagctcgccgccgcaccgtgccgtcgccgccgttgggttcgcgtggtcgaggtccacccagtccgcccctcctccatcgaggtccgtcgccggagcccgcatcccctcgcactccg

SEQ ID NO: 13797 - DNA, 5484 bp, Oryza sativa
  Clone ID: TFbOSC19176j.C1.o1.fg
atggagaaacctaagagccctctgaatcctttttcattgcatatgttcttcgcaattggatttgttccgggaaaatggggatctgttcttgtggttcaagggaaaaatcttggtcgctcgtttaaaatggccggtcacccacccaaccaccgcggagaaggcatgattgatttcgtggcagagttggcacgcatgacactggtagtgggctaccccgacgcgccggaatacacgaccatcccaccgctcagtggcgagcttccttaccgtgtccgcttggaggtccatggctacgtggggacttgcctcgctaacatggcggtcgaggcatcaggaggcacagcagatcacgcctgtcaggaggcagcctacttgatgatggccaggttacgggagcgccacgactacatcttccacgacacggcgtaccgctaccacccccgtcgagcccatggtgatggcgtcagctccttccgtccgacagctggcgagaacgacaccacctttggtcacatgtgtgctgtgatgaggggattggacaggatgcactcggacctgcacaaggcgaccaaggccttgaatgatgggaagctcatgaggatcgtcgctctgaaggacgagatagcgcgcctgaagaaggagaatgctcagttgaagggtcttccagcaccaggaggagtccggatccgcactacgccccgtaagaggacgactgcacccgtgcgcatccagcttgcgcccaggaacccacctccaccagcagctcccgcagcacctccagttccgcccgcagctccggcagttcccgcagttcctccagctccagctccagctccaactcccgcgttcactctctccttcgctccagcatcagccgccagaggttcagccagtggtaccggaggttgcttgtttgggatggtctacaccaggactggtagccgcgcaacaggcgagggcagcaacggcgaagaacgcgctgatggtgtgcaccccaacggtgattctggcaatggtccaccaccacttcccgagaatccgacgcttgcccaagttatggcacatcagactcagatgatggcagccatgatgcagcagatgcagcagcagcaccagcagatgcatcagaggatgatgcagcacgccgaacagcagcaccagcagtttggtccccctcccccccagtccaagttgcctgagtttctacgtgtcaggccacccaccttctccagcaccaccaaccctatggaggcaaatgactggctccatgcgatagagaagaagctgaatctcctgcagtgcaatgatcaggagaaggtcgctttcgccacacaccagcttcagggtcctgcgtcagcttggtgggacaaccacatggccacccgcccaccgggtactgaagtcacatgggcagagttctgccgtagcttcaggaaggcacaggtgccagacggggtcgtggcacaaaagaagagggaattccgggcgctccatcagggcaacatgactgtgacagagtacctccacgagttcaatcgcctcgcgcgatatgcaccagaggatgtccgcaccgacgccgagaagcaggagaagttcatggcgggtctggatgatgagctgaccaaccaactgatatctggggactacgccgactttgagaggctggttgacaaggcaatccgccaggaggatcagcgcaacaaaatggacaggaaaagaaaggcggcgcaattccggtccaaccaaggtagtcagcaccgaccgcgcttcactcccggacagcagggtggacctaccaccatgatcgtccgccagcaccgcccgttcaactccagcaacttccaccagggcactagtggcagtcagaaccaccagggaggccagcccaaccgcggtgcagctccacgcccaccaatggcaccggcacagtcagcccagcccgcgcaagccaagaaggagacgggagcaaaaccagggtcctgcttcaactgtggcgagcttggccacttcgctgacaaatgcccgaagcccaggcgtgccgggccaaggtttatccaggctcgtgtcaaccacgcgtctgcggaggaggcacaagcagcaccagaggtcgtactgggtacgttccctgttaactcaatccctgcaacagtactttttgattctggtgcaacgcattctttcatttcaaagaaattcgtgggaatgtatgggctaaggaaagacgagcttagcacaccaatgagggttcgtaccccgggaaatagttcaacctcagtcagttttagcccttcagtgctaatagaaatccaaagatcaccatttctagccaacctcattcttctcgaatccaaagacctagatgtcattcttgggatggattggctgaccaagtttaagggggtcatcgattgtgcgagtcgcacagtcaccttgaccaacgagaagggagaaaccgtagtgtacaaatcaccagactcaccaaagcaaggagtctccttgaatcaaattgaaacggaaatcccagtggacaccgtggggaagaacttgagaaaattggaagatatacccatagtctgcgagtatccggaagtgttccccgaagacctcactaccatgccacccaagagggagattgaattccggattgacttggcaccgggaaccgctccaatttacaagagaccatacaggatggcggccaacgaattagcagaggtcaagaagcaagttgatgaacagctgcagaaagggtacatacgaccaagcacttcaccttggggcgctccggtcatttttgtggagaaaaaggataagacgaagaggatgtgcgtcgattatcgcgcacttaacgaggtcacaatcaagaataaatatcccttaccgcgaatcgacgatttatttgatcaactgaaaggagctaaagtgttctctaagatagacctgcgatcaggctaccaccagctgagaatccgggaagaggatattccgaagacggccttcaccactcggtacgggctatatgagtgcacggttatgtctttcggacttaccaacgcacccgcattcttcatgaatctgatgaacaaagtgttcatagaatttttggacaagtttgttgtggtgttcatcgacgacattcttatctattcaaagtccgaagaggaacatgaacaacatctccgtctggtactcgagaagttgaaggagcaccagctatacgccaagttcagcaagtgtgacttctggttgacggaagtcaaatttctgggccatgtcattacagcccagggtgtggcagttgatccatcgaacgtggagtcagttacaaaatggaccccaccaaagaccgtgtcgcagattcggagttttctaggactggctagttattaccgtcgtttcatcgaaaacttctcaagaatcgcccgacccatgactcagttgcttaagaaagacgagaagtttaaatggacagctgagtgcgacaagagctttgaggagctcaaaaggaaattagtatccgcaccggttttgatcctgcccgaccagacgaaagacttccaagtctattgtgatgcatcccgtcacggacttggatgtgtcctaatgcaagagggcagagtggttgcgtatgcctcgcggcagttgcgtccacacgaaggaaattatccaactcatgacttggaattggcagcagtggttcatgctttgaagatctggaggcattatctgattggaaaccgctgcgaagtatatacggaccataagagtctgaaatacatcttcacccaaccggatctaaaccttcgacaacgaagatggttggaactaatcaaagactatgacatgagtattcactaccacccgggtaaagccaatgtggtggcagacgctttaagccggaaaagttactgcactgccctatgcatcgagggcatgtgtgaggaattgcggcaggaatttgaacatctcaacatgggaattgttgaacacgggtttgtagccgctttggaggcacggcctacgctcgtggatcaagtcagagccgctcaagtaaatgatccggaaatagcagaactgaaaaagaacatgagagtcggaaaggctcgggatttccatgaagatgagcatggcacaatctggatgggagaaagattgtgtgtacctgacgacaaagaactgaaggatctgatactcaccgaggctcatcagacccagtactccattcacccaggcagcaccaaaatgtatcaagacctcaaggaaaaattttggtgggtcagcatgaggagagaaatagctgaattcgtcgcactctgcgatgtttgccaacgagtgaaagcagagcaccaaagaccagcaggtttactccaacctcttcaaatcccggaatggaaatgggaggagattggaatggactttataacaggactgccccggacatcatcgggacatgattcaatctgggtagtcgtggatcgacttaccaaggtggctcactttataccagtacataccacctatacgggaaagagattggcagaattgtacctcgcaaggatcatgtgtttgcatggggtacccaagaagatagtatccgaccgaggtagtcagttcacctcaaagttctggcagaagctgcaggaagagatggggacccgtttaaatttcagcacggcctatcacccgcaaactgatggtcagacagagcgagtcaatcaaatcttggaagatatgttgagagcttgcgctcttgattttggtggagcttgggacaaaagcttaccatatgcggaattctcgtataacaacagctaccaggccagtctacagatggcaccgtttgaagctctatacggccggaagtgccgcacacctctcttctgggatcagacaggcgaacgtcagctgttcggaacagaagtattagcggaagcagaagagaaagtcagaatcatcagggagagattgaggattgctcagtctcgacagaagagctacgcggataaccgtcgaagggagctaacttttgaggccggagattacgtgtatcttcgtgtcaccccgctccggggagtacaccgctttcagacaaaaggcaagttggcaccacgcttcgtgggaccgtacaaaattttggaacgaaggggagaagttgcctatcagctagaacttccatccactatgatcggcatccatgacgtgttccatgtgtcccaattaaagaagtgtttaagggtacctgaagaacaggctgattcggaacacattgatatccaagaggacctaacatatgtggagaagccggttcacatacttgacactagcgaaaggagaaccagaaacaaggtcacccggttttgccgagttcagtggagtcatcattcggaagaggaagcgacctgggaaagggaagatgagttgaaagccgcccatccgtacctcttcaccagctccaccgaatctcggggccgagattccgtttaa

SEQ ID NO: 13798 - DNA, 2467 bp, Oryza sativa
  Clone ID: TFbOSC20350j.C1.o1.gm
ggcaacaggactatgacggagtacctccatgagttcaatcgcctcgcgcgatatgcaccagaggatgtccgcaccgacgccgagaagcaggaaaagttcatggcgggtctggatgacgagctgaccaaccaactgatatctggggactacgctgactttgagaggctagttgacaaggcaatccgtcaggaggatcaacgcaacaagatggataggaagaggaaggccgctcagttcagggcacctcagggaagtcaccagaggccgcgcttcgcttccgggcagcagggtggacctaccaccatgatcgtccgccagtaccgcccgttcaaccctagcaactttccccagggcgccagaggcagtcagaaccaccatggaggtcagcccagcagcggtgcagctccacgcccaccaacggcatcggcacagtcaggcccgtccgcgcaagccaagaaggagactggaacaaaaccagggtcttgcttcaactgtggcgagcttggccacttcgctgacaaatgcccgaagcctaggcgtgccgggccaaggtttatccaggctcgtgtcaaccacgcgtccgcggaggaggctcaagcagcaccagaggttgtactggcggaaatcccagtggacaccgtggagaagaacttgagggaattggaagatatacccatagtctgcgagtatccagaagtgttccccgaagacctcactaccatgccacccaagagagagattgaattccggattgacttggcaccgggaaccgctccaatttacaagagaccatatagaatggcggctaatgaattagccgaggtcaagaagcaggttgatgagcagctgcagaaagggtacattcgaccaagtacttcaccttggggtgctccggtcatttttgtggagaaaaaggataagacgaagaggatgtgcgttgattatcgcgcactcaacgaggtcacaatcaagaacaaatatcctttgccgcgaatcgatgatttgtttgatcaactgaaaggagctaaagtgttttctaagatagacctgcgatcaggctaccaccagttgagaattcgggaggaggatattccaaagacggccttcaccactcggtacggattatatgagtgcacggttatgtcgttcggacttaccaacgcacccgcattcttcatgaatctgatgaacaaagtgttcatggaatttctggacaagtttgttgtggtattcatcgacgacatacttatctattcaaagtccaaagaagaacatgagcaacatctccgcctggtactcgagaagttgaaggagcaccagctatacgccaagttcagcaagtgtgacttctggttgacggaagtcaaatttttgggccatgtcattacagctcagggtgtggcagttgacccatcaaacgtagagtcagttaccaaatggaccccaccgaagaccgtgtcgcagattcgaagttttctaggactggcaggttattaccgccgattcatcgaaaacttctccagaatcgcccgacccatgactcagttgcttaagaaagatgagaagtttaaatggacagttgagtgcgataagagttttgaggagctcaagaagaaattagtatccgcaccagttttaattctgcccgaccagatgaaagacttccaagtctattgcgatgcatcccgtcacggacttggatgtgtcctaatgcaagagggcagagtggttgcgtatgcctcgcggctgttgcgtccacacgaagggaattatccaactcatgacctggaattggcagcagtggttcatgctttgaagatctggaggcactatctgattggcaaccgctgcaaagtatatacggaccataagagtctgaaatacatcttcacccaaccggacctaaatctccgacaacgaagatggttggaactaatcaaagactatgacatgagcattcactaccacccgggtaaagccaatgtggtggcagacgcgttaagcaggaaaagttactgcactgccctatgcatcgagggcatgtgtgaagaattgcggcaggagtttgagcatctcaacgtgggaattgttgaacacggttttgtagccgctctggaggcatggcctacgctcgtggatcaagtcagagcagctcaagtaaatgattctgaaatagcagagctgaaaaagaacatgagagtcggaaaagcccgggatttccacgaagatgagcatggcacaatctggttgggagaaagattgtgtgtacctgacgacaaggaactgaaggatctgatactcaccgaggctcatcagacccagtactccattcatccaggcagcactaaaatgtatcaagacctcaaagaaaagttttggtgggtcagcatgaggagagaaatagctgaattcgtcgcactctgcgatgtttgccaacgagtgaaggcagagcaccaaagaccagcag

SEQ ID NO: 13799 - DNA, 4386 bp, Oryza sativa
  Clone ID: TFbOSC25185j.C1.o3.fg
atggtctacaccaggaatggtagccgcgcaacaggcgagggcagcaacggcgaagaacgcgctgatggtgtgcaccccagcagtgattccggcaatggtccgccaccacttcccgagaatccgacccttgcccaagttatggcacatcagactcagatgatggcagccatgatgcagcagatgcagcagcagcaccagcagatgcaccagaggatgatgcagcacgtcgaacagcagcaccagcagtttggtccccctccccctcagtccaagttgccagagtttctacgcgtcaggccacccaccttctcaagcaccaccaaccccatggaggcgaatgactggctccatgccatagagaagaagctgaatcgcctgcagtgcaatgatcaggagaaggtcgctttcgccacacaccagcttcagggtcccgcgtcagcttggtgggacaatcacatggccacccgcccaccaggtactgaagtcacatgggcagagttctgccgtagcttctggaaggcgcaggtgccagacggggtcgtggcacaaaagaagagggaattccgggcactccatcagggcaacaggactgtgacagagtacctccacgagttcaatcgcctcgcgcgatatgcaccagaggatgtccgcaccgacgccgagaagcaggagaagttcatggcgggtctggatgatgagctgaccaaccaactgatatccggggactacgctgactttgagaggttggttgacaaggcaatccgccaggaggatcaacgcaacaagatggacaggaagaggaaggccgcacagttcagggcacctcagggaagtcaccagaggccgcgcttcgctcctgggcagcagggtggacctaccaccatgatcgttcgtcagcaccgcccgttcaaccctagcaactttccccagggcgccagtggcagtcagaaccaccatggaggtcagtccaaccgcggtgcagcttcacgcccaccaatggcaccggcacagtcaggcccgcccgcgcaagccaagaaggagactggagcaaaaccagggtcctgcttcaactgtggcgagcttggccacttcgctgacaaatgcccgaagcctaggcgtgccgggccaaggtttatccaggctcgtgtcaaccacgcatctgcggaggaggcacaagcagcaccagaggtcgtactgggtacgttccctgttaactcaatccctgcaacagtactttttgattctggtgcgacgcattctttcatttcaaagaaatttgtcgggatgcatctgttaataagagaggaacttagcacaccaatgcgggttcataccccagggaatagctccacttcggttcaattcagcccttctataacaatagaaattcaaagatcaccatttctagccaacctcattcttctcgaatccaaagacctagatgtcattcttgggatggattggctgaccaagtttaagggggtcatcgattgtgcgaatcgcacagtcaccttgatcaacgagaagggagaaaccgtggtgtacaaatctctagtctcgccaaagaaaggggtctctttgaatcagattgaagcggaaatcccagtggacaccgtagagaagaactcgagaaaattggaagatatacccatagtctgcgagtatccagaagtgttccccgaagacctcactaccatgccacccaagagagagattgaattccggattgacttggcaccgggaactgctccaatctataagagaccatacaggatggcggccaacgaactagcagaggtcaagaaacaggttgatgagcagctgcagaaagggtacattcgaccaagtacttcacctttgggtgctccggtcatttttgtggagaaaaaggataagacgaagaggatgtgcgttgattaccacgcactcaacgaggtcacaatcaagaacaaatatcctttgccgcgaatcgatgatttgtttgatcaactgaaaggagctaaagtgttttctaagatagacctgcgatcaggctaccaccagttgagaattcgggaagaggatattccgaagacggccttcaccactcggtacgggctatatgagtgcacggttatgtctttcggactcaccaacgcacccgcattcttcatgaatctgatgaacaaagtgttcatggaatttctggacaagtttgttgtggtgttcatcgacgacattcttatctattcaaagtccgaagaaaaacatgaacaacatttccgtctggtactcgagaagttgagggagcaccagctatatgccaagttcagcaagtgtgacttctggttgacggaagtcaaatttttgggccatgtcattacagctcagggttattaccgtcgattcatcgaaaatttctccagaatcgcccgacccatgactcagttgcttaagaaggatgagaagtttaaatggacagccgagtgcgataagagcttcgaggagctcaagaagaaattagtatccgcacccgttttgattctgcccgacccgatgaaagacttccaagtctattgtgatgcatcccgtcacggacttggatgtgtcctaatgcaagagggcagagtggttgcgtatgcctcacggcagttgcgtccacacgaagggaattatccaactcatgacttggaattggcagcagtggttcatgctttgaagatctggaggcactatctgattggcaaccgctgcgaagtatatacggaccataagagtctgaaatacatcttcacccaaccggacctaaatctccgacaacgaagatggttggaactaatcaaagactatgacatgagtattcactaccacccgggtaaagccaatgtggtggcagacgctttaagccggaaaagttactgcactgccctatgcatcgagggcatccgctctggaggcacggcctacgctcaagcaaatgattctgaaatagcagagctgaaaaagaacatgagtgtcggaaaagcccgggatttccacgaagatgagcatggcacaatctggttgggagaaagattgtgtgtacctgacgacaaggaactgaaggatctgatactcaccgaggctcatcagacccagtactccattcacccaggcagcactaaaatgtatcaagacctcaaagaaaagttttggtgggtcagcatgaggagagaaatagctgaattcgtcgcactctgcgatgtttgccaacgagtgaaggcagagcaccaaagaccagcaggtttacttcaacctcttcaaatcccggaatggaaatgggaggagattggaatggactttataacaggactgccccggacatcatcgggtcacgaatcgatctgggtagttgtggatcgactcactaaggttgctcacttcataccagtacataccacatatacgggcaaaaggttggcggagctttacctttcgagaatcatgtgcctacatggagtacccaaaaagattgtatctgaccgagggagtcagttcacctcaaaattctggcagaagctacaggaagaactggggacccgtttaaatttcagcacggcctatcacccgcaaactgatggtcagaccgagcgagtcaatcaaatcttggaagatatgttgagagcttgtgctcttgattttggtggagcttgggacaaaagcttgccatatgcggaattctcgtacaacaacagctaccaggccagtctacagatggcaccgtttgaagctttatacggccggaagtgtcgcacacctctcttctgggatcagacaggcgaacgtcaactgttcggaacagaagtattagcggaagcagaagagaaagtcagaatcatcagggaaagattgaggattgctcagtctcgacagaagagctacgcggataaccgtcgaagggagctcacttttgaggcaggagattacgtgtatcttcgtgtcactccgctccggggagtacactggtttcagacgaaaggcaagttggcaccacgcttcgtgggactatacaaaatcttggaacgaaggggagaagttgcttatcagttagaacttccatccaatatgatcggcacccatgacgtgttccatgtgtcccaattaaagaagtgcttaagggtacctgaagaacaggctgattcggagcacattgatatccaggaggacctaacatatgtggagaagccggttcgtatacttgataccagcgaaagaagaaccagaaataaggtcaccaggttttgccgagttcagtggagtcatcattcagaagaggaagcaacctgggaaagggaagatgagttgaaagccgcccatccgcacctcttcagcagctcctccgaatctcggggccgagattccgtttaa

SEQ ID NO: 13800 - DNA, 5175 bp, Oryza sativa
  Clone ID: TFbOSC25593j.C1.o1.fg
atgtcattgcagagggttggtgccctgctgctaggggctcagtcctgcctgcctgtcccgggggttccggccgtaggcgggattgggtcggtactcttgtctatggctaggatgggttggaaactatgtcacgtcttccgtctgtataccgtggtgatggccggtcacccacccaaccaccgtggagaaggcatgattgacttcgtggcagagttggcacgcatgacactggtggtgggctaccccaatgcgccagaatacacgacgattcccccgctcagtggcgaacttcctcaccgtgtccgcttggaggtccacggctacgtggggacttgcctcgctaatatggcggttgaggcgtcaggaggcacagcggatcacgcttgtcaggaggcagcctacttgatgatggccagactgcgggagcgccacaactacatcttccacgacacggcgtaccgcttccaccctcgtcgagcccacggtgacgacgtcagttccttccgtccgacagctggcgagaacgacaccacctttggtcacatgtgtactgtgatgaggggattggacaggatgcactcggacctgcacaaggcgaccaaggccttgaatgatgggaagctcatgaggatcgtcgctctgaaggatgagatagcgcgcctgaagaaggagaatgctcagttgaagggtcttccagcaccaggaggagtccggatccgcactacgcctcgtaagaggacgactgcacccgtgcgcatccagctcgcgcccaggaacccagttccgaccgcagctcctgcagcacctccagttccgcccgcagctccggcagttcctgcagctccagctccagctcccgcgttcgatctctccttcgccctagcatcagccgccaggggtccagccagtggtaccggaggttgcttgtttgggatggtctacaccaggactggcaaccgcacgacaggcgagggcagcaacggcgaagaacgcgttgatggtgtgcaccccaacagcgattccggcaatggtccgccaccacttcccgagaatccgacccttgcccaagttatggcacatcagactcagatgatggcagccatgatgcagcagatgcagcagcagcaccagcagatgcaccaaaggatgatgcagcacgccgaacagcagcaccagcagtttggtccccctccccctcagtccaagttgccagagtttctacgcgagaaggtcgcttttgccacacaccagcttcagggtcccgcgtcagcttggtgggacaaccacatggccacccgcccaccgggtactgaagtcacatgggcagagttctgccgtagcttcaggaaggcacaggtgccagatggggtcgtggcacaaaagaagagggaatttcgtgcactccaccagggcaacaggactgtgacagagtacctccacgagttcaatcgcctcgcgcgatatgcaccagaggatgtccgcaccgatgccgagaagcaggagaagttcatggcgggtctggatgatgagctgaccaaccaactgatatccggggattacgctgactttgagaggctggttgacaaggcaattcgtcaggaggaccaacgcaacaagatggacaggaagaggaaggccgcacagttcagggcacctcagggaagtcaccagaggccgcgcttcactcccggacagcagggtggacctaccaccatgatcgtccgtcagcaccgcccgttcaactccagcaactttcaccagggctctagtggcagtcagaaccaccatggaggtcagcccaaccgcggtgcagctccacgcccaccaatggcaccggcacagtcaggcccgcccgcgcaagccaagaaggagactggagcaaaaccagggtcctgcttcaactgtggcgagcttggccacttcgccgacaaatgcccgaagcccaggcgtgccgggccaaggtttatccaggctcgtgtcaaccacgcatctgcagaggaggcacaaacagcaccggaggtcgtactggtactttttgattctggtgcaacgcattctttcatttcaaagaaatttgtggggaggtatgggttaaggaaagaagagcttagcacaccaatgagagttcataccccgagaaatagttcaacctcagtcagttttagcccttcagtgctaatagaaatccaaagatcaccatttctagccaacctcattcttctcgaatccaaagacctagatgtcattcttgggatggattggctgaccaagtttaagggggtcattgattgtgcgaatcgcacagtcaccttgaccaacgagaagggagaaaccgtggtgtacaaatcaccagactcaccaaagcaaggagtctccttgaatcagattgaagcggaaatcccagtggacaccgtggagaagaacttgagaaaattggaagatatacccatagtctgcgagtatccggaagtgttccccgaagacctcactaccatgccacccaagagagagattgaattccggattgacttggcaccgggaactgctccaatctataagagaccgtacagaatggcggccaacgaattagcagaggtcaagaagcaagttgatgagcagctgcagaaagggtacattcgaccaagcacttcaccttggggcgctccggtcatttttgtggagaaaaaggataagacgaagaggatgtgcgtcgattatcgcgcacttaacgaggtcacaatcaagaataaatatcctttaccgcggatcgatgatttgtttgatcaactgaaaggagctagagtgttttctaagatagacctgcgatcaggctaccaccagttgagaatccgggaagaggatattccgaagacggccttcaccactcggtacgggctatatgagtgcacggttatgtctttcggacttaccaacgcacccgcattcttcatgaatctgatgaacaaagtgttcatggaatttctggacaagtttattgtggtgttcatcgacgacattcttatctattcaaagtctgaagaagaacatgaacaacatctccgtctagtactcgagaagttgaaggagcaccagctatacgccaagttcagcaagtgtgacttctggttgacggaagtcaaatttctgggccatgtcattacagctcagggtgtggcagttgatccatcgaacgtggagtcagttaccaaatggaccccaccgaagaccgtgtcgcagattcggagttttcttggacttgcgggttattaccgtcgattcatcgaaaatttctccagaatcgcccgacccatgactcagttgcttaagaaagatgagaagtttaaatggacagccgagtgcgataagagcttcgaggagctcaagaagaaattagtatccgcaccagttttgattctgcccgacccgacgaaagacttccaagtctattgtgatgcatcccgtcacggacttggatgcgtcctaatgcaagagggcagagtggttgcgtatgcctcgcggcagttgcgtccacacgaagggaattatccaactcatgacttggaattggcagcagtggttcatgctttgaagatctggaggcactatctgattggcaaccgctgcgaagtatatacggaccataagaactatgacatgagcattcactaccacccgggaaaggccaatgtagtggcagacgcattaagccggaaaagttactgcactgccctatgcaccgagggcatgtgtgaggaattgcggcaggagtttgagcatctcaacgtgggtattgttgaacacgggttcgtagccgctctggaagcacggcctacgctcgtggatcaagtcagagcagctcaagtaaatgattctgaaatagtagagctgaaaaagaatatgagagtcggaaaagcccgggatttccacgaggatgaacacggcacaatcaggatgggagaaagattgtgtgtacccgacgacaaggaactgaaggatctgatactcaccgaggctcatcagacccagtactccattcatccaggcagcactaaaatgtatcaagacctcaaagaaaagttttggtgggtcagcatgaggagagaaatagctgaattcgtcgcactctgcgatgtttgccagcgagtgaaggcagagcaccaaagaccagcaggtttactccaacctcttcaaatcccggaatggaaatgggaggagattggaatggactttataacgggactgccccggacatcatcgggacatgattcaatctgggtagtcgtggatcgactcaccaaggtggctcactttataccagtacataccacctatacgggaaagagattggcagaattgtacctcgcaaggatcatgtgtttgcatggggtacccaagaagatagtatccaaccgaggtagtcagttcacctcaaagttttggcagatactgcaggaagaattggggacccgtttaaatttcagcacggcctatcacccgcaaactgatggtcagaccgagcgagtcaatcaaatcttggaagatatgttgagagcttgcgctcttgattttggtggagcttgggacaaaagcttaccatatgcggaattctcgtacaacaacagctaccaggccagtctacagatggcaccgtttgaagctttatacggccggaagtgccgcacacctctcttctgggatcagacaggcgaacgtcaactgttcggaatagaagtattagcggaagcagaacagaaagtcagaatcatcagggaaagattgaggattgctcagtctcgacagaagagctacgcggataaccgtcgaagggagctcacttttgaggcaggagattacgtgtatcttcgtgtcactccgctccgaggagtacaccgttttcagacgaaaggcaagctggcaccacgcttcgtgggaccatacaaaattttggaacgaaggggagaagttgcttatcagctagaacttccatccaacatgatcggcatccatgacgtgttccatgtgtcccaattaaagaaatgcttaagggtacctgaagaacaggctgattcggaacacattgatatccaagaggacctaacatatgtggagaagccggttcgtatacttgataccagtgaaaggagaaccagaaacaaggtcaccaggttttgctga

SEQ ID NO: 13801 - DNA, 1326 bp, Oryza sativa
  Clone ID: TFbOSC26672j.C1.o1.fg
atggtctacaccaggaatggcacccgcacaacaggcgagggcagcaacggcgaagagcgcactgatggtgtgcaccccaacagtgattccgacaatagtccgccaccacttcccgagaatccgacgctggcccaagtgatggcacatcagactcagatgatggcagccatgatgcaacagatgcagcagcagcaccaacagatgcaccagaggatgcaacagcacgccgaacagcatcaccagcagtttggtccccctccccctcaatccaaactgccagaatttctacgtgtcaggccacccactttctccagcaccaccaaccccatggaggcaaatgactgggtccatgccatagagaagaagctgaatctcctgcagtgcaatgatcaggagaaggtcgctttcgccacacaccagctccaaggtcccgcgtcagctcggtgggacaaccacatggccacacgtccgccaggcacggaagtcacttgggcaaagttctgtcgcagcttcaggaaggcgcagaagcaggagaaattcctagcaggtctggatgatgagctaaccaaccagttgatatctggagactacgccgactttgaaaggctggttgacaaggcaatccgtcaggaggatcagcgcaacaaaatggacaggaagagaaaggcggcacagtttcggtccagccaaggaaaccatcagcgaccgcgcttcactcccggacagcagggtggacctaccaccatgatcgtccgccagcaccgcccgttcaactcaagcaactttcaccagggcgccagtggtagtcagaaccaccatggaggtcagccccaccgcggtgtagctccacgcccactagtggcaccagcacagtcagctccgcccgcgcaagccaagaaggagaccagaacaaagccagggtcctgcttcaactgtggtgagcttggtcacttcgccgacaaatgcccaaagcctaggcgtgccgggccaaggttcgtccaggctcgtgtcaaccacgcgtctgcagaggaggcgcaagcagcaccagaggtcgtactgggtacgtttcctgttaactcaatccctgcaacagtactttttgattctggtgcaacgcattcgttcatttcaaagaagtttgtggggatgaatgggttaaggaaagaagagcttagtacaccaatgagggttcataccccgggaaatagttcaacctcggtcaattttagcccttcagtgctaatagaaattcaaatatcaccatttctagccaacctcattcttcttaactccaaagacctagatgtcattcttgggatggattga

SEQ ID NO: 13802 - DNA, 2898 bp, Oryza sativa
  Clone ID: TFbOSC26672j.C1.o4.gm
atggtctacaccaggaatggcacccgcacaacaggcgagggcagcaacggcgaagagcgcactgatggtgtgcaccccaacagtgattccgacaatagtccgccaccacttcccgagaatccgacgctggcccaagtgatggcacatcagactcagatgatggcagccatgatgcaacagatgcagcagcagcaccaacagatgcaccagaggatgcaacagcacgccgaacagcatcaccagcagtttggtccccctccccctcaatccaaactgccagaatttctacgtgtcaggccacccactttctccagcaccaccaaccccatggaggcaaatgactgggtccatgccatagagaagaagctgaatctcctgcagtgcaatgatcaggagaaggtcgctttcgccacacaccagctccaaggtcccgcgtcagctcggtgggacaaccacatggccacacgtccgccaggcacggaagtcacttgggcaaagttctgtcgcagcttcaggaaggcgcaggagaaattcctagcaggtctggatgatgagctaaccaaccagttgatatctggagactacgccgactttgaaaggctggttgacaaggcaatccgtcaggaggatcagcgcaacaaaatggacaggaagagaaaggcggcacagtttcggtccagccaaggaaaccatcagcgaccgcgcttcactcccggacagcagggtggacctaccaccatgatcgtccgccagcaccgcccgttcaactcaagcaactttcaccagggcgccagtggtagtcagaaccaccatggaggtcagccccaccgcggtgtagctccacgcccactagtggcaccagcacagtcagctccgcccgcgcaagccaagaaggagaccagaacaaagccagggtcctgcttcaactgtggtgagcttggtcacttcgccgacaaatgcccaaagcctaggcgtgccgggccaaggttcgtccaggctcgtgtcaaccacgcgtctgcagaggaggcgcaagcagcaccagaggtcgtactggaggtcaagaagcaggttgatgagcaactgcagaaatggtgcattcgaacgagtacttcaccttggggtgctccagtcatttttgtggagaaaaaggataagacgaagaggatgtgcgtcgattatcgcgcactcaacgaggagcacgagttatacgccaagtttagcaagtgtgacttctggttgacggaagtcaaatttctgggccatgttattacagctcagggcgtagcagttgatccatctaatgtggagtcagttaccaaatggaccccaccgaagaccgtgtcgcagattcggagttttcttggacttgcgggttattaccgccgattcatcgaaaacttctccaggatcgcccgacccatgactcagttacttaagaaagatgagaagtttaaatggacagctgagtgcgataagagttttgaggagctcaaaaagaaattagtatccgcaccagttttgattctgcccgaccagatgaaagacttccaagtctattgcgacgcatcccgccacgggcttggatggaaagccaatgtggtggcagatgcattaagcaggaaaagttactgcactgccctatgcatcgagggcatgtgtgaggaattgcagcagttgtttgagcgtctcaacgtgggaattgttgaacaggggttcgtagccgctctagaaacacggcctacgctcgtcgatcaagttagagccgctcaagtaaatgatcctgaaatagcagaactgaaaaagaacatgagagtcggaaaagctcgagatttccttgaggatgagcatggcacaatctggatgggggaaagattgtgcgtacctgacgacaaagaactgaaggatatgatactcaccgaggctcatcagacacagtattccattcacccaggcagcaccaaaatgtaccaagacctcaaagaaaagctttggtgggtcagcatgagaagagaaatagttgaatttgtcgcactctgcgatgtttgccagcgagtgaaggcagagcaccaaaggccagcaggcttactccaacctcttaaaatcccggaatggaaatgggaggaaattggaatggattttataacaagactgccccggacatcatcgggcgagcgtcaactgtttggaacagaggtgttagcggaggcagaagagaaagtcataaccatcagggaaaggttgagaattgcccagtctcgacagaagagctacgcggataaccgccgaagggagctcacttttgaagcaggggattacgtgtatcttcgtgttactccgctccggggagtgcaccgttttcaaaccaaaggcaagttggcaccacgcttcgtgggaccctacaaaatcttggaacgaaggggagaagttgcttatcagctagagcttccttccaatatgatcggcatccatgatgtgttccacgtatcccaattaaagaagtgtttgagggtacctgaagaacaggccaattcggagcacatcgatatccaggaggatctgacctacgtggagaagccaattcgcattcttaagaccagtgaaagaagaactagaaacaaggtcaccaggtggggcccacctgtcggacccgtctcccacctcgcgcccgcgccgccgcgccggcaaccgccgccgcgcccacgcctccgcctcctccgggccacggtcgtcgccacaccgcaccgtcgccgccgacgggttcgcgaggccgaactccaccccgtccgcccctcctccgtcgagggcatcccgaagctcgtccgccggttgccgtcgtcctcccgtggctcgccgtcgccgttcgacgtcgtcttcctccgcgccggccaccctcggtga

SEQ ID NO: 13803 - DNA, 5397 bp, Oryza sativa
  Clone ID: TFbOSC26865j.C1.o1.fg
atggccggtcacccacccaaccaccgcggagaaggcatgatcgatttcgtggcagagttggcacgcatgacattggtggtgggctaccccgacgcgccggagtacacgaccatcccaccgctcagtggcgagcttcctcaccgtgtccgcttggaggtccatggttacgtggggacttgcctcgctaacatggcggtcgaggcgtcaggaggcacagcagatcatgcctgtcaggaggcagcctacctgatgatggccagactacgggagcgccacaactacatcttccacgacacggcgtaccgctaccaccccagtcgagcccacggtgatggcgtcagctccttccgtccgacagctggcgagaacgacaccaccttcggtcacatgtgcgcggtgatgaggggtctggacaggatgcactcggatctgcacaaggcgactaaggccttgaatgatgggaagctcatgaggatcgtcgctttgaaggacgagatagcgcgtctgaagaaggagaacgctcagcttaagggtctcccagcgccaggaggagtccggatccgcactacgccccgcaagactacgaaggcacccgtgcgcatccagctcgcgcccaggaacccacctccagcagcagctcccgcagcacctccagttccgcccgcagctcctgcagctccagttcctgcagctccagctccagctcccgcgttcgttctctccttcgccccagcgtcagccgtcagaggtccagccagtggcatcgggggttggttgcctgctacccccagtggcagccgcgatcgcagctccagtggctcgcagacgggcagcagcgagacgtacctgccaggctccaggagtcgttcagagggacctggttgcttgtttgggatggtcaacaccaggactggcaaccgcacgacaggcgagggcagcaacggtgaagaacgcgttgatggtatgcaccccaacggcgatcccggcaacggtccgccaccacttcccgagaatccgacacttgcccaagttatggcgcatcagactcagatgatggcagccatgatgcagcagatgcagcaacagcaccagcagatgcaccagaggatgatgcagtacgctgaacagcagcaccagcagtttggtccccctccccctcagtccaagttgcctgagttcctacgagtcaggccacccaccttctctagcaccaccaaccctatggaggcaaacgactggctccatgcaatagagaagaagctgaatctcctgcagtgcaatgatcaggagaaggtcgctttcgccacacaccagcttcagggtcctgcgtcagcttggtgggacaaccacatggccacccgcccaccgggtacggaagtcacctgggcagagttctgccgtagcttcaggaaggcacaggtgccagatggggtcgtggcacaaaagaagagggaatttcgcgcactccatcagggcaacaggacggtgacagagtacctccacgagttcaatcgcctcgcgcgatatgcaccagaggatgtccgcaccgacgccgagaagcaggagaagttcatggcgggcctggatgacgaactgaccaaccaactgatatctggggactacgccgactttgagaggctagtcgacaaggcaattcgtcaagaggaccaacgcaacaagatggacaggaagaggaaggccgctcagttcagggcacatcagggaagtcaccagaggccgcgtttcactcccggacagcagggtggacctaccaccatgatcgtccgtcagcaccgcccgttcaaccctagcaacttccaccagggcaccagtggcagtcagaaccaccatggaggtcagcccaaccgcggtgcagctccacgcccaccaatggccccggcacagtcaggccagcccacgcaagccaagaaggagactggagcaaaaccagggtcctgcttcaactgtggcgagcttggtcacttcgcggacaaatgcccgaagcccaggcgtgccgggccaaggtttatccaggctcgtgtcaaccacgcatctgcggaggaggcacaagcagcaccagaggtcgtactgggtacgtttcctgttaactcaatccctgcaacagtactttttgattctggtgcaacgcattcgttcatctcaaagaaatttgtcgggatgcatgggttaataagagaagaacttagcacaccgatgcgggttcataccccagggaatagctccacttcggttcaattcagcccttctataacaatagaaatccaaagatcaccatttctagccaacctcatccttctcgactccaaaggcctagatgtcatcctcgggatggattggctgactaagtttaagggagtcatcgattgtgcgaatcgcacagtcaccttaaccaacgagaagggagaaaccgtggtgtacaaatccctagtctcgccaaggaaaggggtctcgttgaatcagattgagacagaaatcccagtggacaccgtagagaagaactcgagaaaattggatgatatacccatagtctgcgagtatccggaagtgttccccgaagacctcactaccatgccacccaagagagagattgaattccggattgacttggcaccgggaaccgctccaatctataagagaccgtacagaatggcggccaacgaattagcggaggtcaagaagcaagttgatgaacagctgcagaaagggtacatacgaccaagcacttcgccttggggcgctccggtcatttttgtggagaaaaaagataagacgaagaggatgtgcgtcgattatcgcgcacttaacgaggtcacaatcaagaataaatatcctttgccgcggatcgacgatttatttgatcaactgaaaggggctaaagtgttttctaagatagacctgcgctcaggctaccaccagttgagaatccgggaagaggatatcccgaagacggccttcaccacgcggtacgggctatatgagtgcacggttatgtccttcggacttaccaacgcacccgcattcttcatgaatctgatgaacaaagtgttcatggaatttctggacaagtttgttgtggtgttcatcgacgacattttgatctattcaaagtccgaggaagaacatgaacaacatctccgtctggtactcgagaagttgaaggagcaccaactatacgccaagttcagcaagtgtgacttctggttgacggaagttaaatttctgggtcatgtcattacagcccagggtgtggcagtcgacccatcgaacgtggagtcagttaccaagtggaccccaccgaagaccgtgtcgcagattcgaagttttctaggattggccggttattaccgccgattcatcgaaaacttctccagaatcgcccgacccatgactcagttgcttaagaaagatgagaagtttaaatggacagctgagtgcgataagagttttgaggagctcaagaagaaattagtatccgcaccggttttgattctgcccgaccagatgaaagacttccaagtctattgcgatgcatcccgtcacggacttggatgtgtcctaatgcaagagggcagagtggttgcatatgcctcgcggcagttgcgtccacacgaaggaaattatccaactcatgacttggaattggcagcagtggttcatgctttgaagatctggaggcactatctgattggcaaccgctgcgaagtatatacggaccataagagtctgaaatacatcttcacccaaccggacctaaaccttcgacaacgaagatggttggagctaatcaaagactatgacatgagtattcactaccacccgggtaaagccaatgtggtggcagacgctttaagccggaaaagttactgcactgccctatgcaccgagggcatgtgtgaggaattgcggcaggagtttgaacatctcaacataggaattgttgaacacgggttcgtagccgctctggaggcacggccgacgctcgtggatcaagttagagccgctcaagtaaatgacccggaaatagcagagctgaaaaagaacatgagagtcggaaaggctcgggatttccttgaggatgagcatggcacaatctggatgggagaaagattgtgtgtacctgacgacaaggaattgaaggatctgatactcaccgaggctcatcagacccagtactccattcaccccggcagcaccaaaatgtatcaagatctcaaagaaaagttttggtgggtcagcatgaggagagaaatagctgagttcgtcgcactctgcgatgtttgccaacgagtgaaggcagagcaccaaagaccagcaggtctactccaacctcttcaaatcccggaatggaaatgggaagagattggaatggattttataacgggactgccccggacatcatcgggacatgattcaatctgggtagtcgtggatcgactcaccaaggtggctcacttcataccagtacataccacctatacgggaaagagattggcagagttgtacctcgcaaggatcatgtgtttgcatggggtacccaggaagatagtatctgaccgagggagtcagttcacctcaaaattctggcagaagttgcaggaagaattggggacccgtttaaatttcagcacggcctatcatccgcaaactgacggtcaaaccgagcgagtaaatcaaatcttggaagatatgttgagagcatgcgctcttgattttggtggagcttgggacaaaagcttgccatatgcggaattctcgtacaacaacagctaccaggccagtctacagatggcaccgtttgaagctttatacggccggaagtgccgcacacctctcttctgggatcagacaggcgagcgtcaactgttcggaacagaagtattagcagaagcagaagagaaagtcagaatcatcagggaaaggttgaggattgcccagtctcgacagaagagctacgcggataaccgtcgaagggagctcacctttgaggcaggagattacgtgtatcttcgtgtcactccgctccggggagtacaccgttttcagacgaaaggcaagttggcaccacgcttcgtgggaccatacaaaattttggaacgaaggggagaagttgcctaccagctagaacttccgtccaacatgatcggcatccatgacgtgttccacgtatcccaattaaagaagtgcttaagggtacctgaggaacaggctgattcggaacacatcgatatccaggaggacctgacctatgtggagaagccggttcgcatacttgataccagcgaaaggaggaccagaaacaaggtcaccaggttttgccgagttcaatggagtcatcatccgaagaggaagcaacctgggaaagggaagatgagttga

SEQ ID NO: 13804 - DNA, 3477 bp, Oryza sativa
  Clone ID: TFbOSC26925j.C1.o1.fg
atggcaccggcacagtcaggcccgtccgtgcaagccaagaaggagactggagcaaaaccagggtcctgcttcaactgtggcgagcttggccacttcgctgacaaatgcccgaagcctaggcgtgccgggccaaggtttgtccaggctcgtgtcaaccacgcatctgcggaggaggcacaagcagcaccagaggtcgtactgggtacgtttcctgttaactcaatccctgcaacagtactttttgattctggtgcaacccattctttcatttcaaagaaatttgtggggatgcatgggttaaggaaagaagagcttagcacaccaatgagggttcataccccgggaaatagttcaaccttagtcagttttagcccttcagtgctaatagaaatccaaagatcaccatttctagccaacctcattcttctcgaatccaaagacctagatgtcattcttgggatggattggctgaccaagtttaagggagtcatcgattgtgcgaatcgcacagtcaccttgaccaacgagaagggagaagccgtggtgtacaaatcactagtctcaccaaagcaaggggtctccttgaatcagattgaggcggaaatcccagtggacaccgtggagaagaatttgaggaaattggaagacatacccatagtctgcgagtatccagaagtgttccccgaagaccttactaccatgccacccaagagagagattgaattccgaattgacttggcaccgggaaccgctccaatttacaaaagaccgtacagaatggcggccaacgaactagcagaggtcaagaagcaggttgatgagcagctgcagaaagggtacattcgaccaagtacttcaccttggggtgctccggtcatttttgtggagaaaaaggataagacgaagaggatgtgcgttgattatcgcgcacttaacgaggtcacaatcaagaacaaatatcccttgccgcgaatcgatgatttgtttgatcaactgaaaggagctaaagtgttttctaagatagacctgcgatcaggctaccaccagttgaggattcgggaagaggatattccaaagacggccttcaccacccggtacgggctatatgagtgcacggttatgtctttcggacttaccaacgcacctgcattcttcatgaatctgatgaacaaagtgttcatggaatttctggacaagtttgttgtggtattcatcgacgacatacttatctattcaaagtccgaagaagaacatgagcaacatctccgtctggtactcgagaagttgaaggagcaccagctatatgccaagttcagcaagtgtgacttctggttgacggaagtcaaatttttgggccatgtcattacagctcagggttattaccgccgattcatcgaaaacttctccaggatcgcccgacccatgactcaattgcttaagaaagatgagaagtttaaatggacagctgagtgcggtaagagttttgaggagctcaaaaagaagttagtatccgcaccagttttgattctgcccgaccagatgaaagacttccaagtctattgcgatgcatcccgccacggacttggatgtgtcctaatgcaggagggcagagtggttgcgtatgcctcgcggcagttgcgtccacacgaagggaattatccaactcatgacctggaattggcagcagtggttcatgctttgaagatctggaggcactatctgattggcaaccgctgcgaagtatatacggaccataagagtctgaaatacatcttcacccaaccggacctaaatctccgacaacgaagatggttggaactaatcaaagactatgacatgagcattcactaccacccgggtgaagccaacgtggtggcagatgcattaagcaggaaaagttactgcactgccctatgcatcgagggcatgtgtgaggaattgcggcaggagtttgagcatctcaacgtaggaattgttgaacacaggttcgtagccgctttggaggcacggcctacgctcgtggatcaagttagagccgctcaagtgaatgatgccgaaatagcagagctaaaaaagaacatgagagtcggaaaggctcggaatttccttgaggatgaacacggcacaatctggttgggagaaagattgtgtgtacctgacgacaaggaactgaaggatctgatactcaccgaggctcatcagacccagtactccattcatccaggcagcaccaaaatgtatcaagacctcaaagaaaagttttggttggtcagcatgaggagagaaatagctgaattcgtcgcactctacgatgtttgccaacgagtgaaggcagggcaccaaagaccagcaggtctactccaacctcttcaaatcccggaatggaaatgggaggagattggaatggactttataacaggactgccccggacatcgtcgggtcatgattccatctgggtagtcgtggatcgacttactaaggttgctcacttcataccagtacataccacgtatacgggcaaaaggttggtggagctttacctttcgagaatcatgtgtctacatggagtacccaaaaagattgtatctgatcgagggagtcagttcacctcaaaattctggcagaagctgcaggaagaattggggacccatttaaattttagcacggcctatcacccgcaaactgatggtcagaccgagcgagtcaatcaaatcctggaagatatgttgagagcttgcgctctcgattttggtggagcttgggacaaaaacttgccatatgcggaattctcgtacaacaacagctaccaggccagtctacagatggcaccgtttgaagctttatacggccggaagtgccgcacacctctcttctgggatcagacaggcgagcgtcaactgttcgggacagaggtattaacggaagcggaagagaaagtcagaatcatcagggaaaggttgaggattgcccagtctcgacagaagagctacgcggataaccgccgaagggagctcacttttgaggcaggagattacgtgtatcttcgtgtcactccgctccggggagtacaccgttttcagacgaaaggcaagttggcaccatgcttcgtgggaccctacaaaatcttggaacgaaggggagaagttgcttatcagttagaacttccatccaatatgatcggcatccatgacgtgttccacgtgtcccaattaaagaagtgcttaagggtacttgaagaacaggctgattcggaacacattgatatccaggaggatctaacatatgtggagaagccggttcgtatacttgataccagcgaaagaagaaccagaaacaaggtcaccaggttttgccgagttcagtggagtcaccattcagaagaggaagcaacctgggaaagggaagatgagttgaaagccgcccatccgcacctcttcgccagctcctccgaatctcggggccgagattccgtataa

SEQ ID NO: 13805 - DNA, 1708 bp, Oryza sativa
  Clone ID: TFbOSC27102j.C1.o1.gm
atggcacatcagacccagatgatggcagccatgatgcagcaccagcaccagcagatgcaccagcggatgctgcagcacgccgaacagcagcatcaacagtttggtccccctccccctcagtccaagttgccagagtttctacgtgtcaggccacccaccttctccagcaccaccaaccctatggaggcgaatgactggctccatgccatagagaagaagctgaatctcctgcaatgcaatgatcaggagaaggttgctttcgccacacaccagcttcaaggtcccgcgtcagcttggtgggacaatcacatggccacccgcccaccaggcaacaggactgtgacagagtacctccacgagttcaatcgcctcgcgcgatatgcaccagagaatgtccgcaccgacgcccaaaagcaggaaaagttcatggcggagatccacgccaccaagatggacaggaaaaagaaagccgcacagttcagggcacctcagggaagtcaccaaaggccgcgcttcgctcccaggcagcagggtggacctaccaccatgatcgttggtcagcaccgcccgttcaaccctagcaactttccccagggcgccagtggcagtcagaaccaccatggaggtcagtccaaccgcggtgcagctccacgcccaccaatggcaccggcacagtcaggcccgcccgcgcaagccaagaaggagactggagcaaaaccagggtcctgcttcaactgtggtgagcttggccacttcgctgacaaatgcccgaagcctaggcgtgccgggccaaggtttatccaggctcgtgtcaaccacgcatctgcggaggaggcacaagcagcaccagaggttgtactggtcaccttgaccaacgagaagggagaaaccgtggtgtacaaatcactagtctcaccaaagcaaggggtctctttgaatcagattgaagcagaaatcccagtggacaccgtggagaagaatttgaggaaattggaagatatacccatagtctgcgaaatggcggccaacgaattagccgaggtcaagaagcaggttgatgagcagctgcagaaagggtacattcgaccaagtacttcaccttggggtgctccggtcatttttgtagagaaaaaggataagacgaagaggatgtgcgttgattatcgcgcactcaacgaggtcaccatcaagaacaaatatcctttgccgcgaatcgatgatttgtttgatcaactgaaaggagctaaagtgttttctaagatagacctgcgatcaggctaccaccagttgagaattcgggaggaggatattccgaagacggccttcaccactcggtacgggctatatgagtgcacggttatgtcgttcggacttaccaacgcacccgcattcttcatgaatctgatgaacaaagtgttaatggaatttctggacaagtttgttgtggtgttcatcgacgacattcttatctattcaacgtccgaagaagaacatgaacaacatctccgtctagtactcgagaagttaaaggagcaccagctatacgccaagttcagcaagtgtgacttctggttgacggaagtcaaatttctgggccatgtcattacagctcagggtgtggcagttgatccatcaaacgtggagtcagttaccaaatggaccccgccgaagaccgtgtcgcagattcgaagttttcttggacttgcag

SEQ ID NO: 13806 - DNA, 2625 bp, Oryza sativa
  Clone ID: TFbOSC27726j.C1.o2.gm
atggtctacaccaggaatggcacccgcacaacaggcgagggcagcaacggcgaagagcgcactgatggtgtgcaccccaacagtgattccgacaatagtccgccaccacttcccgagaatccgacgctggcccaagtgatggcacatcagactcagatgatggcagccatgatgcaacagatgcagcagcagcaccaacagatgcaccagaggatgcaacagcacgccgaacagcatcaccagcagtttggtccccctccccctcaatccaaactgccagaatttctacgtgtcaggccacccactttctccagcaccaccaaccccatggaggcaaatgactgggtccatgccatagagaagaagctgaatctcctgcagtgcaatgatcaggagaaggtcgctttcgccacacaccagctccaaggtcccgcgaaggcgcaggtgccagacggggtcgtggcacaaaagaagagggaattccgggcactccatcagagcaacaggacagagaaattcctagcaggtctggatgatgagctaaccaaccagttgatatctggagactacgccgactttgaaaggctggttgacaaggcaatccgtcaggaggatcagcgcaacaaaatggacaggaagagaaaggcggcacagtttcggtccagccaaggaaaccatcagcgaccgcgcttcactcccggacagcagggtggacctaccaccatgatcgtccgccagcaccgcccgttcaactcaagcaactttcaccagggcgccagtggtagtcagaaccaccatggaggtcagccccaccgcggtgtagctccacgcccactagtggcaccagcacagtcagctccgcccgcgcaagccaagaaggagaccagaacaaagccagggtcctgcttcaactgtggtgagcttggtcacttcgccgacaaatgcccaaagcctaggcgtgccgggccaaggttcgtccaggctcgtgtcaaccacgcgtctgcagaggaggcgcaagcagcaccagaggtcgtactggaggtcaagaagcaggttgatgagcaactgcagaaatggtgcattcgaacgagtacttcaccttggggtgctccagtcatttttgtggagaaaaaggataagacgaagaggatgtgcgtcgattatcgcgcactcaacgaggtcacaatcaagaataaatatcctttaccacggatcgatgacttgttcgatcaactgaagggagctaaggagcacgagttatacgccaagtttagcaagtgtgacttctggttgacggaagtcaaatttctgggccatgttattacagctcagggcgtagcagttgatccatctaatgtggagtcagttaccaaatggaccccaccgaagaccgtgtcgcagattcggagttttcttggacttgcgggttattaccgccgattcatcgaaaacttctccaggatcgcccgacccatgactcagttacttaagaaagatgagaagtttaaatggacagctgagtgcgataagagttttgaggagctcaaaaagaaattagtatccgcaccagttttgattctgcccgaccagatgaaagacttccaagtctattgcgacgcatcccgccacgggcttggatggaaagccaatgtggtggcagatgcattaagcaggaaaagttactgcactgccctatgcatcgagggcatgtgtgaggaattgcagcagttgtttgagcgtctcaacgtgggaattgttgaacaggggttcgtagccgctctagaaacacggcctacgctcgtcgatcaagttagagccgctcaagtaaatgatcctgaaatagcagaactgaaaaagaacatgagagtcggaaaagctcgagatttccttgaggatgagcatggcacaatctggatgggggaaagattgtgcgtacctgacgacaaagaactgaaggatatgatactcaccgaggctcatcagacacagtattccattcacccaggcagcaccaaaatgtaccaagacctcaaagaaaagctttggtgggtcagcatgagaagagaaatagttgaatttgtcgcactctgcgatgtttgccagcgagtgaaggcagagcaccaaaggccagcaggcttactccaacctcttaaaatcccggaatggaaatgggaggaaattggaatggattttataacaagactgccccggacatcatcggaggtgttagcggaggcagaagagaaagtcataaccatcagggaaaggttgagaattgcccagtctcgacagaagagctacgcggataaccgccgaagggagctcacttttgaagcaggggattacgccaattcggagcacatcgatatccaggaggatctgacctacgtggagaagccaattcgcattcttaagaccagtgaaagaagaactagaaacaaggtcaccagggtcgtcgccacaccgcaccgtcgccgccgacgggttcgcgaggccgaactccaccccgtccgcccctcctccgtcgagggcatcccgaagctcgtccgccggttgccgtcgtcctcccgtggctcgccgtcgccgttcgacgtcgtcttcctccgcgccggccaccctcggtga

SEQ ID NO: 13807 - DNA, 1097 bp, Oryza sativa
  Clone ID: TFbOSC27726j.C1.o2.np
atgcgtcagctagagaaaagctacactacaagcccagccgttgcccacgctggcttgtgggctgacgtcatcaaggggggcagcgccgacaggcggggcccgcatgtcagtggcgcaagggcggccggtccaccgtggaccggaccacgtgggtggtccaccgccggtccacgggaccgacggcccagatcgacccggggccgatcggacgggcggcggcggcctcgctcggctcggctcggcacaaggccggccgaccggccacggcaagggcggcggcgcgcgcgcgcacgcgttgccggcgacggcaaccggcggcggatgcggcggcgcaaaggcggcgcgaaagcggcggcgctaaagcggcggctaggaaggagagggaggggaatagaggggaggggatgcctcaccgagggtggccggcgcggaggaagacgacgtcgaacggcgacggcgagccacgggaggacgacggcaaccggcggacgagcttcgggatgccctaaggaaggaaaagagatagattagagggagggagatgaaccacggcggccggaatccatggccgaaggcggcggtaggggtagagctcaccggagtgcgaggggatgcgggttccggcgacggacctcgacggaggaggggcggacggggtggaggacgtggccggtaggggcgggatttcgccagccaatgtggggagtgggggaggagagagaggcgggattcgaaaatcgaatcccggccatctcgcgcgcgggcgcgggcgagagagagggggagtgggcgcgggaggtgcggcgcatgcgcgggcgtggccgacgtggcccggaggaggcggaggcgtgggcgcggcggcggttgccggcgcggcggcgcgggcgcgaggtgggagacgggtccgacaggtgggccccacctgtcagcgaccccgggtgagaggagggaggcggccggcccgcgcggcttagctgggccttggccttcggccggcccagcgggaggggaggggaggaaggagaatgggccggcggcccattcaaaagaaaagagaaaggaaaataaggaaaaggaaaaagaattttccagggatt

SEQ ID NO: 13808 - DNA, 3387 bp, Oryza sativa
  Clone ID: TFbOSC29445j.C1.o1.fg
atgatcgtccgccagcaccgcccgttcaaccctagcaacttccatcagggcactagtggcagtcagaaccaccatggaggccagcccaaccgcggtgcagctccacgcccaccaatggcaccggcacagtcaggccagcccgcacaagccaagaaggagacgggagcaaaaccagggtcctgcttcaactgtggcgagcttggccacttcgctgacaaatgcccgaagcccaggcgtgccggaccaaggtttatccaggctcgtgtcaaccacgcatctgcggaggaggcacaagcagcaccagaggtcgtactgggtacgtttcctgttaactcaatccctgcaacagtactttttgattctggtgcaacgcattctttcatctccaagaaatttgtcgggatgcatgggttaataagagaggaacttagcacaccgatgcgggttcataccccagggaatagctccacttcggttcaattcagcccttctataacaatagaaattcaaaggtcaccgtttctagccaacctcatccttctcgaatccaaagacctagatgtcattcttgggatggattggctgaccaagtttaagggagtcatcgattgtgcgaatcgcacagtcaccctgaccaatgagaaaggagaaaccgtggaaccgctccaatctataagagaccgtatagaatggcggctcaacgaattagcggaggtcaagaagcaagttgatgaacagctgcagaaagggtacatacgaccaagcacttcaccttggggcgctccggtcatttttgtggataaaaaggataagacaaagaggatgtgcgtcgattatcgcgcacttaacgaggtcacaatcaagaataaatatcctttgccgcgaatcgacgatttatttgatcaactgaaaggagctaaagtgttctataagatagacctgcgatcaggctaccaccatttgagaatccgggaagaggatattcccaagacggccttcaccactcggtacgggctatatgagtgtacggttatgtccttcggacttactaacgcacccgcattcttcatgaatctgatgaacaaagtgttcatggaatttctggacaagtttgttgtggtgttcatcgacgacatacttatctactcaaaatccgaggaagaacatgagcaacatctccgtttgccccagggtgtagcagttgatccatcgaacgtggagtcggttaccaagtggaccccaccgaagacagtgtcgcagattcgaagttttctaggactggctggttattaccgtcgtttcatcgaaaacttctcaagaatcgcccgacccatgactcagttgcttaagaaagacgagaagtttaaatggacagctgagtgcgacaagaactttgaggagctcaaaaggaaattagtatccgcaccggttttgatcctgcccgaccagacgaaagacttccaagtctattgcgatgcatcccgtcacggacttggatgtgtcctaatgcaagagggcagagtggttgcatatgcctcgcggcagttgcgtccacacgaaggaaattatccaactcatgacttggaattggcagcagtggttcatgctttgaagatctggaggcactatctgattggcaaccgctgcgaagtatatacggaccataagagtctgaaatacatcttcacccaaccagacctaaaccttcgacaacgaagatggttggaactaatcaaagactatgacatgagtattcactaccacccgggtaaagccaatgtggtggcagacgctttaagccggaaaagttactgcactgctctatgcatcgaggacatgtgtgaggaattgcgacaggagcttgaacatctcaacatgggaattgttgaacacgggttcgtagccgctctggaggcacggcctacgctcgtggatcaagttagagccgctcaagtaaatgatccggaaatagcagaactgaaaaagaacatgagagtcggaaaggctcgggatttccttgaggatgagcatggcacaatctggatgggagaaagattgtgtgtaccggacgacaaggaattgaaggatctgatactcaccgaagctcatcagacccagtactccattcatccaggcagcactaaaatgtatcaagacctcaaagagaagttttggtgggtcagcatgaggagagaaatagctgaattcgtcgcactctgcgatgtttgccagcgagtgaaagcagagcaccaaagaccagcaggtttactccaacctcttcaaatcccggaatggaaatgggaggagattggaatggactttataacgggactgccccggacatcatcgggacatgattcaatctgggtagtcgtggaccgactcaccaaggtggctcactttataccagtacataccacctatacgggaaagagattggcagaattgtatctcgcaaggatcatgtgtttgcatggggtacccaagaagatagtatccgaccgaggtagtcagttcacctcaaagttctggcagaagctgcaggaagaattggggacccgtttgaatttcagcacggcctatcacccgcaaactgatggtcagaccgagcgagtcaatcaaatcctggaagatatgttaagagcttgcgctcttgattttggtggagcttgggacaaaagcttaccatatgcggaattctcgtataacaacagctaccaggccagtctacagatggcaccgtttgaagctctatacggccggaagtgccgcacacctcttttctgggatcagacaggcgaacgtcaactgttcggaacggaagtattagcggaagcagaagagaaagtcagaatcatcagggaaaggttgagaattgctcagtctcgacagaagagctacgcggataaccgccgaagggagctcacttttgaggcaggagattacgtgtatcttcgtgtcaccccgctccggggagtacaccgctttcagacaaaaggcaagttggcaccacgcttcgtgggaccatacaaaatcttggaacgaaggggagaagttgcttatcagctagaacttccatccaatatgatcggcatccatgacgtgttccacgtgtcccaattaaagaagtgtttaagggtacccgaagaacaggctgattcggaacacattgatatccaggaggacctgacatatgtggagaagccggttcgcatacttgataccagtgaaaggagaaccagaaacaaggtcacccggttttgccgagttcagtggagtcatcattcggaagaggaagcaacctgggaaagggaagatgagttgaaagccgcccatccgcacctcttcaccagctcctccgaatctcggggccgagattccgtttaa

SEQ ID NO: 13809 - DNA, 3192 bp, Oryza sativa
  Clone ID: TFbOSC30155j.C1.o4.gm
atggtctacaccaggactggtagccgcgcaacaggcgagggcagcaacggtgaagaacgcgctgatggtgtgcaccccaacggtgattctggcaatggtccgccaccacttcccgagaatccgacgcttgcccaagttatggcacatcagactcagatgatggccgcgatgatgcagcagatgcagcagcagcaccagcagatgcatcagaggatgatgcagcacgccgaacagcagcaccagcagtttggtccccctccccctcagtccaagttgcctgagtttctacgtgtcaggccacccaccttctccagcaccaccaaccctatggaggcaaatgactggctccatgcgatagagaagaagctgaatctcctgcagtgcaatgatcaggagaaggtcgctttcgccacacaccagcttcaggagttctgccgtagctttaggaaggcacaggtgccagacggggttgtagcgcaaaagaagagggaattccgggcgctccatcagggcaacaggacagtgacagagtacctccacgagttcaatcgcctcgcgcgatatgcaccagaggatgtccgcactgacgccgagaaacaggaaaagtttatggcaggcctggatgacgagctgaccaaccaactgatatccggggactacgctgactttgaaaggctggtcgacaaggcaatccgtcaggaggatcagcgcaacaaaatggacaggaaaagaaaggcggcgcagttccgatccaaccaaggtagtcagcaccgaccgcgcttcactcccggacagcagggtggacctaccaccatgatcgtccgacagcaccgcccgttccactctagcaacttccaccagggcgctagcggcagtcagaaccaccagggaggccagcccaaccgcggtgcagctccacgcccaccaatggcaccggcacagtcagcccagcccgcgcaagccaagaaggagacgggagcaaaaccagggtcttgcttcaactgtggcgagcttggccacttcgctgacaaatgcccgaagcccaggcgtgccgggctaaggtttatccaggctcgtgtcaaccacgcgtctgcggaggaggcacaagcagcaccagaggtcgtactggtcaccctgaccaatgagaaaggagaaaccgtggtgtacaaatctctagtctcgccaaagaaaggagcctcgttgaatcagattgagacggaaatcccagtggacaccgaagagaagaacttgagaaaattggaggacatacccatagtctgcgagtatccagaggtgttccccgaagacctcaccaccatgccacccaagagggagattgaattccggattgatttggcaccaggaaccgctccaatctataagagaccgtacagaatggcggccaacgaattagcggaggtcaagaagcaagttgatgaacagctgcagaaagggtacatacgaccaagcacttcaccttggggcgctccggtcatttttgtggagaaaaaggataagacgaagaggatgtgcgtcgattatcgcgcacttaacgaggtcacaatcaagaataaatatcctttaccgcggatcgacgatttgtttgatcaactgaaaggagctaaagtgttttctaagatagacctgcgatcaggttaccaccagttgagaatccgggaagaggatattccgaagacggccttcaccactcggtacgggctatacgagtgcacggttatgtctttcggacttactaacgcacccgcattcttcatgaatctgatgaacaaagtgttcatggaatttctggacaagtttgttgtggtattcatcgacgacattcttatctattcaaagtccgaagaggaacatgaacaacatctccgtctggtactcgagaagttgaaggagcaccagctatacgccaagttcagcaagtgtgacttctggttgacggaagtcaaatttctgggtcatgtcattacagctcagggtgtagcagttgatccatcgaacgtggagtcagttacaaaatggaccccaccaaagaccgtgtcgcagattcggagttttctaggactggcaggttattaccgccgattcatcgaaaacttctccagaatcgcccgacccatgactcagttgcttaagaaagacgagaagtttaaatggacagctgagtgcgacaagagctttgaggagctcaaaaggaaattagtatccgcaccggttttgatcctgcccgaccagacgaaagacttccaagtctattgcgatgcatcccgtcacggacttggatgtgtcctaatgcaagagggcagagtggttgcatatgcctcgcggcagttgcgtccacacgaaggaaattatccaactcatgacttggaattggcagcagtggtccacgctttgaagatctggaggcactatctgatcggcaaccgctgcgaagtatatacggaccataaaagtctgaaatacatcttcacccaaccagatctaaaccttcgacaacgaagatggttggaactaatcaaagactatgacatgagtattcactaccacccgggtaaagccaatgtggtggcagacgctttaagccggaaaagttactgcactgctctatgcatcgagggcatgtgtgaggaattgcggcaggagtttgaacatctcaacgttggaattgttgaacacgggttcgtagccgctctggaggcacggcctacgctcgtggatcaagttagagccgctcaagtaaatgatccggaaatagcagaactgaaaaagaacatgagagtcggaaaagctcgggatttccacgaggatgagcatggcacaatctggatgggagaaagattgtgtgtaccggacgacaaggaattgaaggatctgatactcaccgaagctcatcagacccagtactccattcacccaggcagcaccaaaatgtaccaagaccttaaagaaaaattttggtgggtcagcatgaggagagaaatagctgaattcgtcgcactctgcgatgtttgccaacgagtgaaagcagagcaccaaagaccagcaggtttactccaacctcttcaaatcccggaatggaaatgggaggagattggaatggactttataacaggactgccccggacatcatcgggacatgattcaatctgggtagtcgtggatcgacttaccaag

SEQ ID NO: 13810 - DNA, 5392 bp, Oryza sativa
  Clone ID: TFbOSC32699j.C1.o2.np
atggccggtcacccacccaaccaccgcggtgaaggcatgatcgactttgtggcagagctggcacgcatgacactggtagtgggctaccccgacgcgccggagtacacgacgattccgccgctcagtggcgagcttcctcaccgtgtccgcttggaggtccatggttacgtggggacttgcctcgctaacatggcggtcgaggcgtcaggaggcacagcagatcacgcttgtcaggaggcagcctacctgatgatggccagactacgggagcgccacaactacattttccacggcacggcgtaccgctaccaccccagtcgagcccacggtgatggcgtcagctccttccgtccaacagctggcgagaacgacaccacctttggccacatgtgtgcggtgatgaggggtttggacaggatgcactcggatctgcacaaggcgaccaaggccttgaatgatgggaagctcatgaggatcgtcgctctgaaggacgagatagcgcgtctgaagaaggagaacgctcagctgaagggtctcccagcgccaggaggagtccggatccgcactacgccccgtaagaggacgactgcacctgtgcgcatccagcttgcgcccaggaacccacctccaccagcagcccccgcagcagctccagctccgcccgcagttcctgcagctccagctccagctcccgcgttcactctctccttcgctccagcatcagccgccagaggttcagccagtggtaccggaggttggctgtctgctactcccagtggcagcggcgagactgatccgtcagactccaggagtcgctcagagggaccggatggtctacaccaggactggtaaccgcacgacaggcgagggcagcaacggtgaagaacgcgttgatggtgtgcatcccaacggcgatcccggcaacggtccgccaccacctcccgagaatccgaccctggcccaagttatggcgcatcagactcagatgatggcagccatgatgcagcagatgcagcagcagcaccagcagatgcaccagaggatgatgcagtacgctgaacagcagcaccagcagtttggtccccctcccccgcaatccaagttgcctgagttcctgcgagtcaggccacccaccttctccagcaccaccaaccccatggaggcaaacgactggctccatgcaatagagaagaagctgaatctcctgcagtgcaatgatcaggagaaggtcgctttcgccacacaccagcttcagggtcctgcgtccgcttggtgggacaaccacatggccacccgcccaccgggtactgaagtcacatgggcagagttctgccgtagcttcaggaaggcacaggtgccagatggggtcgtggcacaaaagaagagggaatttcgtgcactccatcagggcaacaggacggtgacagagtacctccacgagttcaatcgcctcgcgcgatatgcaccggaggatgtccgcactgacgccgagaaacaagaaaagtttatggcaggcctggatgacgagctgaccaaccaactgatatccggggactacgctgactttgaaaggctggttgacaaggcaatccgtcaggaggatcagcgcaacaaaatggacaggaaaagaaaggcggcgcagttccggtccaaccaaggtagtcagcaccgaccgcgcttcactcctggacagcagggtggacctaccaccatgatcgtccgtcagcaccgcccgttccactctggcaacttccaccagggcgctagcggcagtcagaaccaccagggaggccagcccaaccgcggtgcagctccacgcccaccaatggcaccagcacagtcagcccagcccgcgcaagccaagaaggagacgggagcaaaaccagggtcctgcttcaactgtggcgagcttggccacttcgctgacaaatgcccgaagcccaggcgtgccggaccaaggtttatccaggctcgtgtcaaccacgcatctgcggaggaggcacaagcagcaccagaggtcgtactgggtacgtttcctgttaactcaatccctgcaacagtactttttgattctggtgcaacgcattctttcatctccaagaaatttgtcggggtgcatgggttaataagagaggaacttagcacaccgatgcgggttcataccccagggaatagctcctcttcggttcaattcagcccttctataacaatagaaattcaagggtcaccgtttctagccaacctcatccttctcgaatccaaagacctagatgtcattcttgggatggattggctgaccaagtttaagggagtcatcgattgtgcgaatcgcacagtcaccctgaccaatgagaaaggagaaaccgtggtgtacaaatctctagtctcgccaaagaaaggagcctcgttgaatcagattgagacggaaatcccagtggacaccgaagagaagaacttgagaaaattggaggacatacccatagtctgcgagtatccagaggtgttccccgaagacctcaccaccatgccacccaagagggagattgaattccggattgatttggcaccaggaaccgctccaatctataagagaccgtacagaatggcggccaacgaattagcagaggtcaagaagcaagttgacgaacagctgcagaaagggtacattcgaccaagcacttcaccttggggcgctccggtcatttttgtggagaaaaaggataagacaaagaggatgtgcgtcgattatcgcgcacttaacgaggtcacaatcaagaataaatatcctttgccgcgaatcgacgatttatttgatcaactgaaaggagctaaagtgttctctaagatagacctgcgatcaggctaccaccagttgagaatccgggaagaggatattccgaagacggccttcaccactcggtacgggctatatgagtgcacggttatgtccttcggacttactaacgcacccgcattcttcatgaatctgatgaacaaagtgttcatggaatttttggacaagtttgttgtggtattcatcgacgacattcttatctattcaaagtccgaagaggaacatgaacaacatctccgtctggtactcgagaagttgaaggagcaccagctatacgccaagttcagcaagtgtgacttctggttgacggaagtcaaatttctgggtcatgtcattacagctcagggtgtagcagttgatccatcgaacgtggagtcagttaccaagtggaccccaccgaagacagtgtcgcagattcgaagttttctaggactggctggttattaccgtcgtttcatcgaaaacttctcaagaatcgcccgacccatgactcagttgcttaagaaagacgagaagtttaaatggacagctgagtgcgacaagagctttgaggagctcaaaaggaaattagtatccgcaccggttttgatcctgcccgaccagacgaaagacttccaagtctattgcgatgcatcccgtcacggacttggatgcgtcctaatgcaagagggcagagtggttgcatacgcctcgcggcagttgcgtccacacgaaggaaactatccaactcatgacttggaattggcagcagtggtccatgccctgaagatctggaggcactatctgatcggcaaccgctgcgaagtatatacggaccataaaagtctgaaatacatcttcacccaaccggacctaaaccttcgacaacgaagatggttggaactaatcaaagactacgacatgagtatccactaccacccgggtaaagccaatgtggtggcagacgctttaagccggaaaagttactgcactgctctatgcatcgagggcatgtgtgaggaattgagacaggagcttgaacatctcaacatgggaattgttgaacacgggttcgtagccgctctggaggcacggcctacgctcgtggatcaagttagagccgctcaagtaaatgatccggaaatagcagaactgaaaaagaacatgagagtcggaaaggctcgggatttccttgaggatgagcatggcacaatctggatgggagaaagattgtgtgtaccggacgacaaggaattgaaggatctgatactcaccgaagctcatcagacccagtactccattcatccaggcagcactaaaatgtaccaagaccttaaagaaaaattttggtgggtcagcatgagaagggaaatagctgagttcgtcgcactctgcgatgtttgccaacgagtgaaagcagagcaccaaagaccagcaggtttactccaacctcttcaaatcccggaatggaaatgggaggagattggaatggactttataacgggactgccccggacatcatcgggacatgattcaatttgggtagtcgtggatcgactcaccaaggtggctcactttataccagtacataccacctatacgggaaagagattggcagaattgtacctcgcaaggatcatgtgtttgcatggggtacccaagaagatagtatccgaccgaggtagtcagttcacctcaaagttctggcagaagctgcaggaagaattggggacccgtttaaacttcagcacggcctatcacccgcaaactgatggtcagaccgagcgtgtcaatcaaatcttggaggatatgttgagagcttgcgctcttgattttggtggagcttgggacaaaagcttaccatatgcggaattctcgtacaacaacagctactaggccagtctacagatggcaccgtttgaagctctatacggccggaagtgccgcacaccgcttttctgggatcagacaggcgaacgtcaactgttcggaacagaagtattagcggaagcagaagagaaagtcagaatcatcagggaaaggttgaggattgctcagtctcgacagaagagctacgcggataaccgccgaagggagctcacttttgaggcaggagattacgtgtatcttcgtgtcaccccgctccggggagtacaccgctttcagacaaaaggcaagttggcaccacgcttcgtgggaccatacaaaattttggaacgaagaggagaagttgcctatcaactagaacttccgtccaacatgatcggcatccatgacgtgttccacgtatcccaattaaagaagtgtttaagggtacctgaagaacaggctgattcggaacacattgatatccaggaggacctaacatatgtggagaagccggttcgtatacttgacactagcgaaaggagaaccagaaataaggtcaccaggttttgccgtgttcagtggagccatcattcagaagaggaagcaacctgggaaagggaagatgagttgaaagccgcccatccgtacctcttcaccagctcctccgaatctcggggccgagattccgtt

SEQ ID NO: 13811 - DNA, 4707 bp, Oryza sativa
  Clone ID: TFbOSC32884j.C1.o1.fg
atgaggggattggacaggatgcactcggacctgcacaaggcgaccaaggccttgaacgatgggaagctcatgaggatcgttgctctgaaggacgagatagcgcgcctgaagaaggagaacgctcagctaaagggtcttccagcgccaggaggagtccggatccgcactacgccccgcaagactacgacggcacccgtgcgcatccagcttgcgcccaggaacccacctccagcagcaactcccgcagcacctccagttccgcccgcagttcctgcagctccagctccagctcccgagtccgctctctccttcgctccagcatcagccgccagaggtccagccagtggcaccggaggttgcttgtttgggatggtctacaccaggactggtagccgcgcaacaggcgagggcagcaacggcgaagaacgcgctaatggtgtgcaccccagcagtgattccggcaatggtccgccaccacttcctgagaatccgacgctagcccaagttatggcacatcagactcagatgatggcagccatgatgcagcagatgcagcagcagcaccagcagatgcaccagaggatgatgcagcacgccgaacagcagcaccagcagtttggtccccctccccctcagtccaagttgcctgagttcctacgtgtcaggccacccaccttctccagcaccaccaaccctatggaggcaaatgactggctccatgcgatagagaagaagctgaacctcctgcagtgcaatgatcaggagaaggtcgctttcgccacacaccagcttcagggtcctgcgtcagcctggtgggacaatcacatggccacccgcccaccgggtactgaagtcacttgggtagagttctgccgtagcttcaggaaggcacaggtgccagatggggtcatggcacaaaagaagagggaatttcgtgcactccatcagggcaacaggactgtgacagagtacctccacgagttcaatcgcctcgcgcgatatgcaacagagaatgtccgcaccgacgccgagaagcaggaaaagttcatggcgggtttggatgatgagctgaccaaccaactgatatccggggactacgctgactttgagtggctggttgacaaggcaatccgccaggaggatcaacgcaacaagatggacaggaagaggaaggccgctcagttcagggcacctcagggaagtcaccagaggccgcgcttcactcccggacagcagggtggacctaccaccatgatcgtccgtcagcaccgcccgttcaactccagcaacttccaccagggctctagtggcagtcagaaccaccatggaggtcagcccaaccgcggtgcagctccacgcccacccatggcaccggcacagtcaggcccgcccgcgcaagccaagaaggagacgggagcaaaaccagggtcctgcttcaactgtggtgagcttggccacttcgctgacaaatgcccgaagcccaggcgtgccgggccaaggtttatccaggctcgtgtcaaccacgcgtctgcagaggaggcacaaacagcaccggaggtcgtactaggtacgttccctgttaactcaatccctgcaacagtactttttgattctggtgcaacgcattctttcatttcaaagaaatttgtggggatgtatgggttaaggaaagaagagcttagcacaccaatgagggttcataccccggggaatagttcaacctcagtcagttttagcccttcagtgctaatagaaattcaaagattaccatttctagccaacctcattcttcttgaatccaaatacctagatgtcattcttgggatggattggctgactaagttcaagggagtcatcgattgtgcgaatcgcacagtcaccttgaccaacgagaagggagaaacggtagtgtacaaatcactagccccgccaaagcaaggggtctccttgaaccagatcgagatggaagtcccagtggtcaccgaggagaagaatttgaagaaattggaagacatacccatagtctccgagtatccagaagtgttccctgaagacctcactaccataccacccaagagggagattgaattccggattgacttggcaccgggaaccgctcccatttacaagagaccgtacagaatggcggccaacgaattagccgaggtcaagaagcaggttgatgagcagctgcagaaagggtacatccgaccaagtacttcaccttggggtgctccggtcatttttgtggagaaaaaggataagacgaagagaatgtgcgttgattatcgcgcactcaacgagttgagaatccgggaagaggatattccgaagacggccttcaccactcggtacgggctatatgagtgcacggttatgtctttcggacttaccaacgcacccgcattcttcatgaatctgatgaacaaagtgttcatggaatttctggacaagtttgttgtggtgttcatcgacgacattcttatctattcaaagtccgaggaggaacatgaacaacatctccgtctagtactcgagaagttgaaggagcaccagctatacgccaagttcaacaagtgtgacttctggttgacggaagtaaaatttctgggtcatgtcattacagctcagggtgtggcagtcgacccatcgaacgtggagtcagttaccaaatggaccccacctaagaccgtgtcgcagattcggagttttcttggacttgcgggttattaccgccgattcatcgaaaatttctccagaatcgcccgacccatgactcagttgcttaagaaagatgagaagtttaaatggacagctgagtgcgataagagtttcgaggagctcaagaagaaattagtatccgcaccagttttgattctgcccgacccgacgaaagacttccaagtctattgtgatgcatcccgtcacggacttggatgtgtcctaatgcaagagggcagagtggttgcgtatgcctcgcggcagttgcgtccacacgaaggaaattatccaacgcatgacttggaattggcagcagtggttcatgctttgaagatctggaggcactatctgattggcaaccgctgcgaaatatatacggaccataagagtctgaaatacatcttcacccaaccggacctaaatctccggcaacgaagatggttggaactaatcaaagactatgacatgagtattcactaccacccgggtaaagccaatgtggtggcagacgctttaagccggaaaagttactgcactgccctatgcatcgagggcatgtgtgaggaattgcggcaggagtttgggcatctcaacgtgggaattgttgaacacaggttcgtagccgctctggaggcacggcctacgctcgtggatcaagttagagccgctcaagtaaatgatccggaaatagcagagctgaaaaagaacatgagagtcggaaaggctcgggatttccttgaggatgagcatggcacgatctggatggtagaaagattgtgtgtacctgacgacaaggaattgaaggatctgatactcaccgaggctcatcagacccagtactccattcacccaggcagcactaaaatgtatcaagacctcaaagaaaagttttggtgggtcagcatgaggagagaaatagctgaattcgtcgcactctgcgatgtttgccaacgagtgaaggcagagcaccaaagaccagcaggtggctcactttataccagtgcataccacctatacggaaagagattggcagaattgtacctcgcaaggatcatgtgtttgcatggggtacccaagaagatagtatccgaccgaggtagtcagttcacctcaaaattttggcagaagctacaggaagaattggggacccgtttaaatttcagcacggcctatcacccgcaaactgatggtcagaccgagcgagtcaatttaatcttggaagatatgttgagagcttgcgctcttgattttggtggagcttgggacaaaagcttgccatatgcggaattctcgtacaacaacagctaccaggccagtctacagatggcaccgtttgaagctttatacggtcggaagctttatacagccatatgcgctttattctgggatcagacaggcgaacgtcaactgttcggaacagaggtattagcggaagtagaagagaaagtcagaatcatcagggaaaggttgagaattgctcagtctcgacagaagagctacgcggataaccgtcgaagggagctcacttttgaggaaggagattacgtgtatcttcgtgtcactccgctccggggagtacaccatttccagacaaaaggcaagttggcaccacgcttcgtgggaccatacaaaattttggaacgaaggggagaagttgcttatcagctagaacttccatcaaacatgatcggcatccatgacgtgttccatgtgtcccaattaaagaagtgcttaagggtacctgaagaacaggttgattcggagcacattgatatccaagaggacctaacctatgtggagaagccggttcgtatacttgataccagcgaaagaagaaccagaaataaggtcaccaggttttgccgagttcagtggaatcatcattcagaagaggaagcaacctgggaaagggaagatgagttgaaagccgcccatccgcacctcttcaccagctcctccgaatctcggggccgagattccgtttaa

SEQ ID NO: 13812 - DNA, 5160 bp, Oryza sativa
  Clone ID: TFbOSC34305j.C1.o1.fg
atggcggtcgaggcatctggaggcacagcagatcacgcctgtcaggaggcagcctacttgatgatggccagactacgggagcgccacaactacatcttccacgacacggcgtaccgctaccaccccagtcgagccaacggtgatggcgtcagctccttccgtccgacagctggcgagaacgacaccaccttcggtcacatgtgtgctgtgatgaggggattggacaggatgcactcggacctgcacaaggcgaccaaggccttgaacgatgggaagctcatgaggatcgtcgctttgaaggacgagatagcgcgcctgaagaaggagaacgctcagctaaagggtcttccagcgccaggaggagtccggatccgcaccacgccccgcaagacgacgacggcacccgtgcgcatccagcttgcacccagaaacccacctccagcagcagctcccgcagcacctccagttccgcccgcagttcctgcagctccagctccagctccagctccagctcccgcgtccgctctctccttcgctccagcgtcagccgccagaggtccagccagtggcaccgggggttggttgtctgctactcccagtggcagccgcgatctcagcagcagcagctccagtggctcgcagtcaggcagcggcgagacgtatctgccaggctccaggagtcgctcagagggacctggttgtttgtttgggtcagacgacggtcgatatcatgtgcctatgatggtctacaccaggactggcaaccgcacgacaggcgagggcagcaacggcgaagaacgcgttgatggcgtgcaccccaacagtgattccggcaatggtccgccaccacttcccgagaatccgacccttgcccaagttatggcgcatcagactcagatgatggcagccatgatgcagcagatgcagcaacaacaccagcaaatgcaccagaggatgatgcagcacgtcgaacagcagcaccagcactttggtccccctccccctcaatccaaattgcctgagttcctaggagtcaggccacccaccttctccagcaccaccaaccctatggaggcaaatgactggctccatgcaatagagaagaagctgaatctcctgcagtgcaatgatcaggagaaggtcgctttcgccacacaccagcttcagggtcctgcgtcagcttggtgggacaaccacatggccacccgcccaccgggtactgaagtcacatgggcagagttctgccgtagcttcaggaaggcacaagtgccagatggggtcgtggcacaaaagaagagggaatttcgtgcactccatcagggtaacaggacggtgacagagtacctccacgagttcaatcgcctcacgcgatatgcaccagaggatgtccgcaccgacgccgagaagcaggagaagttcatggcgggcctggatgatgagctgaccaaccagctgatatccgggtactacgctgactttgagaggctggttgacaaggcaatccgtcaggaggaccaacgcaacaagatggacaggaagaggaaggccgctcagttcagggcacatcagggaagtcaccagaggccgcgcttcactcccggacagcagggtggacctaccaccatgatcgtccgtcagcaccgcccgttcaaccctagcaacttctaccagggcaccagtgacagtcagaaccaccatggaggtcagcccaaccgcggtgcagctccacgcccaccagtggcatcggcacagtcaggccagcccgcgcaagccaagaaggagacggaagcaaaaccagggtcttgcttcaactgtggcgagcttggccacttcgctgacaaatgcccgaagcctaggcgtgccgggccaaggtttatccaggctcgtgtcaaccacgcatctgcggaggaggcacaagcagcaccagaggttgtactgggtacgtttcctgttaactcaatccctgcaacagtactttttgattctggtgcaacgcattctttcatctcaaagaaatttgtcgggatgcatgggttaataagagaggaacttagcacaccgatgcgggttcataccccagggaatagctccacttcggttcaattcagcccttctataacaatagaaattcaaaggtcaccggttctagccaacctcatccttctcgaatccaaagacctagatgtcattcttgggatggattggctgaccaagtttaagggagtcatcgattgtgcgaatcgcacagtcaccctgaccaacgagaagggagaaaccgtggtgtacaaatctctagtctcgccaaagaaaggagtctcgttgaatcagattgagacggaaatcccagtggacaccgtagagaagaacttgagaaaattggatgatatacccatagtctgcgagtatccagaggtgttccccgaagacctcactaccatgccacccaagagagagattgaattccggattgatttggcaccgggaaccgctccaatctataagagaccgtacagaatggcggccaacgaattaacggaggtcaagaagcaagttgatgaacagctgcagaaagggtacatacgaccaagcacttcaccttggggcgctccggtcatttttgtggagaaaaaggataagacgaagaggatgtgcgtcgattatcgcgcacttaacgaggtcacaatcaagaataaatatcctttgccgcgaatcgacgatttatttgatcaactgaaaggggctaaagtgttttctaagatagacctgcgctcaggctaccaccagttgagaatccgggaagaggatatcccgaagacggccttcaccactcggtacgggttatatgagtgcacggttatgtccttcggacttactaacgcgcctgcattcttcatgaatctgatgaacaaagtgttcatagaatttctggacaagtttgttgtggtattcatcgacgacatacttatctactcaaaatccgaagaagaacatgaacaacatctccgtctggtactcgagaagttgaaggagcaccagctatacgccaagttcagcaagtgtgatttctggttgacggaagtcaaatttctgggtcatgtcattacagctcagggtgtggcagtcgacccatcgaacgtggagtcagttaccaagtggaccccaccgaagactgtgtcgcagattcgaagttttctaggactggcaggttattaccgtcgattcatcggaaacttctccagaatcgcccgacccatgactcagttgcttaagaaagatgagaaatttaaatggacagcggagtgcgataagagctttgaggagctcaagaagaaattagtatccgcaccagttttgattctgcccgaccagatgaaagacttccaagtttattgcgatgcatcccgtcacggacttggatgtgtcctaatgcaagagggcagagtggttgcatatgcctcgcggcagttgcgtccacacgaaggaaattatccaactcatgacttggagttggcagcggtggttcatgctttgaagatctggaggcactatctgatcggcaaccgctgcgaagtatatacggaccataaaagtctgaaatacatcttcacccaaccggacctaaactttcgacaacgaagatggttggagctaatcaaagactatgacatgagtattcactaccacccgggtaaggccaatgtggtggcagacgctttaagccggaaaagttactgcactgctctatgcatcgagagcatgtgtgaggaattgcggcaggagtttgaacatctcaacataggaattgttgaacacgggttcgtagccgctctggaggcacggcctacgctcgtggatcaagtcagagccgctcaagtaaatgatccggaaatagcagaactgaaaaagaacatgagagtcggaaaggctcgggatttccttaaggatgagcatggcacaatctggatgggagaaagattgtgtgtacctgacgacaaggaattgaaggatctgatactcaccgaggctcatcagacccagtactccattcacccaggcagcaccaaaatgtatcaagacctcaaagaaaagttttggtgggtcagcatgaggagagaaatagctgaattcgtcgcactctgcgatgtttgccaacgagtgaaggcagagcaccaaagacccacagtacataccacatatacgggcaaaaggttggcggagctttacctttcgagaatcatgtgcctacatggagtactcaaaaagattgtatctgaccgagggagtcagttcacctcaaaattctggcagaagctgcaggaagaattggggacccgtttaaatttcagcacggcctatcacccgcaaactgatggccagaccgagcgggtcaatcaaatcttggaagatatgttgagagcttgcgctcttgattttggtggagcttgggacaaaagcttgccatatgcggaattctcgtacaacaacagctaccaggccagtctacagatggcaccgtttgaagctttatacggccggaagtgccgcacacctctcttctgggatcagacaggcgaacgtcaactattcggaacagaagtattagcggaagcagaagagaaagtcagaatcatcagggaaaggttgaggattgctcagtctcgacagaagagctacgcggataaccgtcgaagggagctcacttttgaggcaggagatcacgtgtaccttcgcgtcactccgctccggggagtacaccgttttcagacgaaaggcaagttggcaccacgcttcgtgggaccatacaaaatcttggaacgaaggggagaagtggcttatcagctagaacttccatccaacatgatcggcatccatgacgtgttccacgtgtcccaactaaagaagtgcttaagggtacctgaagaacaggctgattcggaacacattgatatccaggaagacctaacttatgttgagaagccggttcgtatactggataccagcgaaaggagaaccagaaacaaggtcacccggttttgccgagttcagtggagtcatcattcggaagaggaagcaacctgggaaagggaagatgagttgaaagccgcccatccgcacctcttcaccagctcctccgaatctcggggccgagattccgtttaa

SEQ ID NO: 13813 - DNA, 3340 bp, Oryza sativa
  Clone ID: TFbOSC34569j.C1.o1.gm
atggtctacaccaggactggcaaccgcacgacaggcgagggcagcaacggtgaagaacgcgctgatggtgtgcaccccaacagtgattccggcaatggtccgccaccacttcccgagaatccgacccttgcccaagttatggcacatcaaactcagatgatggcagccatgatgcagcagatgcagcagcagcaccagcagatgcaccagaggatgatgcagcacgccgaacagcagcaccagcagtttggtccccctccccctcagtccaagttgccagaatttctacgcgtcaggccacccaccttctccagcaccaccaaccccatggaggcgaatgactggctccatgcaatagagaagaagctgaacctcctgcagtgtaatgatcaggagaaggtcgcttttgccacacaccagcttcagggtcctgcgtcagcttggtgggacaaccacatggccacccgcccaccgggtactgaagtcacatgggcagagttctgccgtagcttcaggaaggcacaggtgccagacggggtcgtggcacaaaagaagagggaattccgggagctccatcagggcaacaggactgtgacagagtacctccatgagttcaatcgcctcgcgcgatatgcaccagaggatgtccgcaccgacgccgagaagcaggagaagttcatggcgggtctggatgacgagctgaccaaccaactgatatctggggactacgccgactttgagaggctggttgacaaggcaatccgccaggaggatcaacgcaacaagatggataggaagaggaaggccgctcagttcagggcacatcagggaagtcaccagaggctgcgcttcactcccgggcagcagggtggacctaccaccatgatcgtccgtcagcaccgcccgttcaaccccagcaacttccaccagggctccagtggcagccagaatcaccatggaagtcagcccaaccgcggtacagctccacgcccaccgatggcaccggcacagtcaggcccgcccgcacaagccaagaaggagacgggagcaaagccagggtcctgcttcaactgtggcgagcttggccacttcgctgacaaatgcccgaagcccaggcgtgccgggccaaggtttatccaggctcgtgtcaaccacgcatctgcggaggaggcacaagcagcaccagaggttgtactggtcaccctgaccaatgagaaaggagaaaccgtggtgtacaaatctctagtctcgccaaagaaaggagcctcgttgaatcagattgagacggaaatcccagtggacatcgaagagaagaacttgagaaaattggaggacatacccatagtctgcgagtatccagaggtgttccccgaagacctcaccaccatgccacccaagagggagattgaattccggattgatttggcaccaggaaccgctccaatctataagagaccgtacagaatggcggccaacgaattagcggaggtcaagaagcaagttgatgagcagctgcagaaagggtacatacgaccaagcacttcaccttggggcgctccggtcatttttgtggagaaaaaggataagacgaagaggatgtgcgtcgattatcgcgcacttaacgaggtcacaatcaagaataaatatcccttaccgcgaatcgacgatttatttgatcaactgaaaggagctaaagtgttctctaagatagacctgcgatcaggctaccaccagttgagaacccgggaagaggatattccgaagacggccttcaccactcggtacgggctatatgagtgcacggttatgtctttcggacttaccaacgcacccgcattcttcatgaatctgatgaacaaagtgttcatggaatttctggacaagtttgttgtggtattcatcgacgacattcttatctattcaaagtccgaggaagaacatgaacaacatctccgtctggtactcgagaagttgaaggagcaccagctatacgccaagttcagcaagtgtgacttctggttgacggaagtaaaatttctgggtcatgtcattacagctcagggtgtggcagtcgacccatcgaacgtggagtcagttaccaaatggaccccacctaagaccgtgtcgcagattcgaagttttctaggactggctggttattaccgtcgtttcatcgaaaacttctcaagaatcgcccgacccatgactcagttgcttaagaaagacgagaagtttaaatggacagctgagtgcgacaagagctttgaggagctcaaaaggaaattagtatccgcaccggtgttgatcctgcccgaccagacgaaagacttccaagtctattgcgatgcctcccgtcacggacttggatgtgtcctaatgcaagagggcagagtggttgcatatgcctcgcggcagttgcgtccacacgaaggaaattatccaactcatgacttggaattggcagcagtggttcatgctttgaagatctggaggcactatctgattggcaaccgctgcgaagtatatacggaccataagagtctgaagtacatcttcacccaaccggacctaaatctccgacaacgaagatggttggaactaatcaaagactacgacatgagtattcactaccacccgggtaaagccaatgtggtggcagacgctttaagccggaaaagttactgcactgccctatgcatcgagggcatgtgtgaggaattgcggcaggagtttgagcatctcaacgtgggaattgttgaacacgggttcgtagccgctctggaggcacggcctacgctcgtggatcaagttagagccgctcaagtaaatgatccggaaatagcagaactgaaaaagaacatgagagtcggaaaggctcgggatttccttgaggatgagcatggcacaatctggatgggagaaagattgtgtgtaccggacgacaaggaattgaaggatctgatactcaccgaagctcatcagacccagtactccattcatccaggcagcactaaaatgtatcaagacctcaaagagaagttttggtgggtcagcatgaggagagaaatagctgaattcgtcgcactctgcgatgtttgccaacgagtgaaagcagagcaccaaagaccagcaggtttactccaacctcttcaaatcccggaatggaaatgggaggagattggaatggactttataacaggactgccccggacatcatcgggtgggggccccaccctgtcggaccccgggttccctccttcccgccgttccccgctcgcggcctcccacccggcgctgccggacgccgtcgccggaggcctccgttttcttccggggcacg

SEQ ID NO: 13814 - DNA, 5358 bp, Oryza sativa
  Clone ID: TFbOSC400177j.C1.o45.fg
atggccggtcacccacccaaccaccgcggagaaggcatgattgatttcgtggcagagttggcacgcatgaccctggtggtgggctaccccgacgcgccggagtacacgacgattccgccgctcagtggcgagcttcctcaccgtgtccgcttggaggtccatggttacgtggggacttgcctcgctaacatggcggtcgaggcatctggaggcacagcagatcacgcctgtcaggaggcagcctacttgatgatggccagactacgggagcgccacgactacatcttccacgacacggcgtaccgctaccacccccgtcgagcccatggtgatggcgtcagctccttccgtccgacagctggcgagaacgacaccaccttcggtcacatgtgtgctgtgatgaggggattggaccggatgcactcggacctgcacaaggcgaccaaggccttgaatgatgggaagctcatgaggatcgtcgctctgaaggacgagatagcgcgcctgaagaaggagaatgctcagttgaagggtcttccagcaccaggaggagtccggatccgcactacgccccgtaagaggacgactgcacccgtgcgcatccagcttgcgcccaggaacccacctccaccagcagctcccgcagcacctccagttccgcccgcagctccggcagttcccgcagttcctccagctccagctccagctccagctcccgcgttcactctctccttcgctccagcatcagccgccagaggtccagccagtggtaccggaggttgcttgtttgggatggtttacaccaggactggcaaccgcacgacaggcgagggcagcaacggcgaagaacgcgtggatggtgtgcaccccaacagtgattctggcaatggtccgccaccacttcccgagaatccgacccttgcccaagttatggcacatcagactcagatgatggcagccatgatgcagcagatgcagcagcagcaccagcagatgcaccagaggatgatgcagcacgccgaacagcagcaccagcagtttggtccccctccccctcagtccaagttgccggagtttctacgtgtcaggccacccaccttctccagcaccaccaaccctatggaggcaaatgactggctccatgcgatagagaagaagctgaatctcctgcagtgcaatgatcaggagaaggtcgctttcgccacacaccagcttcagggtcccgcgtcagcttggtgggacaaccacatggccacccgcccaccgggtactgaagtcacgtgggcagagttctgccgtagcttcaggaaggcacaggtgccagacggggtcgtggcacaaaagaagagggaattccgggcgctccatcagggcaacaggactgtgacagagtacctccatgagttcaatcgcctcgcgcgatatgcaccagaggatgtccgcaccgacgccgagaagcaggagaagttcatggcgggtctggatgacgagctgaccaaccaactgatatctggggactacgccgactttgagaggctggttgacaaggcaatccgccaggagaatcaacgcaacaagatggacaggaagaggaaggccgctcagttcagggcaccccaggaaagtcaccagaggtcgcgcttcactcccgggcaacagggtggacctaccaccatgattgttcgtcaacaccgcccgttcaaccccagcaacttccaccagggctccagtggcagccagaatcaccatggaagtcagcccaaccgcggtacagctccacgcccaccgatggcaccggcacagtcaggccagcccgcacaagccaagaaggagacgggagcaaaaccagggtcctgcttcaactgtggcgagcttggccacttcgctgacaaatgcccgaagcccaggcgtgccggaccaaggtttatccaggctcgtgtcaaccacgcatctgcggaggaggcacaagcagcaccagaggtcgtactgggtacgtttcctgttaactcaatccctgcaacagtactttttgattctggtgcaacgcattctttcatctccaagaaatttgtcgggatgcatgggttaataagagaggaacttagcacaccaatgcgggttcataccccagggaatagctccacttcggttcaattcagcccttctataacaatagaaattcaaaggtcaccgtttctagccaacctcattcttctcgaatccaaagacctagatgtcattcttgggatggattggctgaccaagtttaagggggtcattgattgtgcgaatcgcacagtcaccctgaccaatgagaaaggagaaaccgtggtgtacaaatctctagtctcgccaaagaaaggagcctcgttgaatcagattgagacggaaatcccagtggacgccgaagagaagaacttgagaaaattggaggacatacccatagtctgcgagtatccagaggtgttccccgaagacctcaccaccatgccacccaagagggagattgaattccggattgatttggcaccaggaaccgctccaatctataagagaccgtacagaatggcggccaacgaattagcggaggtcaagaagcaagttgatgaacagctgcagaaagggtacatacgaccaagcacttcaccttggggcgctccggtcatttttgtggagaaaaaggataagacaaagaggatgtgcgtcgattatcgcgcacttaacgaggtcacaatcaagaataaatatcctttgccgcgaatcgacgatttatttgatcaactgaaaggagctaaagtgttctctaagatagacctgcgatcaggctaccaccagttgagaatccgggaagaggatattccgaagacggccttcaccactcggtacgggctatatgagtgcacggttatgtccttcggacttactaacgcacccgcattcttcatgaatctgatgaacaaagtgttcatggaatttctggacaagtttgttgtggtattcatcgacgacattcttatctattcaaagtccgaggaagaacatgaacaacatctccgtctagtactcgagaagttgaaggagcaccagctatacgccaagttcagcaagtgtgacttctggttgacggaagtcaaatttctgggccatgtcattacagctcagggtgtagcagttgatccatcgaacgtggagtcagttaccaagtggaccccaccgaagacagtgtcgcagattcgaagttttctaggactggctggttattaccgtcgtttcatcgaaaacttctcaagaatcgcccgacccatgactcagttgcttaagaaagacgagaagtttaaatggacagctgagtgcgacaagagctttgaggagctcaaaaggaaattagtatccgcaccggttttgatcctgcccgaccagacgaaagacttccaagtctattgcgatgcatcccgtcacggacttggatgtgtcctaatgcaagagggcagagtggttgcatatgcctcgcggcagttgcgtccacacgaaggaaattatccaactcatgacttggaattggcagcagtggtccatgctttgaagatctggaggcactatctgatcggcaaccgctgcgaagtatatacggaccataaaagtctgaaatacatcttcacccaaccagacctaaaccttcgacaacgaagatggttggaactaatcaaagactatgacatgagtattcactaccacccgggtaaagccaatgtggtggcagacgctttaagccggaaaagttactgcactgctctatgcatcgagggcatgtgtgaggaattgcgacaggagcttgaacatctcaacatgggaattgttgaacacgggttcgtagccgctctggaggcacggcctacgctcgtggatcaagttagagccgctcaagtaaatgatccggaaatagcagaactgaaaaagaacatgagagtcggaaaggctcgggatttccttgaggatgagcatggcacaatctggatgggagaaagattgtgtgtaccggacgacaaggaattgaaggatctgatactcaccgaagctcatcagacccagtactccattcatccaggcagcactaaaatgtatcaagacctcaaggaaaaattttggtgggtcagcatgaggagagaaatagctgaattcgtcgcactctgcgatgtttgccaacgagtgaaagcagagcaccaaagaccagcaggtttactccaacctcttcaaatcccggaatggaaatgggaggagattggaatggactttataacaggactgccccggacatcatcgggtcacgattcaatctgggtagtcgtggatcgactcactaaggtggctcactttataccagtacataccacctatacgggaaagagattggcagaattgtacctcgcaaggatcatgtgtttgcatggggtacccaagaagatagtatccgaccgaggtagtcagttcacctcaaagttctggcagaagctgcaggaagaattggggacccgtttaaacttcagcacggcctatcacccgcaaactgatggtcagaccgagcgtgtcaatcaaatcttggaggatatgttgagagcttgcgctcttgattttggtggagcctgggacaaaagcttaccatatgcggaattctcgtataacaacagctaccaggccagtttacagatggcaccgtttgaagctctatacggccggaagtgccgcacacctcttttctgggatcagacaggcgaacgtcaactgttcggaacagaagtattagcgggagcagaagagaaagtcagaatcatcagggagagattgaggattgctcagtctcgacagaagagctacgcggataaccgtcgaagggagctaacttttgaggccggagactacgtgtatcttcgtgtcactccgctccggggagtacaccgtttccagacgaaaggcaagttggcaccacgcttcgtgggaccatacagaatcttggaacgaaggggagaagttgcttatcagctagaacttccatccaatatgatcggcatccatgacgtgttccacgtgtcccaattaaagaagtgtttaagggtacctgaagaacaggctgattcggaacacatcgatatccaggaggacctgacatatgtggagaagccggttcgcatacttgataccagtgaaaggagaaccagaaacaaggtcacccggttttgccgagttcagtggagtcatcattcggaagaagaagcgacctgggaaagggaagatgagttgaaagccgcccatccgtacctcttcaccagctcctccgaatctcggggccgagattccgtttaa

SEQ ID NO: 13815 - DNA, 4566 bp, Oryza sativa
  Clone ID: TFbOSC400177j.C1.o63.fg
atggtctacaccaggactggcaaccgcacgacaggcgagggcagcaacggtgaagaacgcgctgatggtgtgcaccccaacagtgattctggcaatggtccgccaccacttcccgagaatccgacccttgcccaagttatggcacatcagactcagatgatggcagccatgatgcagcagatgcagcagcagcaccagcagatgcaccaaaggatgatgcagcacgccgaacagcagcaccagcagtttgatccccctccccctcagtccaagttgccggagtttctacgggtcaggccacccaccttctccagcaccaccaaccctatggaggcgaacgactggctccatgcgatagagaagaagctgaatctcctgcagtgcaatgatcaggagaaggtcgctttcgccacacaccagcttcagggtcctgcgtcagcttggtgggacaaccacatggccacccgcccaccgggtactgaagttacatgggcagagttctgccgtagcttcaggaaggcacaggtgcccgacggggtcgtggcacaaaagaagagggaattccgggcgctccatcagggcaacaggactgtgacagagtacctccatgagttcaatcgcctcgcgcgatatgcaccagaggatgtccgcaccgacgctgagaagcaggagaagttcatggcgggtttggatgacgagttgaccaaccaactgatatccggggactacgctgactttgaaaggttggttgacaaggcaatccgtcaggaggatcagcgcaacaaaatggacaggaaaagaaaggcggcgcagttccggtccaaccaaggtagtcagcaccgaccgcgcctcactcccggacagcagggtggacctaccaccatgatcgtccgtcagcaccgcccgttcaactccagcaacttccaccagggcactagtggcagtcagaaccaccatggaagtcagcccaaccgcggtacagctccacgcccaccgatggcaccggcacagtcaggccagcccgcacaagccaagaaggagacgggagcaaaaccagggtcctgcttcaactgtggcgagcttggccacttcgctgacaaatgcccgaagcccaggcgtgccggaccaaggtttatccaggctcgtgtcaaccacgcatctgcggaggaggcacaagcagcaccagaggtcgtactgggtacgtttcctgttaactcaatccctgcaacagtactttttgattctggtgcaacgcattctttcatctccaagaaatttgtcgggatgcatgggttaataagagaggaacttagcacaccgatgcgggttcataccccagggaatagctccacttcggttcaattcagcccttctataacaatagaaattcaaaggtcaccgtttctagccaacctcattcttctcgaatccaaagacctagatgtcattcttgggatggattggctgaccaagtttaagggggtcattgattgtgcgaatcgcacagtcaccctgaccaatgagaaaggagaaaccgtggtgtacaaatctctagtctcgccaaagaaaggagcctcgttgaatcagattgagacggaaatcccagtggacgccgaagagaagaacttgagaaaattggaggacatacccatagtctgcgagtatccagaggtgttccccgaagacctcaccaccatgccacccaagagggagattgaattccggattgatttggcaccaggaaccgctccaatctataagagaccgtacagaatggcggccaacgaattagcggaggtcaagaagcaagttgatgaacagctgcagaaagggtacatacgaccaagcacttcaccttggggcgctccggtcatttttgtggagaaaaaggataagacaaagaggatgtgcgtcgattatcgcgcacttaacgaggtcacaatcaagaataaatatcctttgccgcgaatcgacgatttatttgatcaactgaaaggagctaaagtgttctctaagatagacctgcgatcaggctaccaccagttgagaatccgggaagaggatattccgaagacggccttcaccactcggtacgggctatatgagtgcacggttatgtccttcggacttactaacacacccgcattcttcatgaatctgatgaacaaagtgttcatggaatttctggacaagtttgttgtggtattcatcgacgacattcttatctattcaaagtccgaggaagaacatgaacaacatctccgtctagtactcgagaagttgaaggagcaccagctatacgccaagttcagcaagtgtgacttctggttgatggaagttaaatttctgggccatgtcattacagctcagggtgtagcagttgatccatcgaatgtggagtcagttaccaagtggaccccaccgaagacagtgtcgcagattcgaagttttctaggactggctggttattaccgtcgtttcatcgaaaacttctcaagaatcgcccgacccatgactcagttgcttaagaaagacgagaagtttaaatggacagctgggtgcgacaagagctttgaggagctcaaaaggaaattagtatccgcaccggttttgatcctgcccgaccagacgaaagacttccaagtctattgcgatgcatcccgtcacggacttggatgtgtcctaatgcaagagggcagagtggttgcatatgcctcgcggcagttgcgtccacacgaaggaaattatccaactcatgacttggaattggcagcagtggtccatgctttgaagatctggaggcactatctgatcggcaaccgctgcgaagtatatacggaccataaaagtctgaaatacatcttcacccaaccagacctaaaccttcgacaacgaagatggttggaactaatcaaagactatgacatgagtattcactaccacccgggtaaagccaatgtggtggcagacgctttaagccggaaaagttactgcactgctctatgcatcgagggcatgtgtaaggaattgcgacaggagcttgaacatctcaacatgggaattgttgaacacgggttcgtagccgctctggaggcacggcctacgctcgtggatcaagttagagccgctcaagtaaatgatccggaaatagcagaactgaaaaagaacatgagagtcggaaaggctcgggatttccttgaggatgagcatggcacaatctggatgggagaaagattgtgtgtaccggacgacaaggaattgaaggatctgatacttaccgaagctcatcagacccagtactccattcatccaggcagcactaaaatgtatcaagacctcaaagagaaattttggtgggtcagcatgaggagagaaatagctgaattcgtcgcactctgcgatgtttgccaacgagtgaaagcagagcaccaaagaccagcaggtttactccaacctctccaaatcccggaatggaaatgggaggagattggaatggactttataacaggactgccccggacatcatcgggacatgattcaatctgggtagtcgtggatcgactcaccaaggtggctcacttgataccagtacataccacctatacgggaaagagattggcagaattgtacctcgcaaggatcatgtgtttgcatggggtacccaagaagatagtatccgaccgaggtagtcagttcacctcaaagttctggcagaagctgcaggaagaattggggacccgtttaaacttcagcacggcctatcacccgcaaactgatggtcagaccgagcgtgtcaatcaaatcttggaggatatgttgagagcttgcgctcttgattttggtggagcctgggacaaaagcttaccatatgcggaattctcgtacaacaacagctaccaggccagtctacagatggcaccgtttgaagctctatacggccggaagtgccgcacacctcttttctgggatcagacaggcgaacgtcaactgttcggaacagaagtattagcggaagcagaagagaaagtcagaatcatcagggagagattgaggattgctcagtctcgacagaagagctacgcggataaccgtcgaagggagctaacttttgaggccggagactacgtgtatcttcgtgtcactccgctccggggagtacaccgtttccagacgaaaggcaagttggcaccacgcttcgtgggaccatacaaaatcttggaacgaaggggagaagttgcttatcagctagaacttccatccaatatgatcggcatccatgacgtgttccacgtttcccagttaaagaagtgcttaagggtacctgaagagcaggctgattcggaacacatcgatatccaggaggacctgacttatgtggagaagccggttcgcatacttggtaccagtgaaaggagaaccagaaacaaggtcacccggttttgccgagttcagtggagtcatcattcggaagaggaagcgacctgggaaagggaagatgagttgaaagccgcccatccgtacctattcaccagctcctccgaatctcggggccgagattccgcttaa

SEQ ID NO: 13816 - DNA, 3417 bp, Oryza sativa
  Clone ID: TFbOSC400432j.C1.o20.fg
atggaggcgaatgactggctccatgacatagagaagaaactgaatctcctgcagtgcaatgatcaggagaaggttgctttcgccacacaccagcttcaaggtcctgcgtcagcttggtgggacaatcacatggccacccgcccgccaggcactgaagtcacttgggcggagttctgtcgtagcttcaggaaggcgcaggtgccagacggggtcgtggcacaaaagaagagggaatttcgggcactccatcagggcaacaggactgtgacagagtatctccatgagttcaatcgcctcgcgcgatatgcaccagaggatgtccgcaccgacgccgagaagcagaaaaagttcatggcaggtctggatgacgagctgaccaaccaactgatatctggggactacgcggattttgaaaggctggtggacaaggcaatccgtcaggaggatcagcgaaacaaaatggataggaagagaaaggcggcacagttccggtccaaccaaggaaaccatcagcgaccgcgcttcgctcccgggcagcagggtggacctaccaccatgatcgtccgccagtaccgcccgttcaaccctagcaacttccaccagggcgccagtggcagtcagaaccaccatggaggtcagcccaaccgcggtgcagctccacgcctaccagtggcaccggcacagtcaggcccgtccgcgcaagccaagaaggagactggaacaaaaccagggtcctgcttcaactgtggcgagcttggccacttcgctgacaaatgcccaaagcccaggtgtgccgggccaaggtttgtccaggctcgtgtcagccacgcgtctgcagaggaggcgcaagcagcaccagaggtcgtactgggtacatttcctgttaactcaatccctgcaacagtactttttgattctggtgcaacgcattctttcatttcaaagaaatttgtggggatgcatgggttaaggaaagaagagcttaatacaccaatgagggttcataccccgggaaatagttcaacctcggtcagttttagcccttcagtgctaatagaaatccaaagatcaccatttctagccaacctcattcttcttgaatccaaagacctagatgtcattcttgggatggattggctgaccaagttcaagggagtcattaattgtgcgaatcgcatagtcaccttgaccaacgagaagggagaaaccgcagtgtacaaatcactagtctcaccaaagcaaggggtcgccttgaatcagatggaggcggaaatcccagtggtcaccgaggagaagaatccgaggaaattggaagagattcccatagtttgcgagtacccagaagtctttcccgaagacctcactaccatgccacccaagcgagagattgaattccgaattgatttggcaccgggaaccgcgccaatttacaagagaccgtacaggatggcggccaacgagctagcagaggtcaagaagcaagttgatgagcagctgcagaaagggtacattcgaccaagtacttcaccttggggtgctccggtcatttttgtggagaaaaaggataagacaaagaggatgtgcgttgattatcgcgcactcaatgaggtcacaatcaagaataaatatcctttaccgcggatcgatgatttgtttgatcaactgaagggagctaaggtgttctctaagatagacatgagatcaggctatcaccagttgagaattcgggaagaggatatttcaaagacggccttcaccactcggtacgggctatatgagtgcacggttatgtctttcggacttaccaacgcacccgcattcttcatgaatttaatgaacaaagtgttcatggaatttctggacaagtttgttgtggtattcatcgacgacatacttatctatccaaagtctgaagaagaacatgagcagcatctccatttggtactcgagaagttgaaggagcaccagttatacgccaagttcagcaagtgtgatttttggttgacggaagtcaaatttctgggccatgttattacagctcaagttcagcaaactgagccacaaactaagccttacccactagacatgtggaagtacggtagtgctttgcaacagaggcccgagcttaatccttatagtacccgagctcagggtgtggcagttgatccatcgaacgtggagtcagttaccaaatggaccccaccgaagaccgtgtcacagattcgaagttttcttggacttgtaggttattaccgccgattcatcgaaaacttctccaggatcgcccgacccatgactcaattgcttaagaaagatgagaagtttaaatggacagctgagtgcgacaagagttttgaggagctcaaaaagaaattagtatccgcaccagttttgattctgcccgaccagatgaaagacttccaagtctattgcgatgcatcccgccacggacttggatgtgtcctaatgcaagagggcagagtggttgcgtatgcctcgcgacagttgcgtccacacgaagggaattatccaactcatgacctggaattggcagcagtggttcatgctttgaagatccggaggcactatctgattggcaaccgctgcgaagtatatatggaccataagagtctgaaatacatcttcacccaaccggacctaaatctccgacaacgaagatggttggaattaatcaaagactatgatatgagcattcactaccacccggagaaagccaatgtggtagcagacgcattaagcaggaagagttactgcactgccctaggcatcgagggcatgtgtgaggaattgcggcaggagcttgagcgtctcaacgtgggaattgttgaacacggattcgtagccgctctggaagcacggcctacgctcgcggatcaagtcagagcggctcaagtaaatgatcctgaaatagcagagctgaaaaagaatatgagagtcagaaaagcccgggattttcatgaagatgaacacggcacaatttggttgggagaaagattgtgtgtacctgacgacaaggaactgaaagatctgatactcaccgaggctcatcagactcagtactccattcatccaggcagcaccaaaatgtatcaagacctcaaagaaaagttttggtgggtcagcatgaggagagaaatagctgaattcgtcgcactctgcgatgtttgccaacgagtgaaggcagagcaccaaagaccagtaggtttactccaacctcttcaaatcccggaatggaaatgggaggagattggaatggactttataacaggactgccccggacatcatcgggtcacgattcaatctctgtcgtgaatgttaccccaacggtgctcaagagagtttgcattcctatcagactctgtcgaggagtgatcctctctagcgggaggttgtga

SEQ ID NO: 13817 - DNA, 3732 bp, Oryza sativa
  Clone ID: TFbOSC400477j.C1.o32.fg
atggtctacaccaggaatggtagccgcgcaacaggcgagggcagcaacggcgaagagcgcactgagggtgtgcatcccaacagcaattccgacaatggtccgccaccacttcccgagaatccgacgctagcccaagtgatggcacatcagactcaaatgatggcagccatgatgcagcagatgcagcagcagcaccagcagatgcaccagcggatgctgcagcatgccgaacagcagcatcagcagtttggtccccctccccctcagtccaaattgccagagtttctacgtgtcaggccacctactttctccagcaccaccaaccctatggaggcgaatgactggctccatgccatagagaagaagctgaatctcctgcagtgcaatgatcaggagaaggttgctttcgccacacaccagcttcaaggtcctgcgtcagcttggtgggacaatcacatggccacccgcccgccaggcactgaagtcacttgggcagagttctgtcatagcttcaggaaggcgcaggtgccagatggggtcgtggcacaaaagaagagagaattccgagcactgcaccaaggcaacaggacggtgacggagtatctccatgagttcaatcacctcgcgcgatatgcaccggaggatgtccgtactgacgccgagaagcaggaaaaattcctagcaggtctggatgatgagctaaccaaccagttgatatctggagattacgccgatttcgaaaggctggtagacaagacaatccgtcaggaggatcaacgcaacaagatggacaggaagaggaaggccgctcagttcagggcacctcagggaagtcaccagaggccgcgcttcgctcccgagcagcagggtggacctaccaccatgatcgtccgccagtaccgcccgttcaaccctagcaactttccccagggcgcaagtggcagtcagaaccaccatggaggtcagcccaaccgcggtgcagctccgctcccaccaatggcaccggcacagtcaggcccgtccgcgcaagccaaggaggagactggagcaaaaccagggtcctgcttcaactgtggcgagcttggccacttcgctgacaaatgcccgaagcctaggcgtgccgggccaaggtttatccaggctcgtgtcaaccacgcatctgcgaaggaggcacaagcagcaccagaggttgtactgggtacgtttcctgttaactcaatccctgcaacagtactttttgattctggtgcaacgcattcgttcatttcaaagaagtttgtcgggatgcatgggttaataagagaggaacttagcacaccaatgcgggttcataccccagggaatagctccacttcggttcaattcagcccttctataacaatagaaattcaaagatcaccatttctagccaacctcattcttctcgaatccaaagacctagatgtcattcttgggatggattggctgaccaagtttaagggagtcatcgattgttcgaatcgcacagtcaccttgaccaacgagaagggagaaacagtagtgtacaaatcaccagactcaccaaagcaagggatctctttgaatcagattgaggcggaaatcccagtggacaccgtggagaagaatttgaggaaattggaagatatacccatagtctgcgagtatccagaaatgttccccgaagaccttactaccatgccacccaagagagagattgaattccggattgacttggcaccgggaatcgctccaatttacaagagaccgtacagaatggcggccaacgaactagcagaggtcaagaagcaggttgatgagcagctgcagaaaggagctaaagtgttttctaagatagatctgcgatcaggctaccaccagttgagaattcgggaagaggatattccaaagacggccttcaccactcggtacgggctatatgagtgcacggttatgtctttcggacttaccaatgcacccgcattcttcatgaatctgatgaacaaagtgttcatggaatttctggacaagtttgttgtggtattcatcgacgacatacttatctattcaaagtccgaagaagaacatgagcaacatctccgtctggtactcgagaagttgaaggagcaccagctatacgccaagttcacttctggttattaccgccgattcatcgaaaacttctccaggatcgcccgacccatgactcagctgcttaagaaagatgagaagtttaaatggacagctgagtgcgataagagttttgaggagctcaagaagaaattagtatccgcactagttttgattctgcccgaccaaatgaaacacttccaagtctattgcgatgcatgtcgtcacggacttggatgtgtcctaatgcaagagggcagagtggttgcgtatgtctcgcggcagttgcgtccacacgaagggaattatccaactcatgacctggaattggcagcagtggttcatgctttgaagatctggaggcactatctgattggcaaccgctgcgaagtatatacggaccataagagtctgaaatacatcttcacccaaccggacctaaatctccgacaacgaagatggttggaactaatcaaagactatgacatcagcattcactaccacccgggtaaagccaatgtggtggcagacgcattaagcaggaaaagttactgcactgccctatgcatcgagggcatgtgtgaggaattgcggcaggagtttgagcatctcaacgtgggaattgttgaacacgggttcgtagccgctctggaggcacggcctacgctcgtggatcaagtcagagcagctcaagtaaatgattctgaaatagcagagctgaaaaagaacatgagagtcggaaaagcccgggatttccacgaagatgaacacggcataatctggttgggagaaagattgtgtgtacctgacgacaaggaactgaaggatctgatactcaccgaggctcatcagacccagtactccattcatccaggcagcaccaaaatgtatcaagacctcaaagaaaagttttggtgggtcagcatgacgagagaaatagctgaattcgtcgcactctgcgatgtttgccaacgagtgaaggcagagcaccaaagaccagcagtacataccacgtatacgggcaaaaggttggcggagctctacctctcgagaatcatgtgtctacatggagtacccaaaaagattgtatctgatcgagggagtcagttcacctcaaaattctggcagaagctgcaggaagaattggggacccgtttaaatttcagcacggcctatcacccgcaaactgatggtcagaccgagcgagtcaatcaaatctgggaagatatgttgagagcttgcgctcttgattttggtggagcttgggacaaaaacttgccatatgcggaattctcgtacaacaacaactaccaggccagtctacagatggcaccgtttgaagctttatacggccggaagtgccacacacctctcttctgggatcagacaggcgagcgtcaactattcgggacagaggtattagcggaagcagaagagaaagtcagaatcatcagggaaaggttgaggattgcccagtctcgacagaagagctacgcggataacccccgaagggagctcacttttgaggcaggagattacgtgtatcttcatgtcactccactcgagtttcgtcgccggaattcgcatcccctcgcgctccggtga

SEQ ID NO: 13818 - DNA, 4143 bp, Oryza sativa
  Clone ID: TFbOSC400498j.C1.o21.fg
atggaggcgaatgactggctccatgccatagagaagaagctgaatctcttgcagtgcaatgatcaggagaaggttgctttcgccacacaccagcttcaaggtcctgcgtcagcttggtgggacaatcacatggccacccgcccaccaggtactgaagtcacttgggtagagttctgccgtagcttcaggaaggcgcaggtgccagacggggtcgtggcacaaaagaagagggaatttcgggcactccatcagggcaacaggactgtgacggagtatctccatgagttcaatcgcctcgcgcgatatgcaccagaggatgtccgcaccgacgccgagaagcaggaaaagttcatggcaggtctggatgacgagctgaccaaccaactgatatctggggactacgccgactttgagaggctggttgacaaggcaatccgtcaggaggatcaacgcaacaagatggacaggaagaggaaggccgctcagttcagggcacatcagggaagtcaccagaggccgcgcttcactcctggacagcagggtggacctaccaccatgatcgtccgccagtaccgcccgttcaaccctagcaactttccccagggcgccagtggcagtcagaaccaccatggaggtcagcccaaccgcggtgcagctccacgcccaccaatggcaccggcacagtcaggcccgtccgcgcaagccaagaagaagactggagcaaaaccagggtcctgcttcaactgtggcgagcttggccacttcgctgacaaatgcccgaagcctaggcgtgccgggccaaggtttatccaggctcgtgtcaaccacgtatctgcggaggaggcacaaacagcaccagaggttgtactgggtacgtttcctgttaactcaatccctgcaacaatactttttgattctggtgcaacgcattcgttcatttcaaagaagtttgtcgggatgcatgggttaataagagaggaacttagcacaccgatgcgggttcataccccagggaatagctccacttcggttcaattcagcccttctataacaatagaaattcaaagatcaccatttctagccaaccttattcttctcgaatccaaagacctagatgtcattcttgggatggattggctgaccaagtttaagggagtcatcgattgtgcgaatcgcaccgtcaccttgaccaacgagaagggagaaacggtagtgtacaaatcaccagactcaccaaagcgaggggtctctttcaatcagattgaggcggaaatcccagtggacaccgtggagaagaatttgaggaaattggaagatatacccatagtctgcgagtatccagaagtgttccccgaagacctcactaccatgccacccaagagagagattgaattccggattgacttggcaccgggaaccgctccaatttacaagagaccgtacagaatggcggccaacgaactagcagaggtcaagaagcaggttgatgagcagcttcagaaagggtacattcgaccaagtacttcaccttggggtgctccggtcatttttgtggagaaaaaggataagacaaagaggatgtgcgttgattatcgcgcactcaacgaggtcacaatcaagaacaaatatcctttgccgcgaatcgatgatttgtttgatcaactgaaaggagctaaagtgttttataagatagatctgcgatcaggctacctccagttgagaattcgggaagaggatattccaaagacggccttcaccactcggtacgggctatatgagtgcacggttatgtctttcggacttaccaacgcacccgcattcttcatgaatctgatgaacaaagtgttcatggaatttctggacaagtttgttgtggtgttcatcgacgacattcttatctattcaaagaccgaagaagaacatgagcaacatctccgtctggtactcgagaagttgaaggagcaccagctatatgccaagttcagcaagtgtgacttctggttgacggaagtcaagtttctgggacatgtcattacagctcagggtgtggcagttgatccatcgaacgtagagtcagttaccaaatggaccccaccgaagaccgtgtcgcagattcgaagttttctaggactggcaggttattaccgccgattcatcgaaaacttctccaggatcgcccgacccatgactcagttgcttaagaaagatgagaagtttaaatggacagctgaatgcaataagagttttgaggagctcaaaaagaagttagtatccgcaccagttttgattctgcccgaccagatgaaagacttccaagtctattgcgatgcatcccgccacggacttggatgtgtcctaatgcaagagggcagagtgaggcactatctgattggcaaccgctgcgaagtatatacggaccataagagtctgaaatacatcttcacccaaccggacctaaatctccgaccacgaagatggttggaactaatcaaagattatgacatgagcattcactaccacccgggtaaagccaatgtggtggcagacgcgttaagcaggaaaagttaccgcactgccctgtgcatcgagggcatgtgtgaggaattgtggcaggagtttgagcatctcaacgtgggaattgttgaacacgggttcgtagccgctctggaggcacgacctacgctcgtggatcaagtcagagcagctcaagtaaatgattctgaaatggcagagctgaaaaagaacatgagagtcggaaaagcccgggatttccacgaagatgaacacggcacaatctggttgggagaaagattgtgtgtacctgacgacaaggaactgaaggatctgatactcaccgaggctcatcagacccagtactccattcatccaggcagcaccgaaatgtatcaagacctcaaagaaaagttttggtgggtcagcatgaggagagaaatagctgaattcgtcgcactctgcgatgtttgccaacgagtgaaggcagagcaccaaagaccagcaggtttactccaacctcttcaaatcccggaatggaaatgggaggagattggaatggactttataacaggactgccccggacatcatcgggtcatgattccatctgggtagtcgtggatcgactcactaaggttgctcacttcataccagtacataccacgtatacgggcaaaaggttggcggagctctacctctcgagaatcatgtgtctacatggagtacccaaaaagattgtatctgatcgagggagtcagttcacctcaaaattctggcaaaagctgcaggaagaattggggacccgtttaaattttagcacggcctatcacccgcaaactgatggtcagaccgagcgagtcaatcaaatcctggaagatatgttgagagcttgcgctcttgattttggtggagcttgggacaaaaacttgccatatgcggaattctcgtacaacaacagctaccaggccagtctacagatggcaccgtttgaagctttatacggccggaagtgccgcacacctctcttctgggatcagacaggcgagcgtcaactgttcgggacagaggtattaacggaagcggaagagaaagtcagaatcatcagggaaaggttgaggattgcccagtctcgacagaagagctacgcggataaccgccgaagggagctcacttttgaggcaggagattacgtgtatcttcgtgtcactccgctccggggagtacaccgttttcagacgaaaggcaagttggcaccacgcttcgtgggaccctacaaaatcttggaacgaaggggagaagttgcttatcagttagaacttccatccaatatgatcggcatccatgacgtgttccacgtgtcccaattaaagaagtgcttaagggtacctgaagaacaggctgattcggaacacattgatatccaggaggacctaacctatgtggagaagccggtttgtatacttgataccagcgaaagaagaaccagaaaaaaggtcaccaggttttgccgagttcagtggagtcatcattcagaagaggaagcaacctgggaaagggaggatgagttgaaagccgcccatccgcacctcttcgccagctcctccgaatctcggggccgagattccgtttaa

SEQ ID NO: 13819 - DNA, 5319 bp, Oryza sativa
  Clone ID: TFbOSC400558j.C1.o1.np
atggccggtcacccacccaaccaccgcggagaaggcatgatcgatttcgtggcagagttggcacgtatgacactggtggtgggctacctcaacgcgccggagtacacgacgattccgccgctcagtggcgagcttcctcaccgtgtccgcttggaggtccatggctacgtggggacttgcctcgctaacatggcggtcgaggcatctggaggcacagcagatcacgcctgtcaggaggcggcctacttgatgatggccagactacgggagcgccacgactacatcttccacgacacggcgtaccgctaccacccccgtcgagcccatggtgatggcgtcagctccttccgtccgacagctggcgagaacgacaccacctttggtcacatgtgtgctgtgatgaggggattggacaggatgcactcggacctgcacaaggcgaccaaggccttgaacgatgggaagctcatgaggatcgtcgccctgaaggacgagatagcgcgcctgaagaaggagaacgctcagctaaagggtcttccagcgccaggaggagtccggatccgcaccatgccccgcaagacgacgactgcacctgtgcgcatccagcttgcgcccaggaacccacctccagcagcagctcccgcagcaccttcagttccgcccgcagttcctgcagctccagttccagctcccgcgttcactctctccttcgctccagcatcagccgccagaggttcagccaatggtaccggaggttgttccctccagatggtctacaccaggactggcaaccgcacgacaggcgagggcagcaacggcgaagaacgcgctgatggtgtgcaccccaacagtgattctggcaatggtccgccaccacttcccgagaatccgacccttgcccaagttatggcacatcaaactcagatgatggcagccatgatgcagcagatgcagcagcagcaccagcagatgcaccagaggatgatgcagcacgccgaacagcagcaccagcagtttggtccccctccccctcagtccaagttgccagaatttctacgcgtcaggccacccaccttctccagcaccaccaaccccatggaggcgaatgactggctccatgcaatagagaagaagctgaatctcctgcagtgcaatgatcaggagaaggtcgcttttgccacacaccagcttcagggtcctgtgtcagcttggtgggacaaccacatggccacccgcccaccgggtactgaagtcacatgggcagagttctgccgtagcttcaggaaggcacaggtgccagacggggtcgtggcacaaaagaagagggaattccgggcgctccatcagggcaacaggactgtgacagagtacctccacgagttcaatcgcctcgcgcgatatgcaccagaggatgtccgcaccgacgccgagaagcaggagaagttcatggcgggtttggatgatgagctgaccaaccaactgatatctggggactacgctgactttgagaggctggtcgacaaggcaatccgtcaggaggaccaacgcaacaagatggacaggaagaggaaggccgctcagttcagggcacatcagggaagtcaccagaggccgcgcttcactcccgggcagcagggtggacctaccaccatgatcgtccgccagcaccgcccgttcaaccctagcaacttccaccagggcaccagtggcagtcaaaactaccatggaagtcagcccaaccgcggtacagctccacgcccaccaatggcaccggcacagtcaggccagcccgcgcaagccaagaaggagacgggagcaaaaccagggtcctgcttcaactgtggcgagcttggccacttcgctgacaaatgcccgaagcccaggcgtgccgggccaaggtttatccaggctcgtgtcaaccacgcatctgcggaggaggcacaaacagcaccggaggtcgtactgggtacgttccctgttaactcaatccctgcaacagtactttttgattctggtgcaacgcattctttcatttcaaagaaatttgtggggaggtatgggttaaggaaagaagagcttagcacaccaatgagggttcataccccgggaaatagttcaacctcagtcagttttagcccctcagtgctaatagaaatccaaagatcaccatttctagccaacctcattcttctcgaatccaaagacctagatgtcattcttgggatggattggctgaccaagtttaagggagtcatcgattgtgcgagtcgcacagtcaccttgaccaacgagaagggagaaacagtggtgtacaaatctctagtctcaccaaagaaaggggtctcgttgaatcagattgagacggaaatcccagtggataccgtagagaagaacttgagaaaattggaagatatacccatagtctgcgagtatccagaagtgttccccgaagacctcactaccatgccacccaagagagagattgaattccggattgacttggcaccgggaaccgctccaatctataagagaccatacagaatggcggccaacgaattagcagaggtcaagaagcaagttgatgagcagctgcagaaagggtacatacgaccaagcacttcaccttggggcgctccggtcatttttgtggagaaaaaggataagacgaagaggatgtgcgttgattatcgcgcactcaacgaggtcacaatcaagaataaatatcctttgccgcgaatcgacgatttatttgatcaactgaaaggagctaaagtattttctaagatagacctgcgatcaggctaccaccagctgagaatccgggaagaggatattccgaagacggccttcaccactcggtacgggctatatgagtgcacggttatgtctttcggacttaccaacgcacccgcattcttcatgaatctgatgaacaaagtgttcatggaatttctggacaagtttgttgtggtattcatcgacgacatacttatctactcaaaatccgaggaagaacatgagcaacatctccgtctggtactcgaaaagttgaaggagcaccagctatacgccaagttcagcaagtgtgacttctggttgacggaagtaaaatttctgggtcatgtcattacagctcagggtgtggcagtcgacccatcgaacgtggagtcagttaccaaatggaccccacctaagaccgtgtcgcagattcggagttttctaggactggcaggttattaccgccgattcatcgaaaatttctccagaatcgcccgacccatgactcagttgcttaagaaagatgagaagtttaaatggacagctgagtgcgataagagttttgaggagctcaagaagaaattagtatccgcaccggttttgatcctgcccgaccagatgaaagacttccaagtctattgcgatgcatcccgtcacggacttggatgtgtcctaatgcaagagggcagagtggttgcgtatgcctcgcggcagttgcgtccacacgaaggaaattatccaactcatgacttggaattggcagcagtggttcatgctttgaagatctggaggcactatctgattggcaaccgctgcgaagtatatacggaccataagagtctgaaatacatcttcacccaaccggatctaaaccttcgacaacgaagatggttggaactaatcaaagactatgacatgagtattcactaccacccgggtaaagccaatgtggtggcagacgctttaagccggaaaagttactgcactgccctatgcatcgagggcatgtgtgaggaattgcggcaggagtttgaacatctcaacatgggaattgttgaacacgggtttgtagccgctctggaggcacggcctacgctcgtggatcaagttagagccgctcaagtaaatgatccggaaatagcagaactgaaaaagaacatgagagtcggaaaggctcgggatttccacgaagatgagcatggcacaatctggatgggagaaagattgtgtgtacctgacgacaaagaactgaaggatctgatactcaccgaggctcatcagacccagtactccattcacccaggcagcaccaaaatgtaccaagaccttaaagaaaaattttggtgggtcagcatgagaagggaaatagctgaattcgtcgcactctgcgatgtttgccaatgagtgaaagcagagcaccaaagaccagcaggtttactccaacctcttcaaatcccggaatggaaatgggaggagatcggaatggactttataacgggactgccccggacatcatcgggacatgattcaatctgggtagtcgtggatcgactcactaaggttgctcactttataccagtacataccacctatacgggaaagagattggcagaattgtacctcgcaaggatcatgtgtttgcatggggtacccaggaagatagtatccgaccgaggtagtcagttcacctcaaagttttggcagaaactgcaggaagaattggggacccgtttaaacttcagcacggcctatcacccgcaaactgatggtcagaccgagcgagtcaatcaaatcttggaagatatgttgagagcttgcgctcttgattttggtggagcttgggacaaaagcttgccatatgcggaattctcgtacaacaacagctaccaggccagtctacagatggcaccgtttgaagctttatacggccggaagtgccgcacacctctcttctgggatcagacaggcgaacgtcaactgttcggaacagaagtattagcggaagcagaagagaaagtcagaatcatcagggaaaggttgaggattgcccagtctcgacagaagagctacgcggataaccgtcgaagggagctcacttttgaggcaggagattacatgtatcttcgtgtcactccgctccggggagtacatcgttttcagacgaaaggcaagttggcaccacgcttcgtgggaccatacaaaatcttggaacgaaggggagaagttgcttatcagctagaacttccatccaacatgatcggcatccatgacgtgttccacgtgtcccaattaaagaagtgtttaagggtacctgaagaacaggcggattcggaacacattgatatccaggaggacctaacttatgttgagaagccggttcgcatacttgataccagcgaaaggagaaccagaaacaaggttacccggttttgccgtgttcagtggagtcatcattcggaagaggaagcaacctgggaaagggaagatgagttgaaagccgcccatccgcacctcttcaccagctcctccgaatctcggggc

SEQ ID NO: 13820 - DNA, 3919 bp, Oryza sativa
  Clone ID: TFbOSC400560j.C1.o2.gm
atggtctacaccaggactggcaaccgcacgacaggcgagggcagcaacggcgaagaacgcgctgatggtgtgcaccccaacagtgattctggcaatggtccgccaccacttcccgagaatccgacccttgcccaagttatggcacatcaaactcagatgatggcagccatgatgcagcagatgcagcagcagcaccagcagatgcaccagaggatgatgcagcacgccgaacagcagcaccagcagtttggtccccctccccctcagtccaagttgccagaatttctacgcgtcaggccacccaccttctccagcaccaccaaccccatggaggcgaatgactggctccatgcaatagagaagaagctgaatctcctgcagtgcaatgatcaggagaaggtcgcttttgccacacaccagcttcagggtcctgcgtcagcttggtgggacaaccacatggccacccgcccaccgggtactgaagtcacatgggcagagttctgccgtagcttcaggaaggcacaggtgccagacggggtcgtggcacaaaagaagagggaattccgggcgctccatcagggcaacaggactgtgacagagtacctccacgagttcaatcgcctcgcgcgatatgcaccagaggatgtccgcaccgacgccgagaagcaggagaagttcatggcgggtttggatgatgagctgaccaaccaactgatatctggggactacgctgactttgagaggctggtcgacaaggcaatccgtcaggaggaccaacgcaacaagatggacaggaagaggaaggccgctcagttcagggcacatcagggaagtcaccagaggccgcgcttcactcccgggcagcagggtggacctaccaccatgatcgtccgccagcaccgcccgttcaaccctagcaacttccaccagggcaccagtggcagtcaaaactaccatggaagtcagcccaaccgcggtacagctccacgcccaccaatggcaccggcacagtcaggccagcccgcgcaagccaagaaggagacgggagcaaaaccagggtcctgcttcaattgtggcgagcttggccacttcgctgacaaatgcccgaagcccaggcgtgccgggccaaggtttatccaggctcgtgtcaaccacgcatctgcggaggaggcacaaacagcaccggaggtcgtactggtcaccttgaccaacgagaagggagaaacagtggtgtacaaatctctagtctcaccaaagaaaggggtctcgttgaatcagattgagacggaaatcccagtggataccgtagagaagaacttgagaaaattggaagatatacccatagtctgcgagtatccagaagtgttccccgaagacctcactaccatgccacccaagagagagattgaattccggattgacttggcaccgggaaccgctccaatctataagagaccatacagaatggcggccaacgaattagcagaggtcaagaagcaagttgatgagcagctgcagaaagggtacatacgaccaagcacttcaccttggggcgctccggtcatttttgtggagaaaaaggataagacgaagaggatgtgcgttgattatcgcgcactcaacgaggtcacaatcaagaataaatatcctttgccgcgaatcgacgatttatttgatcaactgaaaggagctaaagtattttctaagatagacctgcgatcaggctaccaccagctgagaatccgggaagaggatattccgaagacggccttcaccactcggtacgggctatatgagtgcacggttatgtctttcggacttaccaacgcacccgcattcttcatgaatctgatgaacaaagtgttcatggaatttctggacaagtttgttgtggtattcatcgacgacatacttatctactcaaaatccgaggaagaacatgagcaacatctccgtctggtactcgaaaagttgaaggagcaccagctatacgccaagttcagcaagtgtgacttctggttgacggaagtaaaatttctgggtcatgtcattacagctcagggtgtggcagtcgacccatcgaacgtggagtcagttaccaaatggaccccacctaagaccgtgtcgcagattcggagttttctaggactggcaggttattaccgccgattcatcgaaaatttctccagaatcgcccgacccatgactcagttgcttaagaaagatgagaagtttaaatggacagctgagtgcgataagagttttgaggagctcaagaagaaattagtatccgcaccggttttgatcctgcccgaccagatgaaagacttccaagtctattgcgatgcatcccgtcacggacttggatgtgtcctaatgcaagagggcagagtggttgcgtatgcctcgcggcagttgcgtccacacgaaggaaattatccaactcatgacttggaattggcagcagtggttcatgctttgaagatctggaggcactatctgattggcaaccgctgcgaagtatatacggaccataagagtctgaaatacatcttcacccaaccggatctaaaccttcgacaacgaagatggttggaactaatcaaagactatgacatgagtattcactaccacccgggtaaagccaatgtggtggcagacgctttaagccggaaaagttactgcactgccctatgcatcgagggcatgtgtgaggaattgcggcaggagtttgaacatctcaacatgggaattgttgaacacgggtttgtagccgctctggaggcacggcctacgctcgtggatcaagttagagccgctcaagtaaatgatccggaaatagcagaactgaaaaagaacatgagagtcggaaaggctcgggatttccacgaagatgagcatggcacaatctggatgggagaaagattgtgtgtacctgacgacaaagaactgaaggatctgatactcaccgaggctcatcagacccagtactccattcacccaggcagcaccaaaatgtaccaagaccttaaagaaaaattttggtgggtcagcatgagaagggaaatagctgaattcgtcgcactctgcgatgaagaattggggacccgtttaaacttcagcacggcctatcacccgcaaactgatggtcagaccgagcgagtcaatcaaatcttggaagatatgttgagagcttgcgctcttgattttggtggagcttgggacaaaagcttgccatatgcggaattctcgtacaacaacagctaccaggccagtctacagatggcaccgtttgaagctttatacggccggaagtgccgcacacctctcttctgggatcagacaggcgaacgtcaactgttcggaacagaagtattagcggaagcagaagagaaagtcagaatcatcagggaaaggttgaggattgcccagtctcgacagaagagctacgcggataaccgtcgaagggagctcacttttgaggcaggagattacgtgtatcttcgtgtcactccgctccggggagtacatcgttttcagacgaaaggcaagttggcaccacgcttcgtgggaccatacaaaatcttggaacgaaggggagaagttgcttatcagctagaacttccatccaacatgatcggcatccatgacgtgttccacgtgtcccaattaaagaagtgtttaagggtacctgaagaacaggcggattcggaacacattgatatccaggaggacctaacttatgttgagaagccggccgaggcccagcccggcagccggccgcccgcctccctccctcctggggtcgccgacagggggacccacctgtcggacccgtctcccacctcccgcctctcccgctcgcgccgccgcacccgtaacggccgccgcgcccacgcctccgcctcccccgggccac

SEQ ID NO: 13821 - DNA, 4083 bp, Oryza sativa
  Clone ID: TFbOSC400574j.C1.o2.gm
atggtctacaccaggactggcaaccgcacggcaggcgagggcagcaacggcgaagaacgcgctgatggtgtgcaccccaacggtgattctggcaatggtccgccaccacttcccgagaatccgacccttgcccaagttatggcacatcagactcagatgatggccgccatgatgcagcagatgcagcagcagcaccagcagatgcaccagaggatgatgcagcacgccgaacagcagcatgagcagtttggtccccctccccctcagtccaagctgcctgagtttctacgtgtcaggccacccaccttctccagcaccaccaaccctatggaggcaaatgactggctccatgcgatagagaagaagctgaatctcctgcagtgcaatgatcaggagaaggttgctttcgccacacaccagcttcagggtcctgcgtcagcttggtgggacaaccacatggccacccgcccaccgggtactgaagtcacatgggcagagttctgccgtagcttcaggaaggcacaagtgccagatggggtcgtggcacaaaagaagagggaatttcgtgcactccatcagggcaaccggactgtgacagagtaccttcatgagttcaatcgcctcgcgcgatatgcaccagaggatgtccgcaccgacgccgagaagcaggagaagttcatggcgggtctggatgacgagctgaccaaccaactgatatctggggactacgctgactttgaaaggctggttgacaaggcaatccgtcaggaggatcagcgcaacaaaatggacaggaaaagaaaggcggcgcagttccggtccaaccaaggtagtcagcaccgaccgcgcttcactcccggacagcagggtggacctaccaccatgatcgtccgccagcaccgcccgttcaaccctagcaacttccatcagggcaccagtggcagccagaaccaccatggaggccagcccaaccgcggtgcagctccacgcccaccaatggcaccggcacagtcaggccagccagcgcaagccaagaaggagacgggagcaaaaccagggtcctgcttcaactgtggcgagcttggccacttcgctgacaaatgcccgaagcccaggcgtgccggaccaaggtttatccaggctcgtgtcaaccacgcgtctgcggaggaggcacaagcagcaccagaggtcgtactggtcaccctgaccaatgagaaaggagaaaccgtggtgtacaaatctctagcctcgccaaagaaaggagcctcgttgaatcagattgagacggaaatcccagtggacgccgaagagaagaacttgagaaaattggaggacatacccatagtctgcgagtatccagaggtgttccccgaagacctcaccaccatgccacccaagagggagattgaattccggattgatttggcaccaggaaccgctccaatctataagagaccgtacagaatggcggccaacgaattagcagaggtcaagaagcaagttgatgagcagctgcagaaagggtacattcgaccaagcacttcaccttggggcgctccggtcatttttgtggagaaaaaggataagacaaagaggatgtgcgtcgattatcgcgcacttaacgaggtcacaatcaagaataaatatccgttgccgcgaatcgacgatttatttgatcaactgaaaggagctaaagtgttctctaagatagacctgcgatcaggctaccaccagttgagaatccgggaagaggatattccgaagacggccttcaccactcggtacgggctatatgagtgcacggttatgtccttcggacttactaacgcacccgcattcttcatgaatctgatgaacaaagtgttcatggaatttctggacaagtttgttgtggtattcatcgacgacattcttatctattcaaagtccgaggaagaacatgaacaacatctccgtctagtactcgagaagttgaaggagcaccagctatacgccaagttcagcaagtgtgacttctggttgacggaagtcaaatttctgggccatgtcattacagctcagggtgtagcagttgatccatcgaacgtggagtcagttaccaagtggaccccaccgaagacagtgtcgcagattcgaagttttctaggactggctggttattaccgtcggttcatcgaaaacttctcaagaatcgcccgacccatgactcagttgcttaagaaagacgagaagtttaaatggacagctgagtgcgacaagagctttgaggagctcaaaaggaaattagtatccgcaccggttttgatcctgcccgaccagacgaaagacttccaagtctattgcgatgcatcccgtcacggacttggatgtgtcctaatgcaagagggcagagtggttgcatatgcctcgcggcagttgcgtccacacgaaggaaattatccaactcatgacttggaattggcagcagtggtccatgctttgaagatctggaggcactatctgatcggcaaccgctgcgaagtatatacggaccataaaagtctgaaatacatcttcacccaaccggacctaaaccttcgacaacgaagatggttggagctaatcaaagactatgacatgagtattcactaccacccgggtaaagccaatgtggtggcagacgctttaagccggaaaagttactgcactgccctatgcatcgagggcatgtgtgaggaattgcggcatgagtttgaacatctcaacatgggaattgttgaacacgggtttgtagccgctttggaggcacggcctacgctcgtggaccaagtcagagcagctcaagtaaatgacccggaaatagcggaactgaaaaagaacatgagggttggaaaagctcgagatttccacgaggatgagcacggcacaatctggatgggagaaagattgtgtgtacccgacgacaaggagttgaaggatctgatactcaccgaagctcatcagacccagtactccattcatccaggcagcactaaaatgtatcaagacctcaaagagaagttttggtgggtcagcatgaggagagaaatagctgaattcgtcgcactctgcgatgtttgccagcgagtgaaagcagagcaccaaagacccgcaggtttactccaacctctacaaatcccggaatggaaatgggaggagattggaatggactttataacgggactgccccggacatcatcgggacatgattcaatctgggtagtcgtggaccgactcaccaaggaagaattggggacccgtttaaacttcagcacggcctatcacccgcaaactgatggtcagaccgagcgtgtcaatcaaatcttggaggatatgttgatagcttgcgctcttgattttggtggagcttgggacaaaagcttaccatatgcggaattctcgtacaacaacagctaccaggccagtctacagatggcaccgtttgaagctttgtacggccggaagtgccgcacacctctcttctgggatcagacaggcgaacgtcaactgttcggaacagaagtattagcggaagcagaagagaaagtcagaatcatcagggaaaggttgaggattgctcagtctcgacagaagagctacgcggataaccgccgaagggagctcacttttgaggcaggagattacgtgtatcttcgtgtcaccccgctccggggagtacaccgtttccagacaaaaggcaagttggcaccacgcttcgtgggaccatacaaaattttggaacgaaggggagaggttgcctatcagctagaacttccgtccaacatgatcggcatccatgacgtgttccacgtatcccaattaaagaagtgcttaagggtacctgaggaacaggctgattcggaacacatcgatatccaggaggacctgacctatgtggagaagccggttcgcatacttgataccagcgaaaggaggaccagaaacaaggcaagggtgggcgtgatggagcggggcgggccctgcgacggcctctgtcgcttccggattcacctaggcacgagaggggactgcccgtcgcccgctggggacgggggtgaaacctga

SEQ ID NO: 13822 - DNA, 5187 bp, Oryza sativa
  Clone ID: TFbOSC400596j.C1.o9.fg
atggaaaaacctaagagccctctgaatcctttttcattgcatatgttcttcgcaattggatttgttccgggaaaatggggatctgttcttgtggttcaagggaaaaatcttggtcgctcgtttaaaatggccggtcacccacccaaccaccgcggagaaggcatgatcgactttgtggcagagctggcacgcatgacactggtagtgggctaccccgacgcgccggagtacacgaccatcccaccgctcagtggcgagcttccttaccgtgtccgcttggaggtccatggctacgtggggacttgcctcgctaacatggcggtggaggcgtcaggaggcacagcagatcacgcctgtcaggaggcagcctacttgatgatggccaggctacgggagcgccacgactacatcttccacgacacggcgtaccgctaccacccccgtcgagcccatggtgatggcgtcagctccttccgtccgacagctggcgagaacgacaccaccttcggtcacatgtgtgctgtgatgaggggattggataggatgcactcggacctgcacaaggcgaccaaggccttgaacgatgggaagctcatgaggatcgtcgctctgaaggacgaggtagcgcgcctgaagaaggagaatgctcagttgaagggccttccagcgccaggaggagtccggatccgcactacgccccgtaagaggacgactgcacctgtgcgcatccagcttgcgcccaggaacccacctccaccagcagctcccgcagcagctccagttccgcccgcagttcctgcagctccagctccagctcccgcgttcactctctccttcgctccagcatcagccgccagaggttcagccagtggtaccggaggttgcttgtttgggggtcagtcggcgatggtctacaccaggactggtagccgcgcaacaggcgagggcagcaacggcgaagaacgcgctgatggtgtgcaccccaacggtgattctggcaatggtccgccaccacttcccgagaatccgacgcttgcccaagttatggcacatcagactcagatgatggcagccatgatgcagcagatgcagcagcagcaccagcagatgcatcagaggatgatgcagcacgccgaacagcagcaccagcagtttggtccccctcccccccagtccaagttgcctgagtttctacgtgtcaggccacccaccttctccagcaccaccaaccctatggaggcaaatgactggctccatgcgatagagaagaagctgaatctcctgcagtgcaatgaccaggagaaggtcgctttcgccacacaccagcttcagggtcctgcgtcagcttggtgggacaaccacatggccacccgcccaccgggtactgaagtcacatgggcagagttctgccgtagcttcaggaaggcacaggtgccagatggggtcgtggcacaaaagaagagggaattccgtgcgctccatcagggcaacaggactgtgacagagtacctccatgagttcaatcgcctcgcgcgatatgcaccagaggatgtccgcaccgacgccgagaagcaggagaagttcatggcgggtctggatgatgagctgaccaaccaactgatatctggggactacgccgactttgagaggctggttgacaaggcaatccgccaggaggatcagcgcaacaaaatggacaggaaaagaaaggcggcgcagttccggtccaaccaaggcagtcagcaccgaccgcgcttcactcccggacagcagggtggacctaccaccatgatcgtccgccagcaccgcccgttcaactccagcaacttccaccagggcactagtggcagtcagaaccaccagggaggccagcccaaccgcggtgcagctccacgcccatcagtggcaccggcacagtcaggccagcccgcgcaagccaagaaggagactggagcaaaaccagggtcctgcttcaactgtggcgagcttggccacttcgctgacaaatgcccgaagcccaggcgtgccgggccaaggtttatccaggctcgtgtcaaccacgcgtctgcggaggaggcacaagcagcaccagaggtcgtactgggtacgttccctgttaactcaatccctgcaacagtactttttgattctggtgcaacgcattctttcatttcaaagaaattcgtgggaatgtatgggctaaggaaagaagagcttagcacaccaatgagggttcgtaccccgggaaatagttcaacctcagtcagttttagcccttcagtgctaatagaaatccaaagatcaccatttctagccaacctcatccttctcgaatccaaagacctagatgtcattcttgggatggattggctgaccaagtttaagggagtcatcgattgtgcgaatcgcacagtcaccctgaccaatgagaaaggagaaaccgtggtgtacaaatccctagtctcgccaaagaaaggagcctcgttgaatcagattgaaacggaaatcccagtggacaccgtggggaagaacttgagaaaattggaagatatacccatagtctgcgagtatccggaagtgttccccgaaaacctcactaccatgccacccaagagggagattgaattccggattgacttggcaccgggaaccgctccaatttacaagagaccatacaggatggcggccaacgaattagcagaggtcaagaagcaagttgatgagcagctgcagaaagggtacatacgaccaagcacttcaccttggggcgctccggtcatttttgtggagaaaaaggataagacgaagaggatgtgcgtcgattatcgcgcacttaacgaggtcacaatcaagaataaatatcccttaccgcgaatcgacgaattatttgatcaactgaaaggagctaaagtgttctctaagatagacctgcgatcaggctaccaccagctgagaatccgggaagaggatattccgaagacggccttcaccactcggtacgggctatatgagtgcacggttatgtctttcggacttaccaacgcacccgcattcttcatgaatctgatgaacaaagtgttcatgaaatttctggacaagtttgttgtggtattcatcgacgacattcttatctattcaaagtccgaggaagaacatgaacaacatctccgtctggtactcgagaagttgaaggagcaccagctatacgccaagttcagcaagtgtgacttctggttgacggaagtcaaatttctgggccatgtcattacagcccagggtgtagcagttgatccatcgaacgtggagtcagttacaaaatggaccccaccaaagaccgtgtcgcagattcggagttttctaggactggcaggttattaccgccgattcatcgaaaacttctccagaatcgcccgacccatgactcagttgcttaagaaggatgagaagtttaaatggacagctgagtgcgataagagctttgaggagctcaaaaagaaattagtatccgcaccagtattgattctgcccgacccgacgaaagacttccaagtctattgtgatgcatcccgtcacggacttggatgtgtcctaatgcaagagggcagagtggttgcgtatgcctcgcggcagttgcgtccacacgaaggaaattatccaactcatgacttggaattggcagcagtggttcatgctttgaagatctggaggcattatctgattggaaaccgctgcgaagtatatacggaccataagagtctgaaatacatcttcacccaaccggatctaaaccttcgacaacgaagatggttggaactaatcaaagactatgacatgagtattcactaccacccgggtaaagccaatgtggtggcagacgctttaagccggaaaagttactgcactgccctatgcatcgagggcatgtgtgaggaactgcggcaggaatttgaacatctcaacatgggaattgttgaacacgggtttgtagccgctttggaggcacggcctacgctcgtggatcaagtcagagccgctcaagtaaatgatccggaaatagcagaattgaaaaagaacatgagagtcggaaaggctcgggatttccttgaggatgagcatggcacaatctggatgggagaaagattgtgcgtaccggacgacaaggaattgaaggatctgatactcaccgaagctcatcagacccagtactccattcatccaggcagcactaaaatgtatcaagacctcaaagaaaagttttggtgggtcagcatgaggagagaaatagctgaattcgtcgcactctgcgatgtttgccaacgagtgaaagcagagcaccaaagaccagcaggtttactccaacctctccaaatcccggaatggaaatgggaggagattggaatggactttatcacaggactgccccggacatcatcgggacatgattcaatctgggtagtcgtggatcgactcaccaaggtggctcactttataccagtacataccacctatacgggaaagagattggcagaattgtacctcgcaaggatcatgtgtttgcatggggtacccaagaagatagtctccgaccgaggtagtcagttcacctcaaagttctggcagaagctgcaggaagaaatggggacccgtttaaatttcagcacggcctatcacccgcaaactgatggtcagacagagcgagtcaatcaaatcttggaagatatgttgagagcttgcgctcttgattttggtggagcttgggacaaaagcttaccatatgcggaattctcgtataacaacagctaccaggccagtctacagatggcaccgtttgaagctctatacggccggaagtgccgcacacctctcttctgggatcagacaggcgaacgtcagctgttcggaacagaagtattagcggaagcagaagagaaagtcagaatcatcagggagagattgaggattgctcagtctcgacagaagagctacgcggataaccgtcgaagggagctaacttttgaggccagagattacgtgtatcttcgtgtcaccccgctccggggagtacaccgctttcagacaaaaggcaagttggcaccacgcttcgtgggaccgtacaaaattttggaacgaaggggagaagttgcctatcagctagaacttccatccactatgatcggcattccatga

SEQ ID NO: 13823 - DNA, 5468 bp, Oryza sativa
  Clone ID: TFbOSC400679j.C1.o10.np
atggccggccacccacccaaccaccacggagaaggcatgattgactttgtggcagagttagcacgtatgacgctggtggtgggctaccccaacgcgccggagtacacgactgttccaccgctcagtggcgagcttccccaccgtgtccgcttggaggtccatggctacgtggggacttgcctcgctaacatggtggttgaggcgtccggaggcacagcagatcacgcctgtcaggaggcagcatacctgatgatggccagactacgggagtgccacaactacatcttccatgacacggcgtatcgatttcaccctcgtcgagccagcggtgatgatgtcagtaccttccgtccaatagccggcgagaacgacaccacctttgatcacatgtgcgccgtgatgagggggatggacaggatgcacttggacctgcacaagacgtccaaggccttgaatgatgggaagctcatgaggatcgtcgttctaaaggacgagatagcgcgcttgaagagggagaatgctcagttaaagggtcttcccgcgccaggaggagtccggatccacactacgccccgcaagtcgacaacggcacccgtgcgcatccagcttgcgcccaggaacccacctccgcccgcagttcccgcagcacctccagttccgcccgcagctccagcagttcccgcagctccagcgccagctccagctcatgttcccgtgtcagctcctgcatccgctctctccttcgcgcctgcaacagccgtcaggggccccgccagtggcaatggaggttggttgccagctactcccagtggcagtcgcgacctcagcagcagcagctccagtggctcagagctgggtagcggcgagacttatctgccaggctccaggagtcgctcagagggacgtgatggtctacaccaggactggcacccgcacgacaggtgagggcagcaacggcgaagaacgcgctgatggtgtgcatcccaacagtgattccggcaatggtccgccaccacttcccaagaatccgacgctagcccaagtaatggcacatcagactcagatgatggcagccatgatgcagcagatgcagcagcagcaccagcagatgcaccagaggatgctgcatcacgccgaacagcagcaccagcagtttggtccccctccccctcagtccaagttgccagagtttctacgtatcaggccacccactttctctagtaccaccaaccccatggaggcaaatgactggctccatgccatagagaagaagccgaatctcctgcagtgcaatgatcaggagaaggttgctttcgccacacaccagcttcaaggtcctgcgtcagcttggtgggacaatcacatggccacccgcccgccaggcactgaagtcacttgggcggagttctgtcgtagcttcaggaaagcgcaggtgccagacggggtcgtggcacaaaagaagagggaattccgggcactccaccagggcaacaggacagtgacggagtatctccatgattcaatcgcctcgcgtgatatgcaccggaggatgtccgtactgacgccgagaagcaggagaaattcctagcaggtctggatgatgagctaaccaaccagttgatatctggagattacgccgactttgagaggttggttgacaaggcaatccgtcaggaggatcagcgcaacaaaatggaaaggaagaggaaggcggcgcagttccggtccaaccaagggagccaccagcgaccgcgcttcactcccggacagcagggtagacctaccaccctgatcgtccgccagcaccgccctttcaatgccagcaacttccatcagggcgccagtggctgtcagaaccaccatggcggtcagcccaaccgcagtgcagctccgtgcccaccaatggcactagcacagtcagctacgtccgcgcaagctaagaaggagactgggacaaagccagggtcctgcttcaactgtggcgagcttggccacttcgctgacaaatgcccgaagcccaggcgtgccgggccaaggtttgtctaggcttgtgtcaaccacgcgtctgcagaggaggcgcaagcagcaccagaggtcgtactgggtacatttcctgttaactcaatccctgcaatagtactttttgattctggtgcaacgcgttctttcatttcaaagaaatttgtggggatgcatgggttaaggaaagaagagcttaatacaccaatgagggttcataccccgggaaatagttcaacctcggtcagttttagcccttcagtgctaatagaaatccaaagatcaccatttctagccaatctcattcttcttgaatccaaagacctagatgtcattcttgggatggattggctgaccaaattcaagggagtcattgattgtgtgaatcgcacagtcaccttgaccaacgagaagggagaaaccgtagtgtacaaatcactagtctcaccaaagcaaggggtctccttgaatcagattgaggcggaaatcccagtggtcaccgaggagaagaattcgaggaaattggaagagattcccatagtttgcgagtacccagaagtctttcctgaagacctcactaccatgccacccaagcgagagattgaattccggattgatttggcaccgggaaccgcgcccatttacaagaggccgtacaggatggcggccaacgaactagtagaggtcaagaaacaggttgatgagcagctgcagaaagggtacatttgaccaagtacttcgcattggggtgctccggtcatttttgtggagaaaaaggataagacgaagaggatgtgcgttgattatcgcgcactcaacgaggtcacaatcaagaataaatatcctttaccgcggatcgatgatttgtttgatcaactgaagggagctaaggtgttctctaagatagacctgcgatcaggctatcaccaattaagaatccgggaagaggatattccaaagatggctttcaccactcggtacgggctgtatgagtgcacagttatgtctttcggacttaccaatgcacccgcattcttcatgaatctgatgaacaaagtgttcatggaatttctcgataagttcgttgtggtcttcatcaacgacatacttatctattcaaagtctgaaaaagaacatgagcagcatctccgtctggtgctctagaagttgaaggagctccagttatacgccaagttcagcaagtgtgatttttggttgacggaagtcaaatttctaggccatgttattacagctcagggtgtggcaatcgacccatcaaacgtggagtcagttaccaaatggaccccaccgaagaccgtgtcgcagatttgaagttttcttggacttgcaggttattaccgccgattcatcgagaacttctccaggatcgcccgacccatgacttagttgcttaagaaagatgagaagtttaaatggacagctgagtgcgataagagctttgaggagttcaagaagaaattagtatccgcaccagttttgattctgcccgaccagatgaaagacttccaagtctattgcgacgcatcccgccacgggcttgggtgtgttctaatgcaggagggcagagtggttgcgtatgcctcgcgacagttgcgtctacacgaagggaattacccaacccatgatctagaattggcagcagtggttcatgctttgaagatctggaggtactatctgattggcaaccgctgtgaagtatatacggaccacaaaagtctgaaatatatcttcacccaaccggacctaaatctccaacaacgaagatggttggaactaatcaaagattatgacatgagcattcactaccacccggggaaagccaatgtggtggcagacgcattaagcaggaagagttactgcactgccctatgcatcgagggcatgtgtgaggaattgcagtaggagtttgagcatctcaacgtgggaattgttgaacacgggttcgtagccgctctggaagcacggcctacgctcgtcgatcaagttagagccgctcaagtgaatgatcctgaaatagcagagctgaaaaagaacatgagtcggaaaggctcgggatttccttgaggatgagcatggcacaaactggatggggggaaagattgtgtgtacctgacgacaaggaactgaaggatatgatactcaccgaggctcatcagacacagtgttccattcacccaggcagcaccaagatgtaccaagacctcaaagaaaagttttggtgggccagcatgaggagagaaatagctgaattcgtcgcactctgcgatgtttgccagcgagtgaaggtagagcatcaaaggccagcaggtttactccaacctcttcaaatcccggaatggaaatgggaggaaattggaatggattgtataacaggactgccccggacatcatcaggtcacgattcaatctgggtagtcgtggatcgactcaccaaggttgctcacttcataccagtgcataccacctatacgggaaagaaattggcagagttgtacctggcaaggatcatgtgtttgcatggggtacccaagaagattgtatctgatcgagagagtcagttcacctcaaaattctggcagaagctgcaggaagaattggggacccgtttaaatttcagcacggcctatcacccgcaaactgatggtcagaccgagtgagtcaatcaaatcttggaagatatgttgagagcttgcgctcttgattttggtggagcttgggacaaaagcttgccatatgcggaattctcgtacaacaacagctaccaagccagtctacagatggtaccgtttgaagctttatactgccggaagtgccgcacaccactcttctgggatcagacaggcgagcgtcaactgttcgggacagaggtattagcggaagcagaagagaaagtcagaaccatcagggaaaggttgaggattgccctgtctcgacagaagagctacacggataaccgccgaagggagctcacttttgaagcaggggattacgtgtatcttcgtgtcactccgctccggggagtacaccgttttcagacgaaaggcaagttggcaccacgcttcgtgggactatacaaaatcttggaacgaaggggggaagttgcttatcagctagaacttccatccaatatgattggcatccacgacgtgttccacgtgtcccaattaaagaagtgcttaagagtacccgaagaacaagctgattcggagcatattgatatccaggaggacctgacatatgtggagaagccggttcgtatacttgataccagcgaaagaagaaccagaaacaaggtcaccaggttttgccgagttcagtggagtcaccattcagaggaggaagcaacctgggaaagggaagatgagttgaaagccgcccatccgcacctcttcgccagctcctccgaatctcagggccgagattccgtt

SEQ ID NO: 13824 - DNA, 4035 bp, Oryza sativa
  Clone ID: TFbOSC400686j.C1.o8.gm
atggtctacaccaggaatggtagccgcacaacaggcgagggcagcaatggcgaagaacgcactgacggggtgcatcccaacagcgattccggcaatggtccgccaccactccccgagaatccgactctggcccaagtaatggctcatcagactcagatgatggcagccatgatgcagcagcagcaccagcagatgcaccaaaggatgcagcagcaagccgagcagcatcagcagcagtttggtccccctccccctcagtccaaactgccggagtttctacgcgttaggccacccaccttctccagcaccaccaaccccatggaggcgaatgactggctaaatgccatagagaagaagctaaatctcctgcagtgcaatgatcaggagaaggtcgccttcgccacacaccagctccaaggtcccgcgtcagcttggtgggacaatctcatggccacccgcccgccaggcactgaagtcacttgggcagagttctgtcgcagttttaggaaggcgcaggtgccagacggggtcgtggcacaaaagaagagagaattccgggcactccaccagggcaacaggacagtgactgagtatctccatgagttcaatcgcttagcgcgatatgcaccggaggatgtccacactaacgcggagaagcaggagaagttcctagcaggcctggatgacgagctaaccaaccagttaatctctggggactacgccgactttgagaggctggttgacaaggcaatccgtcaggaggatcagcgcaccaaaatggacaggaagagaaaggcggcgcagttccggtccaaccaaggaagccaccagcgaccgcgcttcactccaggacagcagggtggacctaccaccatgatcgtccgccagcaccgccctttcaactcaagcagcttccaccagggcgccagtggcagccagaaccaccatggaggtcagcccaaccacagtgcagctccgcgcccaccaatggcaccagtacagtcagctccgtccgcgcaagccaagaaggagactggaacaaagccagggtcctgcttcaactgtggcgagcttggccacttcgctgacaaatgtccgaagcctaggcgtgccgggccaaggttcatccaggctcgtgtcaaccacgcgtccgcagaggaggcgcaagcagcaccagaggtcgtactggtcaccttgaccaacaagaagggagaaacggtagtgtacaaatcactagtctcaccaaagcaaggggtctccttgaatcagattgaggtggaaatcccagtggtcaccgaggggaagagttcgaggaaattggaagatatccccatagtctgcgagtacccaaaagtgtttcccgaagacctcactaccatgccacccaagagagagattgaattccggattgatttggcaccgggaaccgctccaatttacaagacaccgtataggatggcagccaacgagctagcagaggtcaagaagcaggttgatgagcagctgcagaaagggtacattcgaccaagtacttcaccttggggtgctccggtcatttttgtggagaagaaggacaagacgaagagaatgtgtgtcgactatcgcgcactcaatgaggtcacaatcaagaacaaatatcctttaccgcggatcgatgatttgtttgatcagctgaaaggagctaaagtgttttctaagatagacctgcgatcaggctaccaccagttgagaattcaggaagaggatattccaaagacagccttcaccactcggtatgggttgtatgagtgcacggttatgtctttcggacttaccaacgcacccgcattcttcatgaatctgatgaacaaagtgttcatggaatttctggacaagtttgttgtggtattcatcgatgacatacctatctattcaaagtccgaagaagaacatgagcaacatctccgtctggtactcaagaagttgaaggagcaccagttatacgccaagttcagcaagtgtgacttctggttgtctgaagtcaaatttctgggtcacgttattacagctcaagacgtggcagttgatccatcgaatgtggaatcagttaccaagtggacaccacctaacaccgtgtcgcaaattcggagttttcttggacttgcaggttattaccgccgattcattgaaaacttctccaggatcgcccgacccatgactcagttgcttaagaaagatgagaagtttaaatggacagctgagtgtgacaagagttttgaggagctcaagaagaaattagtatccgccccagttctgattctgcccgaccagatgaaagacttccaagtctattgcaacgcatcccgccacgggtttggatgtgttctaatgcaagagggcagagtggtcgcgtatgcctcgcggcagttgcgtccacatgaagggaattatccaactcatgacctggaattggcagcagtggttcatgccttgaagatctggaggcactatctgattggcaaccgctgcgaagtgtatacggaccacaagagtctgaaatacatctttacccaaccggatctaaatctccaacagcgaagatggttggagctaatcaaagattatgacatgagcattcattaccatccaggaaaagccaatgtggtggcagatgcattaagcaggaaaagctactgcaatgctttatgcaccgaaggcatgtgtaaggaattgcagcagaagcttgaacacctcaacttggggcttgtggaatatgggtacatggctgccctagaggcacgacctacgctcgtggatcaagtcagagcagctcaagtaaatgatcctgaaataacagagctgaaaaagaacatgagggtcggaaaagcccgggatttccacgaagatgaacatggcacaatctggttggaagaaagattgtgtgtacctgacgacaaggaactgaaggatatgatactcaccgaggctcatcagactcagtactccattcatccaggcagcaccaaaatgtatcaagacctcaaagaaaagttttggtgggtcagcatgagaagggaaatagctgaattcgtcacactctgcgacgtttgccaacgagtgaaggcagagcaccaaaggccagcagatttactccaacctcttcaaatcctggaatggaaatgggaagaaattggaatggatttcataacaggtctgcccaggacatcatctggccacgattcgatatgggctagtcttcaaatggcaccgttcgaagcattatacggctggaagtgccgcacacctctcttctgggatcagacaggcgaacgtcaactgttcggaacagaggtgttaacggaagcagaagagaaagtcagaaccatcagagaaaggttgagaattgcccagtctcgacagaagagctacgcggacaaccgccgaagggagctcacttttgaagcaggggataacgtgtaccttcgtgttactccgctccggggagccgattcggagcacatcgatatccaggaggatctgacctacatggagaagccagttcgcatccttgagaccagcgaaaggaggactagaaacaaggtgtcgccgtcgcgcgtccgcacctcggcatcgccagtcttcgccgcctccctcgttttccgccgccggtcgtcgccgccccctccggtgaggactccctcccccttcctttccttccccatcccgcgtgcaccgtcggttttggccgcgccgctgctccgtctgtgcgcctccgccttcgtgccgtccgccgccgcctctagccatggccggccggccggctttgaagctgagccgagcccggcggctactccctgcgccgtccgatcggcccgaggccgatccggaccgtcggtcctgtggaccggcggtggaccacccgcgtggtcccggtccacggtggaccggccgctttgtgccgctgacccatggggcccacgtgccggcgccccctccctctccccttgcgcaactgacatgcgggccccgcatgtcggcgccgcccgctccctttga

SEQ ID NO: 13825 - DNA, 5446 bp, Oryza sativa
  Clone ID: TFbOSC400722j.C1.o48.np
atggccggtcacccacccaaccaccgcggagaaggcatgatcgatttcgtggcagagttggcacgcatgacactggtggtgggctaccccgacgcgccggagtacacgaccattccaccgctcagtggcgagcttcctcaccgtgtccgcttggaggtccatggttacgtggggacttgcctcgccaacatggcggtcgaggcatctggaggcacagcagatcacgcctgtcaggaggcagcctacttgatgatggccagactacgggagcgccacaactacatcttccacgacacggcgtaccgctaccaccccagtcgagccaacggtgatggcgtcagctccttccgtccgacagctggcgagaacgacaccaccttcggtcacatgtgtgctgtgatgaggggattggacaggatgcactcggacctgcacaaggcgaccaaggccttgaacgatgggaagctcatgaggatcgtcgctttgaaggacgagatagcgcgcctgaagaaggagaacgctcagctaaagggtcttccagcgccaggaggagtccggatccgcaccacgccccgcaagacgacgacggcacccgtgcgcatccagcttgcgcccagaaacccacctccagcagcagctcccgcagcacctccagttctgcccgcagttcctgcagctccagctccagctccagctccagctcccgcgtccgctctctccttcgctccagcgtcagccgccagaggtccagccagtggcaccgggggttggttgtctgctactcccagtggcagcagcgatctcagcagcagcagctccagtggctcgcagtcaggcagcggcgagacgtatctgccaggctccaggagtcgctcagagggacctgatggtctacaccaggactggcaaccgcacgacaggcgagggcagcaacggcgaagaacgcgttgatggcgtgcaccccaacagtgattccggcaatggtccgccaccacttcccgagaatccgacccttgcccaagttatggcgcatcagactcagatgatggcagccatgatgcagcagatgcagcaacaacaccagcaaatgcaccagaggatgatgcagcacgtcgaacagcagcaccagcactttggtccccctccccctcaatccaaattgcctgagttcctaggagtcaggccacccaccttctccagcaccaccaaccctatggaggcaaatgactggctccatgcaatagagaagaagctgaatctcctgcagtgcaatgatcaggagaaggtcgctttcgccacacaccagcttcagggtcctgcgtcagcttggtgggacaaccacatggccacccgcccaccgggtactgaagtcacatgggcagagttctgccgtagcttcaggaggcacaagtgccagatggggtcgtggcacaaaagaagagggaatttcgtgcactccatcagggtaacaggaccgtgacagagtacctccacgagttcaatcgcctcactgcgatatgcaccataggatgttcgtaccgaccccgataagcaggagaagttcatggcgggcctggatgatgagctgaccaaccagctgatatccgggtactacgctgactttgaaggctggttgacaaggcaatccgtcaggaggaccaacgcaacaagatggacaggaagaggaaggccgctcagttcagggcacatcagggaagtcaccagaggccgcgcttcactcccggacagcagggtggacctaccaccatgatcgtccgtcagcaccgcccgttcaaccctagcaacttctaccagggcaccagtgacagtcagaaccaccatggaggtcagcccaaccgcggtgcagctccacgcccaccagtggcatcggcacagtcaggccagcccgcgcaagccaagaaggagacggaagcaaaaccagggtcctgcttcaactgtggcgagcttggccacttcgctgacaaatgcccgaagcctaggcgtgccgggccaaggtttatccaggctcgtgtcaaccacgcatctgcggaggaggcacaagcagcaccagaggttgtactgggtacgtttcctgttaactcaatccctgcaacagtactttttgattctggtgcaacgcattctttcatctcaaagaaatttgtcgggatgcatgggttaataagagaggaacttagcacaccgatgcgggttcataccccagggaatagctccacttcggttcaattcagcccttctataacaatagaaattcaaaggtcaccggttctagccaacctcatccttctcgaatccaaagacctagatgtcattcttgggatggattggctgaccaagtttaagggagtcatcgattgtgcgaatcgcacagtcaccctgaccaacgagaagggagaaaccgtggtgtacaaatctctagtctcgccaaagaaaggagtctcgttgaatcagattgagacggaaatcccagtggacaccgtagagaagaacttgagaaaattggatgatatacccatagtctgcgagtatccagaggtgttccccgaagacctcactaccatgccacccaagagagagattgaattccggattgatttggcaccgggaaccgctccaatctataagagaccgtacagaatggcggccaacgaattaacggaggtcaagaagcaagttgatgaacagctgcagaaagggtacatacgaccaagcacttcaccttggggcgctccggtcatttttgtggagaaaaaggataagacgaagaggatgtgcgtcgattatcgcgcacttaacgaggtcacaatcaagaataaatatcctttgccgcgaatcgacgatttatttgatcaactgaaaggggctaaagtgttttctaagatagacctgcgctcaggctaccaccagttgagaatccgggaagaggatatcccgaagacggccttcaccactcggtacgggttatatgagtgcacggttatgtccttcggacttactaacgcgcctgcattcttcatgaatctgatgaacaaagtgttcatagaatttctggacaagtttgttgtggtattcatcgacgacatacttatctactcaaaatcgaagaagaacatgaacaacatctccgtctggtactcgagaagttgaaggagcaccagctatacgccaagttcagcaagtgtgatttctggttgacggaagtcaaatttctgggtcatgtcattacagctcagggtgtggcagtcgacccatcgaacgtggagtcagttaccaagtggaccccaccgaagactgtgtcgcagattcgaagttttctaggactggcaggttattaccgtcgattcatcggaaacttctccagaatcgcccgacccatgactcagttgcttaagaaagatgagaaatttaaatggacagcggagtgcgataagagctttgaggagctcaagaagaaattagtatccgcaccagttttgattctgcccgaccagatgaaagacttccaagtttattgcgatgcatcccgtcacggacttggatgtgtcctaatgcaagagggcagagtggttgcatatgcctcgcggcagttgcgtccacacgaaggaaattatccaactcatgacttggagttggcagcggtggttcatgctttgaagatctggaggcactatctgatcggcaaccgctgcgaagtatatacggaccataaaagtctgaaatacatcttcacccaaccggacctaaactttcgacaacgaagatggttggagctaatcaaagactatgacatgagtattcactaccacccgggtaaggccaatgtggtggcagacgctttaagccggaaaagttactgcactgctctatgcatcgagagcatgtgtgaggaattgcggcaggagtttgaacatctcaacataggaattgttgaacacgggttcgtagccgctctggaagcacggcctacgctcgtggatcagtcagagccgctcaagtaaatgatccggaaatagcagaactgaaaaagaacatgagagtcggaaaggctcgggatttccttaaggatgagcatggcacaatctggatgggagaaagattgtgtgtacctgacgacaaggaattgaaggatctgatactcaccgaggctcatcagacccagtactccattcacccaggcagcaccaaaatgtatcaagacctcaaagaaaagttttggtgggtcagcatgaggagagaaatagctgaattcgtcgcactctgcgatgtttgccaacgagtgaaggcagagcaccaaagacccacaggtttactccaacctcttcaaatcccggaatggaaatgggaagaaattggaatggactttataacgggactgccccggacatcgtcgggtcacgattcgatctgagtagtcgtggatcgactcactaaggttgctcacttcataccagtacataccacatatacgggcaaaaggttggcggagctttacctttcgagaatcatgtgcctacatggagtactcaaaaagattgtatctgaccgagggagtcagttcacctcaaaattctggcagaagctgcaggaagaattggggacccgtttaaatttcagcacggcctatcacccgcaaactgatggccagaccgagcgggtcaatcaaatcttggaagatatgttgagagcttgcgctcttgattttggtggagcttgggacaaaagcttgccatatgcggaattctcgtacaacaacagctaccaggccagtctacagatggcaccgtttgaagctttatacggccggaagtgccgcacacctctcttctgggatcagacaggcgaacgtcaactattcggaacagaagtattagcggaagcagaagagaaagtcagaatcatcagggaaaggttgaggattgctcagtctcgacagaagagctacgcggataaccgtcgaagggagctcacttttgaggcaggagatcacgtgtaccttcgcgtcactccgctccggggagtacaccgttttcagacgaaaggcaagttggcaccacgcttcgtgggaccatacaaaatcttggaacgaaggggagaagtggcttatcagctagaacttccatccaacatgatcggcatccatgacgtgttccacgtgtcccaactaaagaagtgcttaagggtacctgaagaacaggctgattcggaacacattgatatccaggaagacctaacttatgttgagaagccggttcgtatactggataccagcgaaaggagaaccagaaacaaggtcacccggttttgccgagttcagtggagtcatcattcggaagaggaagcaacctgggaaagggaagatgagttgaaagccgcccatccgcacctcttcaccagctcctccgaatctcggggccgagattccgtt

SEQ ID NO: 13826 - DNA, 3036 bp, Oryza sativa
  Clone ID: TFbOSC400772j.C1.o95.fg
atggaggcgaatgactggctccatgccatagagaagaagctgaatctcctgcagtgcaatgatcaggagaaggttgctttcgccacacaccagcttcaaggtcctgcgtcagcttggtgggacaatcacatggccacccgcccgccaggcactgaagtcacttgggaagagttctgtcgtagcttcaggaaggcgcagggcaacagaactgtgacggagtatctccatgagttcaatcacctcgcgcgatatgcaccggaggatgtccgcactgacgccgagaagcaggaaaaattcctagcaggtctggatgatgagctaaccaaccagttgatatctggagattacgccgatttcgaaaggctggtggacaaggcaatccgtcaggatgatcaacgcaacaagatggacaggaagaggaaggccgctcagttcagggcacctcagggaagtcaccagaggccgcgcttcgctcccgggcagcagggtggacctaccaccatgatcgtccgccagtaccgcccgttcaaccctagcaactttccccagggcgccagtggcagtcagaaccaccatggaggtcagcccaaccgcggtgcagctccacgcccaccaacggcaccggcacagtcaggcccgtccgcgcaagccaagagggagactggagcaaaaccagggtcctgcttcaactgtggcgagcttggccacttcgctgacaaatgcccgaagcctaggcgtgccgggccaaggtttatccaggctcgtgtcaaccacgcatctgcggaggaggcacaagcagcaccagaggtcgtactgggtacgtttcctgttaactcaatccctgcaacaatactttttgattctggtgcaacacattcgttcatttcaaagaagtttgtcgggatgcatgggttaaggaaagaagagcttagcacaccaatgagggttcatacctcgggaaatagctcaacctcagtcagttttagcccttcagtgctaatagaaatccaaagatcaccatttctagccaacctcattcttctcgaatccaaagacctagatgtcattcttgggatggattggctgaccaagtttaagggagtcatcgattgtgcgaatcgcacagtcaccttgaccaacgagaagggagaaacagcagtgtacaaatcaccagactcaccaaagcaaggggtctctttgaatcagattgaggcggaaatcccagtggacaccgtgaagaagaatttgaggaaattggaagatatacccatagtctgcgagtatccagaagtgttccccgaagaccttactaccatgccacccaagagagagattgaattccggattgacttggcaccgggaaccgctccaatttacaagagaccgtacagaatggcggccaacgaactagcagaggtcaagaagcaggttgatgagcagctgcagaaagggtacattcgaccaagtacttcaccttggggtgctccggtcatttttgtggagaaaaaggataagacgaagaggatgtgcgttgattatcgcgcactcaacgaggtcacaatcaagaacaaatatcctttgccgcgaatcgatgatttgtttgatcaactgaaaggagctaaagtgttttctaagatagacctgcgatcaggctaccaccagttgagaattcgggaagaggatattccaaagacggccttcaccactcggtacgggctatatgagtgcacggttatgtctttcggacttaccaacgcacccgcattcttcatgaatctgatgaacaaagtgttcatggaatttctggacaagtttgttgtggtattcatcgacgacatacttatctattcaaagtccgaagaagaacatgagcaacatctccgtctggtactcgagaagttgaaggagcaccagctatacgccaagttcagcaagtgtgacttctggttgacggaagtcaaatttctgggccatgtcattacagctcagggtgtggcagttgatccatcgaacgtagagtcagttaccaaatggatcccaccgaagaccgtgtcgcagattcgaagttttctaggactggcaggttattaccgccgattcatcgaaaacttctccaggatcgcccgacccatgactcagttgcttaagaaagatgagaagtttaaatggacagctgagtgcgataagagttttgaggagctcaagaagaaattagtatccgcaccagttttgattctgcccgaccagatgaaagacttccaagtctattgcgatgcatcccgtcacggacttggatgtgtcctaatgcaagagggcagagtggttgcgtatgcctcgcggcagttgcgtccacacgaagggaattatccaactcatgacctggaattggcagcagtggttcatgctttgaaaatctggaggcactatctgattggcaaccgctgcgaagtatatacagaccataagagtctgaaatacatcttcacccaaccggacctaaatctccgacaacgaagatggttggaactaatcaaagactatgacatgagcattcactaccacccgggtaaagccaatgtggtggcagacgcattaagcaggaaaagttactgcactgccctatgcatcgagggcatgtgtgaggaattgcggcaggagtttgagcatctcaacgtgggaattgttgaacacgggttcgtagccgctctggaggcacggcctacgctcgtggatcaagtcagagcagttcaagtaaatgattctgaaatagcagagctgaaaaagaacatgagagtcggaaaaacccgggatttccacgaagatgaacacggcacaatctggttgggagaaagattgtgtgtacctgacgacaaggaactgaaggatctgatactcaccgaggctcatcagacccagtactccattcatccaggcagcaccaaaatgtatcaagacctcaaagaaaagttttggtgggtcagcatgaggagagaaaagctgaattcgtcgcactctgcgatgtttgtcaacgagtga

SEQ ID NO: 13827 - DNA, 4995 bp, Oryza sativa
  Clone ID: TFbOSC400773j.C1.o38.fg
atggatgaagtcgggcgtcgatggacattctccagggcaaatgaaggctacacgggctgcggcccggcaattttcccggtcgcgacagacctgcacaaggcgaccaaggccttgaacgatgggaagctcatgaggatcgtcgctctgaaggacgaggtagcgcgcctgaagaaggagaatgctcagttgaagggccttccagcgccaggaggagtccggatccgcactacgccccgtaagaggacgactgcacctgtgcgcatccagcttgcgcccaggaacccacctccaccagcagctcccgcagcagctccagttccgcccgcagttcctgcagctccagctccagctcccgcgttcactctctccttcgctccagcatcagccgccagaggttcagccagtggtaccggaggttgcttgtttgggatggtctacaccaggactggtagccgcgcaacaggcgagggcagcaacggcgaagaacgcgctgatggtgtgcaccccaacggtgattctggcaatggtccgccaccacttcccgagaatccgacgcttgcccaagttatggcacatcagactcagatgatggcagccatgatgcagcagatgcagcagcagcaccagcagatgcatcagaggatgatgcagcacgccgaacagcagcaccagcagtttggtccccctcccccccagtccaagttgcctgagtttctacgtgtcaggccacccaccttctccagcaccaccaaccctatggaggtaaatgactggctccatgcgatagagaagaagctgaatctcctgcagtgcaatgatcaggagaaggtcgctttcgccacacaccaacttcagggtcctgcgtcagcttggtgggacaaccacatggccacccgcccaccgggtactgaagtcacatgggcagagttctgccgtagcttcaggaaggcacaggtgccagacggggtcgtggcacaaaagaagagggaattccgggcgctccatcagggcaacaggactgtgacagagtacctccatgagttcaatcgcctcgcgcgatatgcaccagaggatgtccgcaccgacgccgagaagcaggagaagttcatggcgggtctggatgatgagctgaccaaccaactgatatctggggactacgccgactttgagaggctggttgacaaggcaatccgccaggaggatcagcgcaacaaaatggacaggaaaagaaaggcggcgcagttccggtccaaccaaggtagtcagcaccgaccgcgcttcactcccggacagcagggtggacctaccaccatgatcgtccgccagcaccgcccgttcaactccagcaacttccaccagggcactagtggcagtcagaaccaccagggaggccagcccaaccgcggtgcagctccacgcccaccaatggcaccggcacagtcagcccagcccgcgcaagccaagaaggagacgggagcaaaaccagggtcctgcttcaactgtggcgagcttggccacttcgctgacaaatgcccgaagcccaggcgtgccgggccaaggtttatccaggctcgtgtcaaccacgcgtctgcggaggaggcacaagcagcaccagaggtcgtactgggtacgttccctgttaactcaatccctgcaacagtactttttgattctggtgcaacgcattctttcatttcaaagaaattcgtgggaatgtatgggctaaggaaagaagagcttagcacaccaatgagggttcgtaccccgggaaatagttcaacctcagtcagttttagcccttcagtgctaatagaaatccaaagatcaccatttctagccaacctcattcttctcgaatccaaagacctagatgtcattcttgggatggattggctgaccaagtttaagggggtcatcgattgtgcgagtcgcacagtcaccttgaccaacgagaagggagaaaccgtagtgtacaaatcaccaggctcaccaaagcaaggagtctccttgaatcaaattgaaacggaaatcccagtggacaccgtggggaagaacttgagaaaattggaagatatacccatagtctgcgagtatccggaagtgttccccgaagacctcactaccatgccacccaagagggagattgaattccggattgacttggcaccgggaaccgctccaatttacaagagaccatacaggatggcggccaacgaattagcagaggtcaagaagcaagttgatgaacagctgcagaaagggtacatacgaccaagcacttcaccttggggcgctccggtcatttttgtggagaaaaaggataagacgaagaggatgtgcgtcgactatcgcgcacttaacgaggtcacaatcaagaataaatatcccttaccgcgaatcgacgatttatttgatcaactgaaaggagctaaagtgttctctaagatagacctgcgatcaggctaccaccagctgagaatccgggaagaggatattccgaagacggccttcaccactcggtacgggctatatgagtgcacggttatgtctttcggacttaccaatgcacccgcattcttcatgaatctgatgaacaaagtgttcatggaatttttggacaagtttgttgtggtgttcatcgacgacattcttatctattcaaagtccgaagaggaacatgaacaacacctccgtctggtactcgagaagttgaaggagcaccagctatacgccaagttcagcaagtgtgacttctggttgacggaagtcaaatttctgggccatgtcattacagcccagggtgtggcagttgatccatcgaacgtggagtcagttacaaaatggaccccaccaaagaccgtgtcgcagattcggagttttctaggactggcaggttattaccgccgattcatcgaaaatttctccagaatcgcccgacccatgactcagttgcttaagaaagatgagaagtttaaatggacagctgagtgcgataagagctttgaggagctcaaaaagaaattagtatccgcaccagtattgattctgcccgacccgacgaaagacttccaagtctattgtgatgcatcccgtcacggacttggatgtgtcctaatgcaagagggcagagtggttgcgtatgcctcgcggcagttgcgtccacacgaaggaaattatccaactcatgacttggaattggcagcagtggttcatgctttgaagatctggaggcattatctgattggaaaccgctgcgaagtatatacggaccataagagtctgaaatacatcttcacccaaccggatctaaaccttcgacaacgaagatggttggaactaatcaaagactatgacttgagtgttcactaccacccgggtaaagccaatgtggtggcagacgctttaagccggaaaagttactgcactgccctatgcatcgagggcatgtgtgaggaattgcggcaggaatttgaacatctcaacatgggaattgttgaacacgggtttgtagccgctttggaggcacggcctacgctcgtggatcaagtcagagccgctcaagtaaatgatccggaaatagcagaactgaaaaagaacatgagagtcggaaaggctcgggatttccatgaagatgagcatggcacaatctggatgggagaaagattgtgtgtacctgacgacaaagaactgaaggatctgatactcaccgaggctcatcagacccagtactccattcacccaggcagcaccaaaatgtatcaagacctcaaggaaaaattttggtgggtcagcatgaggagagaaatagctgaattcgtcgcactctgcgatgtttgccaacgagtgaaagcagagcaccaaagaccagcaggtttactccaacctcttcaaatcccggaatggaaatgggaggagattggaatggactttataacaggactgccccggacatcatcgggacatgattcaatctgggtagtcgtggatcgacttaccaaggtggctcactttataccagtacataccacctatacgggaaagagattggcagaattgtacctcgcaaggatcatgtgtttgcatggggtacccaagaagatagtatccgaccgaggtagtcagttcacctcaaagttctggcagaagctgcaggaagaaatggggacccgtttaaatttcagcacggcctatcacccgcaaactgatggtcagacagagcgagtcaatcaaatcttggaagatatgttgagagcttgcgctcttgattttggtggagcttgggacaaaagcttaccatatgcggaattctcgtataacaacagctaccaggccagtctacagatggcaccgtttgaagctctatacggccggaagtgccgcacacctctcttctgggatcagacaggcgaacgtcagctgttcggaacagaagtattagcggaagcagaagagaaagtcagaatcatcagggagagattgaggattgctcagtctcgacagaagagctacgcggataaccgtcgaagggagctaacttttgaggccggagattacgtgtatcttcgtgtcaccccgctccggggagtacaccgctttcagacaaaaggcaagttggcaccacgcttcgtgggaccgtacaaaattttggaacgaaggggagaagttgcctatcagctagaacttccatccactatgatcggcatccatgacgtgttccatgtgtcccaattaaagaagtgtttaagggtacctgaagaacaggctaattcggaacacattgatatccaagaggacctaacatatgtggagaagccggttcgcatacttgacactagcgaaaggagaaccagaaacaaggtcaccaggttttgccgtgttcagtggagtcatcattcagaagaggaagcaacctgggaaagggaagatgagttgaaggccgcccatccgtacctcttcaccagctccaccgaatctcggggccgagattccgtttaa

SEQ ID NO: 13828 - DNA, 4251 bp, Oryza sativa
  Clone ID: TFbOSC400775j.C1.o53.fg
atggtctacaccaggaatggtagccgcgcgacaggcgagggcagcaacggcgaagagcgcactgatggggcgcatccccacagcgattctggcaatggtccgccaccacttcccgagaatccgacgctagcccaagtaatggcacatcagacccagatgatggcagccatgatgcagcagatgcagcagcagcaccagcagatgcaccagcggatgctgcagcacgccgaacagcagcatcaacagtttggtccccctccccctcagtccaagttgccagagttcctacgtgtcaggccacccaccttctccagcaccaccaaccctatggaggcgaatgattggctccatgccatagagaagaagctgaatctcctgcagtgcaatgatcaggagaaggttgctttcgccacacaccagcttcaaggtcctgcgttagcttggtgggataaccacatggccacccgcccaccaggtactgaagtcacttgggcagagttctgccgtagcttcaggaaggcgcaggtgccagatggggtcgtggcacaaaagaagagggaattccgggcgctccatcagggcaacaggactgtgacggaatacctccataagttcaatcgcctcgcgcgatatgcaccagaggatgtccgcaccgacgccgagaagcaggaaaagttcatggcgggtctggatgacgagctgaccaaccaactgatatctggggactacgctgactttgagaggctggtggacaaggcaatccgtcaggaggatcaacgcaacaagatggacaggaagaggaaggccgcacagttcagggcacctcagggaagtcaccagaggccgcgcttcactcccggacagcagggtggacctaccaccatgatcgtccgccagcaccgcccgttcaaccctagcaacttcccccagggcgccagtggcagtcagaaccaccatggaggtcagtccaaccgcggtgcagctccacgcccaccaatggcaccggcacaatcaggcccgcccgcgcaagccaagaaggagactggagcaaaaccagggtcctgcttcaactgtggcgagcttggccacttcgctgacaaatgtccgaagcctaggcgtgccgggccaaggtttatccaggctcgtgttaaccacgcatctgcggaggaggcacaagcagcaccagaggtcgtactgggtacgttccttgttaactcaatcccttcaacagtactttttgattctggtgcaatgcattctttcatttcaaagaaatttgtcgggatgcatgggttaataagagaggaacttagcacaccaatgcgggttcataccccagggaatagctccacttcggttcaattcagcccttctataacaatagaaatccaaagatcaccatttctagccaacctcattcttctcgaatccaaagacctagatgtcattcttgggatggattggctgaccaagtttaagggagtcatcgattgtgtgaatcgcacagtcaccttgaccaacgagaagggagaaaccgtggtgtacaaatcaccagactcaccaaagcaaggggtctctttgaatcagattgagacggaaatcccagtggacaccgtggagaaaaacttgaggaaattggaagatatacccatagtctgcgagtatccagaagtgtttcccgaagacctcactaccatgccacccaagagagagattgaattccggattgacttggcaccgggaaccgctccaatttacaagagaccgtatagaatggcggccaacgaattagccgaggtcaagaagcaggttgatgagcagctgcagaaagggtacattcgaccaagtacttcaccttggggtgctccggtcatttttgtggagaaaaaggataagacgaagaggatgtgcgttgattatcgcgccctcaacgaggtcacaatcaagaacaaatatcccttgccgcgaatcgacgatttatttgatcaactgaaaggagctaaagtgttttctaagatagacctgcgatcaggctaccaccagttgagaattcgggaagaggatattccgaagacggccttcaccacttggtacgggctatatgagtgcacggttatgtctttcggacttaccaacgcacccgcattcttcatgaatctgatgaacaaagtgttcatggaatttcttgacaagtttgttgtggtgttcatcgacgacattcttatctactcaaaatccgaagaagaacatgagcaacatctccgtttggtactcgagaagttgaaggagcaccagctatacgccaagttcagcaagtgtgacttctggttgacggaagtcaaatttctgggccatgtcattacaactcagggtgtggcagttgatccgtcgaacgtagagtcagttaccaaatggaccccaccaaagaccgtgtcgcagattcgaagttttctagggctggcaggttattaccgccgattcatcgaaaacttctccagaatcgcccgacccatgactcagttgcttaagaaagatgagaagtttaaatggacagctgagtgcgataagagtttcgaggagctcaaaaagaaattagtatccgcaccagttttgattctgcccgaccagatgaaagacttccaagtctattgcgatgcgtcccgtcacggacttggatatgtcctaatgcaagagggcagagtggttgcgtatgccttgcggcagttgcgtccacacgaagggaattatccaactcatgacctggaattggcagcagtggcacggcctacgctcgtggatcaagtcagagcagctcaagtaaatgattctgaaatagcagagctgaaaaagaacatgagagtcggaaaagcccgggatttccacgaagatgagcatggcacaatctggttgggagaaagattgtgtgtacctgacgacaaggaactgaaggatctgatactcaccgaggctcatcagacccagtactccattcatccaggcagcactaaaatgtatcaagacctcaaagaaaagttttggtgggtcagcatgaggagagaaatagctgaattcgtcgcactctgcgatgtttgccaacgagtgaaggcagagcaccaaagaccagcaggtttactccaacctcttcaaatcccggaatggaaatgggaggagattggaatggactttataacgggactgccccggacatcgtcgggtcacgattcgatctgggtagtcgtggatcgactcactaaggttgctcacttcatactagtacataccacgtatacgggcaaaaggttggcggagctttacctttcgagaatcatgtgcctacatggagtacccaaaaagattgtatctgaccgagggagtcagttcacctcaaaattctggcagaagctgcaggaagaattggggacccgtttaaatttcagcacggcctatcacccgcaaactgatggtcagaccgagcgagtcaatcaaatcttggaagacatgttgagagcttgcgctcttgattttggtggagcttgggacaaaagcttgccatatgcggaattctcgtacaacaacagctaccaggccagtctacagaaggcaccgtttgaagctttatacggccggaagtgccgcacacctctcttctgggatcagacaggcgagcgtcaactgttcggaacagaggtattagcggaagcagaagagaaagttagaatcatcagggaaaggttgaggattgcccagtctcgacagaagagctacgcggataaccgtcgaagggagctcacttttgaggcaggagattacgtgtatcttcgtgtcactccgctccggggagtacaccgttttcagatgaaaggcaagttggcaccacgcttcgtgggaccatacaaaatcctggaacgaaggggggaagttgcttatcagttagaacttccatccaatatgatcggcatccatgacgtgttccacgtgtcccaattaaagaagtgcttaagagtacctgaagaacaggctgattcggaacacattgatatccaggaggacctaacatacgtggaaaagccggttcgtatacttgataccagtgaaaggagaaccagaaacaaggtcacccgattttgccgagttcagtggagtcatcattcagaagaggaagcaacctgggaaagggaagatgagttgaaagccgcccatccgcacctcttcaccagctcctccgaatctcggggccgatattccgtttaa

SEQ ID NO: 13829 - DNA, 4236 bp, Oryza sativa
  Clone ID: TFbOSC400798j.C1.o32.fg
atggctcaaggaaaaatgataggacttgcaggcaagcttcggcgagtttcagcaaaaacagaaaaaccgaactggcagataagctcaacggagcgcatcaacacgaaaataggcacacctccaagttacagctcaatcggagttgatatgtggcctatggaattttctgaaaccactataaacaagattgtgggcttgacgcacgctgcgttcgtgcggagtctgttggagccgtgcgcgagcctgcggcgatcgccggggttcctgatgtcgctaccaacgccgcgcgtctcccactcaccgccgtgtcatcgctggcgtttgccgtctccgcgccgtggccgtcatggcggccgcggccaagtcgtggtgcatcgcgtcgtccgtgaggtgaccacgagcagcgtcgtctacccgacactcacccgcacaaattaccaagactgggtgctggtaatgcgggtgaacatgcaggcccaaggtctgtggggagcggtggagccggagggtgatgatcttgttgactaccggcaggaccggcaggcgctcaccgcgatacttcgcgccgtgcccgccgagatgctcgccacgctcgctgtcaaggagacggtgcaggaggcatgggaagcgatcaagactcgccgtatcggtgtgcagcacgtgcgtgaggcgaatgcacaacagctgcgccgagaattcggtgatatcatcttcaaggacggtgaaaccgtcgacgacttctcgatgcggatcggcgtcctcgccaacaaccttcgcaccttaggtgataatatcactgatgctgaggtcgttcagaaattgttgcaggttgtcccagaacatctccagcaaatagccatctcgattgagaccttgctcgacgtcaatgagctgtctctcgaggaagttactgggagtctgcgctccgtcgagcaacgcaagcagcgcaaggctgtggctgcatcgagtcgggtcgatgcatacggctgtctcctcttcaccgaggaagaatggctggcgaaattccgtaaggcagcctctctccaagacgccgctcactcctcctccggcggcaacagcgaccgccagggtcaagggcgtgggaataaggacgatggagcctcgaaggagacccagcccaagccagccaacctgggaggccgtaacccgggaaattgcaagaattgtggcaagaggggacattgggctaaagactgtcgcagcaagcccaaggctcagcaggcttacgtggcccaggaggaggacgacgagcctgctctgctcctggccaaggtggagctggatccaccgcgtcctcgtgtcgtcgcaccggcaaaccccgtctcgccaccgagcgcgccaagaacgccgtcgccgacaagcgagctcgctgtagttaaggcaaaagtcttcacgcagctcgacgatggtggcgagcactatccggcgacgtggatcctggataccggcgcaaccaactatatgaccgggtcccgctccgctttcgccgagctcgacacggcggtctccggcacagtcaagtttggcgacggctcggtggttcacattgagggccacggcaccgtcctgttctcctgcaggtctagggaacaccgcggcatcaccgggatctactacatcccgtggctcacggtgaacattgtcagccttggacagctggatcattctggcagcaacctggacatcgaccgtccggtctgcctcgcggcaaggagcgccgagccggcgtggcggtggcatgctaggtacggccacctcaactttcctgctctccgcaagctcgtgcaacaggaaatggttcgtgggctgccgctgctgcaacaagtaactcaagtctgcgacggctgtctgctcgggaagcagcggcgagcggcgttcccggcgcagtccaagtactgcaccaacgaacacctcgtgctcgtccacggcgatctctgtaggccgatcgaacctgcaacgccggctggtaatcgctattttttgttgcttgttgatgacatgagccgctatatgtggctaaccttgatcaggagcaaggatgaggccgcgaacgccatcaagcactttcaggcccgtgcagtggtggagaccgggcgcaaactccatgcgctgcgcacggatcgtggcggcgaatttacctcaatcgaattcggggaatactacgccaatcttggagttggccggaagttgacggtgccctactctccgcagcagaacggagtagtggagcgtcgaaaccaaaccatcgtcgccactgcccgcagcatgatgaaggcgaagggtgttcctgggcggttctggggtgaggccatgtccacaacggtctttctcttgaatcgttctccaaagaaaagcttggacaaccagacgccctatgaggcatggtatggccaacggcctgctgtgcatttcctgcgcactttcgggtgcatggggcatgtcaagatcaccaagcctgggctaaagaaactcaacgaccggagtgtgccaatggtgctcctcggctatgaggaaggctcgaaggcctaccggctctatgatccggattccatcctggacgccgacacagatgacgacgtcgtgcctcgctaccgcctggtggataacctgctgggggatgcctcgctgcccagacagactccgcaggtgctggaacagctcgagctctatgctgtgagcgccgacgaacctgcctcgctggctgaggcagaggcagatccaaattggcgtggcgccatgcaagacgagcttgacgcaatcgtcgacaatgacacttggtcgctgactgacctaccccatggccaccgtgcaatcgggctaaaatgggtctacaagctgaaacgcgacgaacagggggcgatcgtgcgctacaaggcgcgcctcgccgctaaggggtacgtccagcgacaagggggtggacttcgacgaggtcttcacacctgtcgcccggctggaatcgattggcaagtccaccacatggacgtcaagtcagcattcctcaatggcaagctgctcgaggaagtttatgtctcacagccgccgggtttcgtcgacgacaaccacaagaacaaggtgtatcgtctgcacaaagctctttacggcttgcgccaggcgcctcgcgcgtggaatgccaaacttgatagctccttgctgtcatttggctttcaccgcagcagctccgagcatggtgtgtacacacgcaccaggggaggaagacgactgaccgtgggcgtctacgtcaacgacctcatcatcaccggcgatcacgacgacgagattcgtagcttcaagggagagatgatgaaactcttcaagatgagtgatttggggcactcagatactacctcggcatcaaggttaccctggacagtgatgggatcacgctggggcaagctgcatatgccggcaagattcttgagagggcaggactcaaggactacaatccctgtcagactcccatggaggcactcgctgctgggggattcgttttggcccaggtgcacagggcacttcaagaaagctgttgtctattctgacagtgatttggctggtgatctagatgagcaaaagagtacatcaggccagattttcttcgtcaatggcgggccggtcacttggcaatcttccaagcagaaggtggtggcattgtcctcttgtgaggcagagtacatcgccgtagctgccgcgacatgtcaaagcgtatggctcgcgtggctgttagcggaggtgatgggcgacgaggtcgccgcaccgctgctgaaggtggacaatcagtccacaatctcattgatcaaaaacccagtgcatcacgaccggagtaagcatatcgatgtcaaataccattatatccgggagtgtgcagaaaagaagctgattgaggtgatgtccgtgggaactgcggagcagcttggggatatattcaccaaatctctgggcagaaccaggtttcaggagcttcgctcgaagatcgagtctgttggagtcgtgcgctgtatgctccagtgtcgcgaccgggaaaatttccttttcccgaacgctagtgtattaatccccgtcccaggaaaagccgggactgagccacaaactaagccttacccactagacatgtggaagtacggtagtgctttgcaacagaggcccgaagaccggtccttatatggccgaggtgctactatcaaaaccatgcaccccgagcccagcctaaaaccattttag

SEQ ID NO: 13830 - DNA, 4350 bp, Oryza sativa
  Clone ID: TFbOSC400800j.C1.o73.fg
atgtcgttaccaacgccgcgcgtctcccactcaccaccgcgtcgtcgctggcgctcgccgtctccgcgccgtggccgtcatggcggccgcggccaagtcgtggtggaacgcgtcgtccgcgaggcgaccacgagcagcgtcgtctacccgacactcacccgcacaaattaccaagattgggcgctggtaatgcgggtgaacatgcaagcccaatgtctgtggggcgcggtggagccggagggcgatgatctcgtcgactaccggcaggaccagcaggcgctcgccgcgatacttcgcgccgtgcccgccgagatgctcgccacgctcgctgtcaaggagacggcgcaggaggcgtgggaagcgatcaagactcgccgtatcggtgtgcagcgcgtgcgtgaggcgaatgcacagcagctgcgccgagaattcggtgatatcctcttcaaggacgatgaaaccgtcgacgacttctcgatgcggatcggcggcctcgccaacaaccttcgcaccttaggtgataatatcactgaagctgaggtcgttcagaaattgttgcaggttgtcccagaacatctccagcaaatagccatctcgattgagaccttgctcgacgtcaatgagctgtctctcgaggaggttactgggcgtctgcgctccgtcgagcaacgcaagcagtgcaagactgcggcggcatcgagtcgggtcgacgccaatggccgtctcctcttcaccgaggaagaatggctggcgaaattccgcaaggcggcctctctgcaagacgccgctcactcctccagcggcaacggcgaccgccggggtcgagggcgtgggaagaaggacgatggagccccgaaggaggcccagcccaagccagccaacccgggaggccgtaacccgggaaattgcaagaattgcggcaagaggggacattgggccaaagactgtcgcagcaagcccaaggcccagcaagcttacgtagcccaggaggaggacgaagagcctgctctgctcctggccaaggtgcagctggatccgccgcgtcctcgcgtcgctgcaccgacaaacgtcgtctcgccaccgagcgcgccgagggcgccgtcgccgattggcgaacttgccgtggtcgaggccaaggtcttcgcgcagctagacgacggtggcgaacatgatccggcgatgtggatcctggatactggcgcaaccaaccatatgaccgggtcccgctccgctttcgccgagctcgacacggcggtcaccggcactgtcaggtttggcgacggctcggtggttcgcatcgagggccgcgtcaccgtcctgttctcctgcaggttcggggaacaccgcggcatcgccggggtctactacatcccgcggctcacggcgaacatcgtcagccttggacagctggatcgttccggcagcaaggtactgattcatcacggcatcctgcacgtgtgggatcctcgagggcacctactcgtccgtgtccgacgctccgacgactgcctctacaccatcaagctggacatcgaccgtccggtctgcctcgcggcaaggagcgccgagccggcgtggcggtggcacgccaggtacggccacctcaactttcctgctctccgcaagctcgcgcaacaggaaatggttcgtgggctgccgctgctacaacaagtcactcaagtctgcgatggctgtttgctcgggaagcagcggcgagcggcgttcccgacgcagtccaagtaccgcgctgacgaacatctggagctcgtccacggcgatctctgtgggccgatcgaacctgcaacgccggctggtaatcggtattttttgttgcttgtcgatgacatgagccgctatatgtggctaaccatgattaggagcaaggatgaggccgcgaacgccatcaagcactttcaggcccgtgcagaggtggagtccgggcgcaaactccgtgcactgcgcatggatcgtggaagcgaattcacctcaatcgaatttggggaatactgcgccaatctcggagttggtcggcagttgacggcgccctactccccgcagcagaacggagtagtggagcgtcgaaaccaaaccatcgtcgccactgcccgcagcatgatgaaggcgaagggtgttcctgggcggttctggggagaggccatgtccacagcggtctttctcttgaatcgttcgccgacgaaaagcttggacaaccagacgccctatgaagcatggtatggccaatggcccgctgtgcatttcctgcgcactttcgggtgcgtggggcacgtcaagatcaccaagcccgggctgaagaaactcgatgaccggagtgcgccaatggtgctcctcggctacgagcaaggctcgaaggcctaccggctctatgatccagtcagcgagcgcgtccatgtgtctagggacgtggtgtttgatgaagacatcgcctgggactggggaccagtgacgcctgatggtgctccccagctcgagccgttcaccgtcgaacaggtggtgacgaccaccatcgggacggcacctgcttcgtcgccgactccaccctcgccaccatcgccggctccgtcggcccccacgacaccggcacctccgtcgcctccgtcgccggaggcggttgagtttgtcacgccgcctacccaagattccatcctggacgccgacgcagatgacgacgtcgtgcctcgctaccgcctggtggataacctgctggggaatgcctcaccgcccggacacgctccgcgggtgctggaacagctcgagctccatgttgtgagcgccgacgaacctgcttcactggctgaggctgaggcggatccaagctggcgtggcgccatgcaagacgagcttaacgcgatcgtcgacaacgacacttggtcgctcactgacctaccccatggccaccgtgcaattgggctaaaatgggtctacaagctgaaacgtgacgaacagggggcgatcgtgcgctacaaggcgcgcctcgtcgctaaggggtacgtccagcgacagggggtggacttcgacgaggtcttcgcacttgtcgcccggctggaatcggtgcgcctccttctcgccgtcgccgcgcaccaagggtggcaagtccaccacatggacgtcaagtcggcattcctcaacggcgagctgctcgaggaagtttatgtctcgcagccgccgggttttgtcgacgacaaccacaagaacaaggtgtatcgcctacacaaagctctttacggcttgcgccaggcgcctcgcgcgtggaatgccaaacttgatagctccttgctgtcactcggctttcaccgcagcagctccgagcatggtgtgtacacacgcaccaggggaggaagacgactgatggtgggcgtctacgtcgatgacctcatcatcaccggcgatcacgacgacgagatccgcagcttcaagggagagatgatgaagctcttcaagatgagtgatttgggggcactcagatactacctcggcatcgaggttacccaggacagtgatgggatcacgctggggcaagccgcatatgccggcaagattcttgagaaggcaggactcaaggactgcaatccctgtcagactcctatggaggtacgtttgaaattgagaaagggttcagattttccgcttgtggatgctacactgtatcgcagcttggttgggagtctgcgctatctcgtcaacacgcgacccgacctggcattctctgttgggtatgtcagtcgcttcatggagtcacccagggaagatcatctcgctgccgttcggcgcatactgcgctatgtggcaggcactcgctgctggggaattcgatttggcccaggtgcacggtgcgctttgccaatgctggttggttactctgacagtgatctggctggcgatccagatgagcgaaagagcacgtccggccagattttcttcatcaatggcgggcctgtcacttggcagtcctccaagcagaaggtggtggcattgtcttcctgtgaggccgagtacatcgccgcagccgccgcaacatgtcaaggagtatggctcgcgcggctgttagcggaggtgctgggcgacgagatcaccgcaccgctgctgaaggtggacaaccagtccacaatatcattgataaaaaatccagtgcatcatgaccggagtaagcatatcgatgtcaaatatcattatatccgggagtgtgcagaaaagaaactgatcgaaatgatgttcgtgggaactgcggagcagctcggtgatatattcaccaaatctctgggcagaaccaggtttcaggagcttcgttcaaagatcggtgtctgttctcttgacaagagcagtcagacttaa

SEQ ID NO: 13831 - DNA, 4686 bp, Oryza sativa
  Clone ID: TFbOSC400992j.C1.o25.fg
atggcggcggcgagcagagcacggcggtggagcctcgccggcaagacggcgctcgtcaccggcggcaccaagggcatcgggcgcgcgatcgtggaggagctcgccgggttcggggtgagggtgcacacgtgttcacgccacgacgccgacctgcaggactgcctccgccggtggaacgccgccggcgaaggtggcggcgcggcggcgctcgtcacggggtccgtctgcgacgtgtccgtgcgcggcgacagggaggcgctggtggccgcggcgcgcgccgcgctcggcgggcggctcgacatgctcgtcaacaacgccggccaggtggtcgtcggcccggccgcggagaccgcgccggaggagtacgcgcgcctcatggccaccaacctcgagtcctgcttccacctcgcccagctcgcgcaccatctcctccgcgacgcggcggcgggcggcggcgccgccgcgagcgtggtgaacatctcctccaccgcggcgttctacgccgcgccgcacctggcggtgtactcggcgaccaagggcggcatgaaccagctcacccggtgcctcgccgccgagtgggcgcgcgacggcgtgcgcgtcaacgccgtcgcgccgggggccacccgcaccgacatctgcgacaccagcggcgtggcgctgggcgagaagacgaggcgcaggctggcggacgccggcgccatggaccgcgtccccatccgccgcatcggcgagcccgaggaggtcgccgccgccgtcgtcttcctctgcatgccggccgcctcctacatcaccggccaggcccaaggtctgtggggcgcggtggagccggagggcgatgatctcgtcgactaccggcaggaccggcaggcgctcgccgcgatacttcgcgccgtgcccgccgagatgctcgccacgcttgctgtcaaggagacggcgcaggaggcgtgggaagcgatcaagactcgccgtatcggtgtgcagcgcgtgcgtgaggcgaatgcacagcagctggccgagaattcggtgatatcctcttcaaggacggttgtcccagaacatctccagcaaatagccatctcgattgagaccttgctcgacgtcaatgagctgtctctcgaggaggttactgggcgtctgcgctccgtcgagcaacgcaagcagcgcaagactgcggcggcatcgagtcgggtcgatgccaatggccgtctcctcttcaccgaggaagaatggctggcgaaattccgcaaggcggcctctctgcaagacgccgctcactcctccggcggcaacggcgaccgccggggtcgagggcgtgggaagaaggacgatggagccccgaaggaggcccagcccaagccagccaacccgggaggccgtaacctgggaaattgcaagaattgcggcaagaggggacattgggccaaagactgtcgcagcaagcccaaggcccagcaagcttacgtagcccaggaggaggacgaagagcctgctctgctcctggccaaggtgcagctggatccgccgcgtcctcgcgtcgctgcaccgacaaacgtcgtctcgccaccgagcgcgccgagggcgctgtcgccgatgggcgaactcgccgtggtcgaggccaaggtcttcgcgcagctagacggcggtggcgaacatgatccggcgatgtggatcctggatactggcgcaaccaaccatatgaccgggtcccgctccgctttcgccgagctcgacacggcggtcaccggcactgtcaggtttggcgacggctcggtggttcgcatcgagggccgcggcaccatcctgttctcctgcaggttcggggaacaccgcggcatcgccggggtctactacatcccgcggctcacggcgaacatcgtcagccttggacagctggatcgttccggcagcaaggtactgattcatcacggcgtcctgcgcgtgtgggatcctcgagggcacctactcgtccgtgtccgacgctccgacgactgcctctacaccatcaagctggacatcgaccgtccggtctgcctcgcggcaaggagcgccgagccggcgtggcggtggcacgccaggtacgaccacctcaactttcctactctccgcaagctcgcgcaacaggaaatggttcgtgggctgccgctgctgcaacaagtcactcaagtctgcgatggctgtttgctcaggaagcagcggcgagcggcgttcccgacgcagtccaagtaccgcgctgacgaacacctggagctcgtccacggcgatctctgtgggccgatcgaacctgcaacgccggctggtaatcggtattttttgttgcttgtcgatgacatgagccgctatatgtggctaaccttgatcaggagcaaggatgagtccgcgaacgccatcaagcactttcaggcccgtgcagaggtggagtccgggcgcaaactccgtgcactgcgcacggatcgtggcggcgaattcacctcaatcgaatttggggaatactgcgccaatctcggagttggtcggcagttgacggcgccctactccccgcagcagaacggagtagtggagcgtcgaaaccaaaccatcatcgccactgcccgcagcatgatgaaggcgaagggtgttcctgggcggttctggggagaggccatgtccacagcggtctttctcttgaatcgttcgccgacgaaaagcttggacaaccagacgccctatgaagcatggtatggccaacggcccgctgtgcatttcctgcgcactttcgggtgcgtggggcacgtcaagatcaccaagcctgggctgaagaaactcgatgaccggagtgcgccaatggtgctcctcggctacgagcaaggctcgaaggcctaccggctctatgatccagtcagcgagcgcgtccatgtgtccagggacgtggtgtttgatgaagacgccgcctgggactggggaccagtggtgacgaccaccatcgggacggcacctgcttcgtcgccgactccgccctcgccaccatcgccggctccgtcggcccccacgacgccggcacctccgtcacctccgtcgccggaggcggttgagtttgtcacgccgcctacccaggattccatcctggacgtcgacgcagatgacgacgtcgtgcctcgctaccgcctggtggataacctgctggggaatgcctcaccgcccggacacgctccgcgggtgctggaacagctcgagctccatgttgtgagcgccaacgaacctgcttcactggctgaggctgaggcggatccaaactggcgtggcgccatgcaagatgagcttaacgcgatcgtcgacaacgacacttggtcgctcactgacctaccccatggccaccgtgcaattgggctaaaatgggtctacaagctgaaacgtgacgaacagggggcgatcgtgcgctacaaggcgcgcctcgtcgctaaggggtacgtccagcgacagggggtggacttcgacgaggtcttcgcacctgtcgcccggctggaatcggtgcgcctccttctcgtcgtcgccgtgcaccaagggtggcaagtccaccacatggacgtcaagtcggcattcctcaacggcgagctgctcgaggaagtttatgtctcgcagccgccgggtttcgtcgacgacaaccacaagaacaaggtgtatcgcctgcacaaagctctttacggcttgcgccaggcgcctcgcgcgtggaatgccaaatttgatagctccttgctgtcactcggctttcaccgcagcagctccgagcatggtgtgtacacacgcaccaggggaggaagacgactgacggtgggcgtctacgtcgatgacctcatcatcaccggcgatcatgacgacgagatccgcagcttcaagggagagatgatgaagctcttcaagatgagtgatttgggggcactcagatactacctcggcatcgaggttacccaggacagtgatgggatcacgctggggcaagccgcatatgccagcaagattcttgagaaggcaggactcaaggactgcaatccctgtcagactcccatggagcttggttgggagtctgcgctatctcgtcaacacgcgacccgacctggcattctctgttgggtatgtcagtcgcttcatggagtcacccagggaagaccatcttgctgtcgttcgacgcatactgcgctatgtggtgcacggtgcgctttgccaatgctggttggttactctgagagtgatctggctggcgatccagatgagcgaaagagcacgtccggccagattttcttcatcaatggcgggcctgtcacttggcagtcctccaagcagaaggtggtggcattgtcctcctgtgaggccgagtacatcgccgcagccgccgcaacatgtcaaggagtatggctcgcgcggctgttagcggaggtgctgggcgacgagatcgccacaccgctgctgaaggtggacaaccagtccacaatatcattgataaaaaatccagtgcatcatgaccggagtaagcatatcgatgtcaaatatcattatatccgggagtgtgcagaaaagaaactgatcgaaatgatgttcgtgggaactgcggagcagctcggtgatatattcaccaaatctctgggcagaaccaggtttcaggagcttcgttcaaagatcggtgtctgttctcttgacaagagcagtcagacttaa

SEQ ID NO: 13832 - DNA, 5196 bp, Oryza sativa
  Clone ID: TFbOSC401018j.C1.o15.fg
atgggttgcaagatggctggccacccacccaaccaccgcggagaaggcatgatcgactttgtggcagagctggcacgcatgacactggtggtgggctaccccaacgcgccggagtacacgactattccgccgctcagtggcgagcttcctcaccgtgtccgcttggaggtccaaggttacgtggggacttgcctcgctaacatggcagttgaggcgtcaggtggcacagcagatcacgcctgtcaggaggcagcctacttgatgatggccagactacgagagcgccacaactacatcttccacgacacggcgtaccgctaccacccccgtcgagccaacggtgatggcgtcagctccttccgtccgacagctggcgagaacgacaccacctttggtcacatgtgtgctgtgatgaggggattggacaggatgcactcggacctgcacaaggcgaccaaggccttgaacgatgggaagctcatgaggatcgtcgctctgaaggacgagatagcgcgcctgaagaaggacaacgctcagctaaagggtcttccagcgccaggaggagtccggatccgcactacgccccgcaagactacgacggcacccgtgcgcatccagcttgcgcccaggaacccacctccagcagcagctcccgcagcacctccagttccgcccgcagttcctgcagctcaagctccagctcccgcgtccgctctctccttcgctccagcatcagccgccagaggtccagccagtggcaccggaggttgcttgtttgggatggtccacaccaggactggtagccgcgcaacaggcgagggcagcaacggcgaagaacgcgctaatggtgtgcaccccagcagtgattccggcaatggtccgccaccacttcccgagaatctgacgctagcccaagttatggcacatcagactcagatgatggcagccatgatgcagcagatgcagcagcagcaccagcagatgcaccagaggatgatgcagcacgccgaacagcagcaccagcagtttggtccccctccccctcagtccaagttgcctgagttcctacgtgtcaggccacccaccttctccagcaccaccaatcctatagaggcaaatgactggctccatgcgatagagaagaagctgaacctcctgcagtgcaatgatcaggagaaggtcgctttcgccacacaccagcttcagggtcctgcgtcagcctggtgggataatcacatggccacccgcccaccgggtactgaagtcacttgggcagagttctgccgtagcttcaggaaggcacaggtgccagatggggtcgtggcacaaaagaagagggaatttcgtgcactccatcagggcaacaggactgtgacagagtacctccacgagttcaatcgcctcgcgcgatatgcaccagaggatgtccgcaccgacgccgagaagcaggagaagttcatggcgggtttggatgatgagttgaccaaccaactgatatccggggactacgctgactttgagaggctgcaccgcccgttcaactccagcaacttccaccagggctctagtggcagtcagaaccaccatggaggtcagcccaaccgcggtgcagctccacgcccacccatggcaccggcacagtcaggcccgcccgcgcaagccaagaaggagacgggagcaaaaccagggtcctgcttcaactgtggtgaacttggccacttcgctgacaaatgcccgaagcccaggcgtgccgggccaaggtttatccaggctcgtgtcaaccacgcgtctgcagaggaggcacaaacagcaccggaggtcgtactgggtacgttccctgttaactcaatccctgcaacagtactttttgattctggtgcaacgcattctttcatttcaaagaaatttgtggggatgtatgggttaaggaaagaagagcttagcacaccaatgagggttcataccccgggaaatagttcaacctcagtcagttttagcccttcagtgctaatagaaatccaaagattaccatttctagccaacctcattcttcttgaatccaaagacctagatgtcattcttgggatggattggctgactaagttcaacggagtcatcgattgtgcgaatcgcacagtcaccttgaccaacgagaagggagaaacggtagtgtacaaatcactagccccgccaaagcaaggggtctccttgaaccagatcgagatggaagtcccagtggtcaccgaggagaagaatttgaagaaattggaagacatacccatagtctccgagtatccagaagtgttccctgaagacctcactaccatgccacccaagagggagattgaattccggattgacttggcaccgggaaccgctcccatttacaagagaccgtacagaatggcggccaacgaattagccgaggtcaagaagcaggttgatgagcagctgcagaaagggtacatccgaccaagtacttcaccttggggtgctccggtcatttttgtggagaaaaaggataagacgaagagaatgtgcgttgattatcgcgcactcaacgaggtcaccatcaagaacaaataccctttgccgcgaatcgatgatttgtttgatcaactgaaaggagctaaagtgttttctaagatagacctgcgatcaggctaccaccagttgagaatccgggaagaggatattccgaagacggccttcaccactcggtacgggctatatgagtgcacggttatgtctttcggacttaccaacgcacccgcattcttcatgaatctgatgaacaaagtgttcatggaatttctggacaagtttgttgtggtgttcatcgacgacattcttatctattcaaagtccgaggaggaagatgaacaacatctccatctagtactcgagaagttgaaggagcaccagctatacgccaagttcaacaagtgtgacttctggttgacggaagtaaaatttctgggtcatgtcattacagctcagggtgtggcagtcgacccatcgaacgtggagtcagttaccaaatggaccccacctaagaccgtgtcgcagattcggagttttcttggacttgcgggttattaccgccgattcatcgaaaatttctccagaatcgcccgacccatgactcagttgcttaagaaagatgagaagtttaaatggacagctgagtgcgataagagtttcgaggagctcaagaagaaattagtatccgcaccagttttgattctgcccgacccgacgaaagacttccaagtctattgtgatgcatcccgtcacggacttggatgtgtcctaatgcaagagggcagagtggttgcgtatgcctcgcggcagttgcgtccacacgaaggaaattatccaacgcatgacttggaattggcagcagtggttcatgctttgaagatctggaggcactatctgattggcaaccgctgcgaaatatatacggaccataagagtctgaaatacatcttcacccaaccggacctaaatctccggcaacgaagatggttggaactaatcaaagactatgacatgagtattcactaccacccgggtaaagccaatgtggtggcagacgctttaagccggaaaagttactgcactgccctatgcatcgagggcatgtgtgaggaattgcggcaggagtttgggcatctcaacgtgggaattgttgaacacgggttcgtagccgctctggaggcacggcctacgctcgtggatcaagttagagccgctcaagtaaatgatccggaaatagcagagctgaaaaagaacatgagagtcggaaaggctcgggatttccttgaggatgagcatggcacgatctggatgggagaaagattgtgtgtacctgacgacaaggaattgaaggatctgatactcaccgaggctcatcagacccagtactccattcacccaggcagcactaaaatgtatcaagacctcaaagaaaagttttggtgggtcagcatgaggagagaaatagctgaattcgtcgcactctgcgatgtttgccaacgagtgaaggcagagcaccaaagaccagcaggtttactccaacctcttcaaatcccggaatggaaatgggaggagattggaatggactttataacaggactgccccggacatcatcgggtcatgattcaatctgggtagtcgtggatcgactcaccaaggtggctcactttataccagtgcataccacctatacgggaaagagattggtagaattgtacctcgcaaggatcatgtgtttgcatggggtacccaagaagatagtatccgaccgaggtagtcagttcacctcaaaattctggcagaagctacaggaagaattggggacccgtttaaatttcagcacggcctatcacccgcaaactgatggtcagaccgagcgagtcaatcaaatcttggaagatatgttgagagcttgcgctcttgattttggtggagcttgggacaaaagcttgccatatgcagaattctcgtacaacaacagctaccaggccagtctacagatggcaccgtttgaagctttatacggtcggaagtgccgcacacctctcttctgggatcagacaggcgaacgtcaactgttcggaacagaggtattagcggaagcagaagagaaagtcataatcatcagggaaaggttgagaattgctcagtctcgacagaagagctacgcggataaccgtcgaagggagctcacttttgaggcaggagattacatgtatcttcgtgtcactccgctccgggaagtacaccgtttccagacaaaaggcaagttggcaccacgcttcgtgggaccatacaaaattttggaacgaaggggagaagttgcttatcagctagaacttccatccaacatgatcggcatccatgacgtgttccatgtgtcccaattaaagaagtgcttaagggtacctgaagaacaggctgattcggagcacattgatatccaagaggacctaacctatgtggagaagccggttcgtatacttgataccagcgaaagaagaaccagaaataaggtcaccaggttttgccgagttcagtggaatcatcattcagaagaggaagcaacctgggaaagggaagatgagttgaaagccgcccatccgcacctcttcaccagctcctccgaatctcggggccgagattccgtttaa

SEQ ID NO: 13833 - DNA, 5118 bp, Oryza sativa
  Clone ID: TFbOSC401018j.C1.o31.fg
atgggttgcaagatggctggccacccacccaaccaccgcggagaaggcatgatcgactttgtggcagagctggcacgcatgacactggtggtgggctaccccaacgcgccggagtacacgactattccgccgcttagtggcgagcttcctcaccgtgtccgcttggaggtccatggctacgtggggacttgcctcgctaacatggcagttgaggcgtcaggaggcacagcagatcacgcctgtcaggaggcagcctacttgatgatggccagactacgggagcgcgacaactacatcttccacgacacggcgtaccgctaccacccccgtcgagccaacggtgatggcgtcagctccttctgtccgacagctggcgagaacgacaccacctttggtcacatgtgtgctgtgatgaggggattggacaggatgcactcggacctgcacaaggcgaccaaggccttgaacgatgggaagctcatgaggatcgttgctctgaaggacgagatagcgcgcctgaagaaggagaacgctcagctaaagggtcttccagcgccaggaggagtccggatccgcactacgccccgcaagactacgacggcacccgtgcgcatccagcttgcgcccaggaacccacctccagcagcaactcccgcagcacctccagttccgcccgcagttcctgcagctccagctccagctcccgagtccgctctctccttcgctccagcatcagccgccagaggtccagccagtggcaccggaggttgcttgtttgggatggtctacaccaggactggtagccgcgcaacaggcgagggcagcaacggcgaagaacgcgctaatggtgtgcaccccagcagtgattccggcaatggtccgccaccacttcctgagaatccgacgctagcccaagttatggcacatcagactcagatgatggcagccatgatgcagcagatgcagcagcagcaccagcagatgcaccagaggatgatgcagcacgccgaacagcagcaccagcagtttggtccccctccccctcagtccaagttgcctgagttcctacgtgtcaggccacccaccttctccagcaccaccaaccctatggaggcaaatgactggctccatgcgatagagaagaagctgaacctcctgcagtgcaatgatcaggagaaggtcgctttcgccacacaccagcttcagggtcctgcgtcagcctggtgggacaatcacatggccacccgcccaccgggtactgaagtcacttgggtagagttctgccgtagcttcaggaaggcacaggtgccagatggggtcatggcacaaaagaagagggaatttcgtgcactccatcagggcaacaggactgtgacagagtacctccacgagttcaatcgcctcgcgcgatatgcaccagaggatgtccgcaccgacgccgagaagcaggagaagttcatggcgggtttggatgatgagctgaccaaccaactgatatccggggactacgctgactttgagtggctggttgacaaggcaatccgccaggaggatcaacgcaacaagatggacaggaagaggaaggccgctcagttcagggcacctcagggaagtcaccagaggccgcgcttcactcccggacagcagggtggacctaccaccatgatcgtccgtcagcaccgcccgttcaactccagcaacttccaccagggctctagtggcagtcagaaccaccatggaggtcagcccaaccgcggtgcagctccacgcccacccatggcaccggcacagtcaggcccgcccgcgcaagccaagaaggagacgggagcaaaaccagggtcctgcttcaactgtggtgagcttggccacttcgctgacaaatgcccgaagcccaggcgtgccgggccaaggtttatccaggctcgtgtcaaccacgcgtctgcagaggaggcacaaacagcaccggaggtcgtactaggtacgttccctgttaactcaatccctgcaacagtactttttgattctggtgcaacgcattctttcatttcaaagaaatttgtggggatgtatgggttaaggaaagaagagcttagcacaccaatgagggttcataccccggggaatagttcaacctcagtcagttttagcccttcagtgctaatagaaattcaaagattaccatttctagccaacctcattcttcttgaatccaaatacctagatgtcattcttgggatggattggctgactaagttcaagggagtcatcgattgtgcgaatcgcacagtcaccttgaccaacgagaagggagaaacggtagtgtacaaatcactagccccgccaaagcaaggggtctccttgaaccagatcgagatggaagtcccagtggtcaccgaggagaagaatttgaagaaattggaagacatacccatagtctccgagtatccagaagtgttccctgaagacctcactaccataccacccaagagggagattgaattccggattgacttggcaccgggaaccgctcccatttacaagagaccgtacagaatggcggccaacgaattagccgaggtcaagaagcaggttgatgagcagctgcagaaagggtacatccgaccaagtacttcaccttggggtgctccggtcatttttgtggagaaaaaggataagacgaagagaatgtgcgttgattatcgcgcactcaacgagttgagaatccgggaagaggatattccgaagacggccttcaccactcggtacgggctatatgagtgcacggttatgtctttcggacttaccaacgcacccgcattcttcatgaatctgatgaacaaagtgttcatggaatttctggacaagtttgttgtggtgttcatcgacgacattcttatctattcaaagtccgaggaggaacatgaacaacatctccgtctagtactcgagaagttgaaggagcaccagctatacgccaagttcaacaagtgtgacttctggttgacggaagtaaaatttctgggtcatgtcattacagctcagggtgtggcagtcgacccatcgaacgtggagtcagttaccaaatggaccccacctaagaccgtgtcgcagattcggagttttcttggacttgcgggttattaccgccgattcatcgaaaatttctccagaatcgcccgacccatgactcagttgcttaagaaagatgagaagtttaaatggacagctgagtgcgataagagtttcgaggagctcaagaagaaattagtatccgcaccagttttgattctgcccgacccgacgaaagacttccaagtctattgtgatgcatcccgtcacggacttggatgtgtcctaatgcaagagggcagagtggttgcgtatgcctcgcggcagttgcgtccacacgaaggaaattatccaacgcatgacttggaattggcagcagtggttcatgctttgaagatctggaggcactatctgattggcaaccgctgcgaaatatatacggaccataagagtctgaaatacatcttcacccaaccggacctaaatctccggcaacgaagatggttggaactaatcaaagactatgacatgagtattcactaccacccgggtaaagccaatgtggtggcagacgctttaagccggaaaagttactgcactgccctatgcatcgagggcatgtgtgaggaattgcggcaggagtttgggcatctcaacgtgggaattgttgaacacaggttcgtagccgctctggaggcacggcctacgctcgtggatcaagttagagccgctcaagtaaatgatccggaaatagcagagctgaaaaagaacatgagagtcggaaaggctcgggatttccttgaggatgagcatggcacgatctggatggtagaaagattgtgtgtacctgacgacaaggaattgaaggatctgatactcaccgaggctcatcagacccagtactccattcacccaggcagcactaaaatgtatcaagacctcaaagaaaagttttggtgggtcagcatgaggagagaaatagctgaattcgtcgcactctgcgatgtttgccaacgagtgaaggcagagcaccaaagaccagcaggtggctcactttataccagtgcataccacctatacggaaagagattggcagaattgtacctcgcaaggatcatgtgtttgcatggggtacccaagaagatagtatccgaccgaggtagtcagttcacctcaaaattttggcagaagctacaggaagaattggggacccgtttaaatttcagcacggcctatcacccgcaaactgatggtcagaccgagcgagtcaatttaatcttggaagatatgttgagagcttgcgctcttgattttggtggagcttgggacaaaagcttgccatatgcggaattctcgtacaacaacagctaccaggccagtctacagatggcaccgtttgaagctttatacggtcggaagctttatacagccatatgcgctttattctgggatcagacaggcgaacgtcaactgttcggaacagaggtattagcggaagtagaagagaaagtcagaatcatcagggaaaggttgagaattgctcagtctcgacagaagagctacgcggataaccgtcgaagggagctcacttttgaggaaggagattacgtgtatcttcgtgtcactccgctccggggagtacaccatttccagacaaaaggcaagttggcaccacgcttcgtgggaccatacaaaattttggaacgaaggggagaagttgcttatcagctagaacttccatccaacatgatcggcatccatgacgtgttccatgtgtcccaattaaagaagtgcttaagggtacctgaagaacaggttgattcggagcacattgatatccaagaggacctaacctatgtggagaagccggttcgtatacttgataccagcgaaagaagaaccagaaataaggtcaccaggttttgccgagttcagtggaatcatcattcagaagaggaagcaacctgggaaagggaagatgagttgaaagccgcccatccgcacctcttcaccagctcctccgaatctcggggccgagattccgtttaa

SEQ ID NO: 13834 - DNA, 5460 bp, Oryza sativa
  Clone ID: TFbOSC401051j.C1.o55.fg
atggccggtcacccacccaaccaccgcggagaaggcatgatcgatttcgtggcagagttggcacgcatgacattggtggtgggctaccccgacgcgccggagtacacgaccatcccaccgctcagtggcgagcttcctcaccgtgtccgcttggaggtccatggttacgtggggacttgcctcgctaacatggcggtcgaggcgtcaggaggcacagcagatcatgcctgtcaggaggcagcctacctgatgatggccagactacgggagcgccacaactacatcttccacgacacggcgtaccgctaccaccccagtcgagcccacggtgatggcgtcagctccttccgtccgacagctggcgagaacgacaccaccttcggtcacatgtgcgcggtgatgaggggtctggacaggatgcactcggatctgcacaaggcgactaaggccttgaatgatgggaagctcatgaggatcgtcgctttgaaggacgagatagcgcgtctgaagaaggagaacgctcagcttaagggtctcccagcgccaggaggagtccggatccgcactacgccccgcaagactacgaaggcacccgtgcgcatccagctcgcgcccaggaacccacctccagcagcagctcccgcagcacctccagttccgcccgcagctcctgcagctccagttcctgcagctccagctccagctcccgcgttcgttctctccttcgccccagcgtcagccgtcagaggtccagccagtggcatcgggggttggttgcctgctacccccagtggcagccgcgatcgcagctccagtggctcgcagacgggcagcagcgagacgtacctgccaggctccaggagtcgttcagagggacctggttgcttgtttgggatggtcaacaccaggactggcaaccgcacgacaggcgagggcagcaacggtgaagaacgcgttgatggtatgcaccccaacggcgatcccggcaacggtccgccaccacttcccgagaatccgacacttgcccaagttatggcgcatcagactcagatgatggcagccatgatgcagcagatgcagcaacagcaccagcagatgcaccagaggatgatgcagtacgctgaacagcagcaccagcagtttggtccccctccccctcagtccaagttgcctgagttcctacgagtcaggccacccaccttctctagcaccaccaaccctatggaggcaaacgactggctccatgcaatagagaagaagctgaatctcctgcagtgcaatgatcaggagaaggtcgctttcgccacacaccagcttcagggtcctgcgtcagcttggtgggacaaccacatggccacccgcccaccgggtacggaagtcacctgggcagagttctgccgtagcttcaggaaggcacaggtgccagatggggtcgtggcacaaaagaagagggaatttcgcgcactccatcagggcaacaggacggtgacagagtacctccacgagttcaatcgcctcgcgcgatatgcaccagaggatgtccgcaccgacgccgagaagcaggagaagttcatggcgggcctggatgacgaactgaccaaccaactgatatctggggactacgccgactttgagaggctagtcgacaaggcaattcgtcaagaggaccaacgcaacaagatggacaggaagaggaaggccgctcagttcagggcacatcagggaagtcaccagaggccgcgtttcactcccggacagcagggtggacctaccaccatgatcgtccgtcagcaccgcccgttcaaccctagcaacttccaccagggcaccagtggcagtcagaaccaccatggaggtcagcccaaccgcggtgcagctccacgcccaccaatggccccggcacagtcaggccagcccacgcaagccaagaaggagactggagcaaaaccagggtcctgcttcaactgtggcgagcttggtcacttcgcggacaaatgcccgaagcccaggcgtgccgggccaaggtttatccaggctcgtgtcaaccacgcatctgcggaggaggcacaagcagcaccagaggtcgtactgggtacgtttcctgttaactcaatccctgcaacagtactttttgattctggtgcaacgcattcgttcatctcaaagaaatttgtcgggatgcatgggttaataagagaagaacttagcacaccgatgcgggttcataccccagggaatagctccacttcggttcaattcagcccttctataacaatagaaatccaaagatcaccatttctagccaacctcatccttctcgactccaaaggcctagatgtcatcctcgggatggattggctgactaagtttaagggagtcatcgattgtgcgaatcgcacagtcaccttaaccaacgagaagggagaaaccgtggtgtacaaatccctagtctcgccaaggaaaggggtctcgttgaatcagattgagacagaaatcccagtggacaccgtagagaagaactcgagaaaattggatgatatacccatagtctgcgagtatccggaagtgttccccgaagacctcactaccatgccacccaagagagagattgaattccggattgacttggcaccgggaaccgctccaatctataagagaccgtacagaatggcggccaacgaattagcggaggtcaagaagcaagttgatgaacagctgcagaaagggtacatacgaccaagcacttcgccttggggcgctccggtcatttttgtggagaaaaaagataagacgaagaggatgtgcgtcgattatcgcgcacttaacgaggtcacaatcaagaataaatatcctttgccgcggatcgacgatttatttgatcaactgaaaggggctaaagtgttttctaagatagacctgcgctcaggctaccaccagttgagaatccgggaagaggatatcccgaagacggccttcaccacgcggtacgggctatatgagtgcacggttatgtccttcggacttaccaacgcacccgcattcttcatgaatctgatgaacaaagtgttcatggaatttctggacaagtttgttgtggtgttcatcgacgacattttgatctattcaaagtccgaggaagaacatgaacaacatctccgtctggtactcgagaagttgaaggagcaccaactatacgccaagttcagcaagtgtgacttctggttgacggaagttaaatttctgggtcatgtcattacagcccagggtgtggcagtcgacccatcgaacgtggagtcagttaccaagtggaccccaccgaagaccgtgtcgcagattcgaagttttctaggattggccggttattaccgccgattcatcgaaaacttctccagaatcgcccgacccatgactcagttgcttaagaaagatgagaagtttaaatggacagctgagtgcgataagagttttgaggagctcaagaagaaattagtatccgcaccggttttgattctgcccgaccagatgaaagacttccaagtctattgcgatgcatcccgtcacggacttggatgtgtcctaatgcaagagggcagagtggttgcatatgcctcgcggcagttgcgtccacacgaaggaaattatccaactcatgacttggaattggcagcagtggttcatgctttgaagatctggaggcactatctgattggcaaccgctgcgaagtatatacggaccataagagtctgaaatacatcttcacccaaccggacctaaaccttcgacaacgaagatggttggagctaatcaaagactatgacatgagtattcactaccacccgggtaaagccaatgtggtggcagacgctttaagccggaaaagttactgcactgccctatgcaccgagggcatgtgtgaggaattgcggcaggagtttgaacatctcaacataggaattgttgaacacgggttcgtagccgctctggaggcacggccgacgctcgtggatcaagttagagccgctcaagtaaatgacccggaaatagcagagctgaaaaagaacatgagagtcggaaaggctcgggatttccttgaggatgagcatggcacaatctggatgggagaaagattgtgtgtacctgacgacaaggaattgaaggatctgatactcaccgaggctcatcagacccagtactccattcaccccggcagcaccaaaatgtatcaagatctcaaagaaaagttttggtgggtcagcatgaggagagaaatagctgagttcgtcgcactctgcgatgtttgccaacgagtgaaggcagagcaccaaagaccagcaggtctactccaacctcttcaaatcccggaatggaaatgggaagagattggaatggattttataacgggactgccccggacatcatcgggacatgattcaatctgggtagtcgtggatcgactcaccaaggtggctcacttcataccagtacataccacctatacgggaaagagattggcagagttgtacctcgcaaggatcatgtgtttgcatggggtacccaggaagatagtatctgaccgagggagtcagttcacctcaaaattctggcagaagttgcaggaagaattggggacccgtttaaatttcagcacggcctatcatccgcaaactgacggtcaaaccgagcgagtaaatcaaatcttggaagatatgttgagagcatgcgctcttgattttggtggagcttgggacaaaagcttgccatatgcggaattctcgtacaacaacagctaccaggccagtctacagatggcaccgtttgaagctttatacggccggaagtgccgcacacctctcttctgggatcagacaggcgagcgtcaactgttcggaacagaagtattagcagaagcagaagagaaagtcagaatcatcagggaaaggttgaggattgcccagtctcgacagaagagctacgcggataaccgtcgaagggagctcacctttgaggcaggagattacgtgtatcttcgtgtcactccgctccggggagtacaccgttttcagacgaaaggcaagttggcaccacgcttcgtgggaccatacaaaattttggaacgaaggggagaagttgcctaccagctagaacttccgtccaacatgatcggcatccatgacgtgttccacgtatcccaattaaagaagtgcttaagggtacctgaggaacaggctgattcggaacacatcgatatccaggaggacctgacctatgtggagaagccggttcgcatacttgataccagcgaaaggaggaccagaaacaaggtcaccaggttttgccgagttcaatggagtcatcattccgaagaggaagcaacctgggaaagggaagatgagttgaaagccgcccatccgcacctcttcaccagctcctccgaatctcggggccgagattccgtttaa

SEQ ID NO: 13835 - DNA, 4278 bp, Oryza sativa
  Clone ID: TFbOSC401054j.C1.o28.fg
atggtctacaccaggaatggtagccgcgcaacaggcgagggcagcaacggtgaagagcgcactgagggtgtgcatcccaacagcaattccggcaatggtccgccaccacttcccgagaatccgacgctagcccaagtgatggcacatcagactcagatgatggcagccatgatgcagcagatgcagcagcagcaccagcagatgcaccagaggatgctgcagcacgccgaacagcagcaccagcagtttggtccccctccccctcagtccaagttgccagagtttctacttgtcaggccacccaccttctccagcaccaccaaccctatggaggcgaatgactggctccatgccatagagaagaagctgaatctcctgcagtgcaatgatcaggagaaggttgctttcgccacacaccagcttcaaggtcctgcgtcagcttggtgggacaatcacatggccacccgcccaccaggtactgaagtcacttgggcagagttctgccgtagcttcaagaaggcgcaggtgccagacggggtcgtggcacaaaagaagagggaattccgggcactccatcagggcaacaggactgtgacggagtatctccatgagttcaatcgcctcgcgcgatatgcaccggaggatgtccgtactgacgccgagaagcaggaaaaattcctagcaggtctggatgatgagctaaccaaccagttgatatctggagattacgccgatttcgaaagactggtggacaaggcaatccgtcaggaggatcaacgcaacaagatggacaggaagagcaactttccccagggcgccagtggcagtcagaaccaccatggaggtcagcccaaccgcggtgcagctccacgcccaccaatggcaccggcacagtcaggcccgtccgcgcaagccaagaaggagactggagcaaaaccagggtcctgcttcaactgtggcgagcttggccacttcgctgacaaatgcccgaagcctaggcgtgccgggccaaggtttatccaggcccgtgtcaaccacgcatctgcggaggaggcacaagcagcaccagaggtcgtactgggtacgtttcctgttaactcaatccctgcaacaatactttttgattctggtgcaacgcattcgttcatttcaaagaagtttgtcgggatgcatgggttaaggaaagaagagcttagcacaccaatgagggttcataccccgggaaatagttcaacctcagtcagttttagcccttcagtgctaatagaaatccaaagatcgccatttctagccaaccttattcttctcgaatccaaagacctggatgtcattcttgggatggattggctgaccaagtttaagggagtcatcgattgtgcgaatcggacagtcaccttgaccaacgagaagggagaaacagtagtgtacaaatcaccagactcaccaaagcaaggggtctctttgaatcagattgaggcggaaatcccagtggacactgtggagaagaatttgaggaaattggaagatatacccatagtctgcgagtatccagaagtgttccccgaagaccttactaccatgccacccaagagagagattgaattccggattgacttggcaccgggaaccgctccaatttacaagagaccgtacagaatggcggccaacgaactagcagaggtcaagaagcaggttgatgagcagctgcagaaagggtacattcgactaagtacttcaccttggggtgctccggtcatttttgtggagaaaaaggataagacaaagaggatgtgcgttgattaccgcgcactcaacgaggtcacaatcaagaacaaatatcctttgccgcgaatcgatgatttgtttgatcaactgaaaggagctaaagtgttttctaagatagacctgcgatcaggctaccaccagttgagaattcgggaagaggatattccaaagacggccttcaccactcggtacgggctatatgagtgcacggttatgtctttcggacttaccaacgcacccgcattcttcatgaatctgatgaacaaagtgttcatggaatttctggacaagtttgttgtggtattcatcgacgacatacttatctattcaaagtccgaagaagaacatgagcaacatctccgtctggtactcgagaagttgaaggagcaccagctatacgccaagttcagcaagtgtgacttctggttgacggaagtcaaatttctgggccatgtcattacagctcagggtgtggcagttgatccatcgaacgtagagtcagttaccaaatggaccccaccgaagaccgtgtcgcagattcgaagttttcttggacttgcaggttattaccgccgattcatcgaaaacttctccaggatcgcccgacccatgactcagttgcttaagaaagatgagaagtttaaatggacagctgagtgcgataagagttttgaggagctcaagaagaaattagtatccgcaccagttttgattctgcccgaccagatgaaagacttccaagtctattgcgatgcatcccgtcacggacttggatgtgtcctaatgcaagagggcagagtggttgcatatgcctcgcggcagttgcgtccacacgaagggaattatccaactcatgacctggaattggcagcagtggttcatgctttgaagatctggaggcactatctgattggcaaccgctgcgaagtatatacggaccataagagtctgaaatacatcttcacccaaccggacctaaatctccgacaacgaagatggttggaactaatcaaagactatgacatgagcattcactaccacccgggtaaagccaatgtggtggcagacgcattaagcaggaaaagttactgcactgctctatgcatcgagggcatgtgtgaggaattgcggcaggagttggagcatctcaacgtgggaattgttgaacacgggttcgtagccgctttggaggcacggcctacgctcgtggatcaagtcagagcagctcaagtaaatgattctgaaatagcagagctgaaaaagaacatgagagtcggaaaagcccgggatttccacgaagatgaacacggcacaatctggttgggagaaagattgtgtgtacctgacgacaaggaactgaaggatctgatactcaccgaggctcatcagacccagtactccattcatccaggcagcaccaaaatgtatcaagacctcaaagaaaagttttggtgggtcagcatgaggagagaaatagctgaattcgtcgtactctgcgatgtttgtcaacgagtgaaggcagagcaccaaagaccagcaggtttactccaacctcttcaaatccaggaatggaaatgggaggagattggaatggactttataacaggactaccccggacatcatcgggtcacgattcaatctgggtagtcgtggatcgactcactaaggttgctcacttcataccagtacataccacgtatacgggcaaaaggttggcggagctctacctctcgagaatcatgtgtttacatggagtacccaaaaagattgtatctgatcgagggagtcagttcacctcaaaattctggcagaagctgcaggaagaattggggactcgtttaaatttcagcacggcctatcactcgcaaattgatgaattctcgtacaacaacagctaccaggccagtctacagatggcaccgtttgaagctttatatggccggaagtgccgcacacctctcttttgggatcagacagacgagcgtcaactgttcgggacagaggtattagcggaagccgaagagaaagtcagaatcatcagggaaaggttgaggattgcccagtctcgacagaagagctacgcggataaccgccgaagggagctcacttttgaggcaggggattacgtgtatcttcgtgtcactccgctccggggagaagttgcttatcagttagaacttccatccaatatgatcggcatccatgacgtgttccacgtgtcccaattaaagaagtgcttaagggtacctgaagaacaggctgattcggaacacattgatatccaggaggacctaacatatgtggagaagccggttcgtatacttgataccagcgaaagaagaaccagaaacaaggtcaccaggttttgccgagttcagtggagtcaccattcagaagaggaagcaacctgggaaagggaagatgagttgaaagccgcccatccgcacctcttcgccagctcctccgaatctcggggccgagattccgtttaa

SEQ ID NO: 13836 - DNA, 5322 bp, Oryza sativa
  Clone ID: TFbOSC401054j.C1.o42.fg
atggccggtcacccacccaaccaccgcggagaaggcatgatcgatttcgtggcagagttagcacgtatgacactggtggtgggctaccccaacgcgccggagtacacgacgattccgccgctcagtggcgagcttcctcaccgtgtccacttggaggtccatggctacgtggggacttgcctcgctaacatggcggtcgaggcatctggaggcacagcagatcacgcctgtcaggaggcagcctacttgatgatggccagaatacgggagcgccacgactacatcttccacgacacggcgtaccgctaccacccccgtcgagcccatggtgatggcgtcagctccttccgtccgacagctggcgagaacgacaccacctttggtcacatgtgtgctgtgatgagtggattggacaggatgcactcggacctgcacaaggcgaccaaagccttgaacgatgggaagctcatgaggatcgtcgccctgaaggacgagatagcgcgcctgaagaaggagaacgctcagctaaagggtcttccagcgccaggaggagtccggatccgcaccacgccccgcaagacgacgactgcacctgtgcgtatccagcttgcgcccaggaacccacctccagcagcagctcccgcagcaccttcagttccgcccgcagttcctgcagctccagttccagctcccgcattcactctctccttcgctccagcatcagccgccagaggtccagccagtggtaccggaggctgcttgtttgggatggtctacaccaggactggcaaccgcacgacaggcgagggcagcaacggcgaagaacgcgtggatggtgtgcaccccaacagtgattctggcaatggtccgccaccacttcccgagaatccgacgcttgcccaagttatggcacatcagactcagatgatggcagccatgatgcagcagatgcagcagcagcaccagcagatgcaccaaaggatgatgcagcacgccgagcagcagcaccagcagtttggtccccctccccctcagtccaagttgccagagtttctacgcgtcaggccacccaccttctccagcaccaccaaccccatggaggcgaacgactggctccatgccatagagaagaagctgaatctcctgcagtgcaatgatcaggagaaggtcgctttcgccacacaccagcttcagggtcccgcgtcagcttggtgggacaaccacatggccacccgcccaccgggtactgaagtcacatgggcagagttctgccgtagcttcaggaaggcacaggtgccagatggggtcgtggcacaaaagaagagggaattccgggcgctccatcagggcaacaggactgtgacagagtacctccacgagttcaatcgcctcgcgcgatatgcaccagaggatgtccgcaccgacgccgagaagcaggagaagttcatggcgggtttggatgatgagctgaccaaccaactgatatctggggactacgctgactttgagaggctggtcgacaaggcaatccgccaggaggatcaacgcaacaagatcgacaggaagaggaaggccgctcagttcagggcacctcagggaagtcaccagaggccgcgcttcactcccgggcagcagggtggacctaccaccatgatcgtccgtcagcaccgcccgttcaaccctagcaacttccaccagggcactagtggcagtcagaaccaccatggaggtcagcccaaccgcggtgcagctccacgcccatcagtggcaccggcacagtcaggccagcccgcgcaagccaagaaggagactggagcaaaaccagggtcctgcttcaactgtggcgagcttggtcacttcgctgacaaatgcccaaagcccaggcgtgccgggccaaggtttatccaggctcgtgtcaaccacgcgtctgcagaggaggcacaaacagcaccggaggtcgtactgggtacgtttcctgttaactcaatccctgcaacagtacttttcgattctggtgcaacgcattctttcatttcaaagaaatttgtggggaggtatgggttaaggaaagaagagcttagcacaccaatgagggttcataccccgggaaatagttcaacctcagtcagttttagcccctcagtgctaatagaaatccaaagatcaccatttctagccaacctcattcttcttgaatccaaagacctagatgtcattcttgggatggattggctgaccaagtttaagggagtcatcgattgtgcgaatcgcacagtcaccttgaccaacgagaagggagaaacagtggtgtacaaatctctagtctcaccaaagaaaggggtctcgttgaatcagattgagacggaaatcccagtggataccgtagagaagaacttgagaaaattggaagatatacccatagtctgcgagtatccagaagtgttccccgaagacctcactaccatgccacccaagagagagattgaattccggattgacttggcaccgggaaccgctccaatctataagagaccatacagaatggcggccaacgaattagcagaggtcaagaagcaagttgatgagcagctgcagaaagggtacatacgaccaagcacttcaccttggggcgctccggtcatttttgtggagaaaaaggataagacgaagaggatgtgcgttgattatcgcgcactcaacgaggtcacaatcaagaataaatatcctttgccgcgaatcgacgatttatttgatcaactgaaaggagctaaagtattttctaagatagacctgcgatcaggctaccaccagctgagaatccgggaagaggatattccgaagacggccttcaccactcggtacgggctatatgagtgcacggttatgtctttcggacttaccaacgcacccgcattcttcatgaatctgatgaacaaagtgttcatggaatttctggacaagtttgttgtggtattcatcgacgacatacttatctactcaaaatccgaggaagaacatgagcaacatctccgtctggtactcgaaaagttgaaggagcaccagctatacgccaagttcagcaagtgtgacttctggttgacagaagtcaaatttctgggtcatgtcattacagctcagggtgtggcagtcgacccatcgaacgtggagtcagttaccaaatggaccccacctaagaccgtgtcgcagattcggagttttcttggacttgcgggttattaccgccgattcatcgaaaacttctccaggatcgcccgacccatgactcagttgcttaagaaggatgagaagtttaaatggacagctgagtgcgataagagctttgaggagctcaagaagaaattagtatccacaccggttttgattctgcccgaccagatgaaagacttccaagtctattgtgatgcatcccgtcacggactgggatgtgtcctaatgcaagagggcagagtggttgcatatgcctcgcggcagttgcgtccacacgaaggaaattatccaactcatgacttggaattggcagcagtggttcatgctttgaagatctggaggcactatctgattggcaaccgctgcgaagtatatacggaccataagagtctgaaatacatcttcacccaaccggacctaaatctccgacaacgaagatggttggaactaatcaaagactatgacatgagtattcactaccacccgggtaaagccaatgtggtggcagacgctttaagccggaaaagttactgcactgccctatgcatcgagggcatgtgtgaggaattgcggcaggagtttgaacatctcaacatgggaattgttgaacacgggtttgtagccgctctggaggcacggcccactctcgtggatcaagtcagagcagctcaagtaaatgattctgagatagcagagctgaaaaagaatatgagagtcggaaaagcccgggaattccacgaagatgagcatggcacaatctggatgggagaaagattgtgtgtacctgacgacaaggaactgaaggatctgatactcaccgaggctcatcagacccagtattcaattcatcccggcagtactaaaatgtaccaggacctcaaagagaaattctggtgggtcagcatgaggagagaaatagctgaattcgtcgcactctgcgatgtttgccaacgggtgaaggcagagcaccaaagaccagcaggtttactccaacctcttcaaatcccggaatggaaatgggaggagattggaatggactttataacaggactgccccggacatcatcgggtcacgattcaatctgggtagtcgtggatcgactcactaaggttgctcacttcataccagtacataccacgtatacgggcaaaaggttggcggagctctacctctcgagaatcatgtgtctacatggggtacccaaaaagattgtatctgatcgagggagtcagttcacttcaaagttctggcagaaactacaagaagaattggggacccgtttaaatttcagcacggcctatcacccgcaaactgatggtcagaccgagcgagtcaatcaaatcttggaagatatgttgagagcttgcgctcttgattttggtggagcttgggacaaaagcttgccatatgcggaattctcgtacaacaacagctaccaggccagtctacagatggcaccgtttgaagctttatacggccggaagtgccgcacacctctcttctgggatcagacaggcgaacgtcaactgttcggaacagaagtattagcggaagcagaagagaaagtcagaatcatcagggaaaggttgaggattgctcagtctcgacagaagagctacgtggataaccgtcgaagggagctcacttttgaggcaggagattacgtgtatcttcgtgtcactccgctccggggagtacaccgttttcagacgaaaggcaagttggcaccacgcttcgtgggaccatacaaaatcttggaacgaaggggagaagttgcttatcagctagaacttccatccaatatgatcggcatccatgacgtgttccacgtgtcccaattaaagaagtgtttaagggtacctgaagaacaggctgattcggaacacattgatatccaggaggacctaacttatgtggagaagccggttcgcatacttgataccagcgaaaggagaaccagaaacaaggttacccggttttgccgagttcagtggagtcatcattcggaagaggaagcaacctgggaaagggaagatgagttgaaagccgcccatccgcacctcttcaccagctcctccgaatctcggggctga

SEQ ID NO: 13837 - DNA, 5145 bp, Oryza sativa
  Clone ID: TFbOSC401054j.C1.o59.fg
atggcggtcgaggcatctggaggcacagcagatcacgcctgtcaggaggcagcctacttgatgatggccagaatacgggagcgccacgactacatcttccacgacacggcgtaccgctaccacccccgtcgagcccatggtgatggcgtcagctccttccgtccgacagctggcgagaacgacaccacctttggtcacatgtgtgctgtgataaggggattggacaggatgcactcggacctgcacaaggcgaccaaggccttgaacgatgggaagctcatgaggatcgtcgctctgaaggacgagatagcgcgcctgaagaaggagaacgctcagctaaagggtcttccagcgccaggaggagtccggatccgcaccacgccccgcaagacgacgactgcacccgtgcgcatccagcttgcgcccaggaacccacctccaccagcagctcccgcagcaccttcagttccgcccgcagttcctgcagctccagctccagctcccgcgttcactctctccttcgctccagcatcagccgccagaggttcagccagtggtaccggaggctgtttgtttgggatggtctacaccaggaatggtagccgtgcaacaggcgagggcagcaacggcgaagaacgcgctgatggtgtgcaccccaacagtgattctggcaatggtccgccaccacttcccgagaatccgacccttgcccaagttatggcacatcagactcagatgatagcagccatgatgcagcagatgcagcagcagcaccagcagatgcaccaaaggatgatgcagcacgccgagcagcagcaccagcagtttggtccccctccccctcagtccaagttgccagagtttctacgcgtcaggccacccaccttctccagcaccaccaaccctatggaggcgaacgactggctccatgccatagagaagaagctgaacctcctgcagtgcaatgatcaggagaaggtcgctttcgccacacaccagcttcagggtcctgcgtcagcttggtgggacaaccacatggccacccgcccaccgggtactgaagtcacatgggcagagttctgccgtagcttcaggaaggcacaggtgccagacggggtcgtggcacaaaagaagagggaattccgggcgctccatcagggcaacaggactgtgacagagtacctccatgagttcaatcgcctcgcgcgatatgcaccagaggatgtccgcaccgacgccgagaagcaggagaagttcatggcgggtctggatgacgagctgaccaaccaactgatatctggggactacgccgactttgagaggctggttgacaaggcaatccgtcaggaggaccaacgcaacaagatggacaggaagaggaaggccgctcagttcagggcacatcagggaagtcaccagaggccgcgcttcactcccggacagcagggtggacctaccaccatgatcgtccgtcagcaccgcccgttcaaccctagcaacttccaccagggcactagtggcagtcagaaccaccatggaagtcagcccaaccgcggtgcagctccacgcccatcagtggcaccggcacagtcaggccagcccgcacaagccaagaaggagacgggagcaaaaccagggtcctgcttcaactgtggcgagcttggccacttcgctgacaaatgcccgaagcccaggcgtgccggaccaaggtttatccaggctcgtgtcaaccacgcatctgcggaggaggcacaagcagcaccagaggtcgtactgggtacgtttcctgttaactcaatccctgcaacagtactttttgattctggtgcaacgcattctttcatctcgaagaaatttgtcgggatgcatgggttaataagagaggaacttagcacaccgatgcgggttcataccccagggaatagctccacttcggttcaattcagcccttctataacaatagaaattcaaagatcaccatttctagccaacctcattcttctcgaatccaaagacctagatgtcattcttgggatggattggctgaccaagtttaagggagtcatcgattgtgcgagtcgcacagtcaccctgaccaacgagaagggagaaacagtggtgtacaaatctctagtctcaccaaagaaaggggtctcgttgaatcagattgagacggaaatcccagtggataccgtagagaagaacttgagaaaattggaagatatacccatagtctgcgagtatccagaagtgttccccgaagacctcactaccatgccacccaagagagagattgaattccggattgacttggcaccgggaactgctccaatctataagagaccatacagaatggcggccaacgaattagcagaggtcaagaagcaagttgatgagcagctgcagaaagggtacatacgaccaagcacttcaccttggggcgctccggtcatttttgtggagaaaaaggataagacgaagaggatgtgcgttgattatcgcgcactcaacgaggtcacaatcaagaataaatatcctttgccgcgaatcgacgatttatttgatcaactgaaaggagctaaagtattttctaagatagacctgcgatcaggctaccaccagctgagaatccgggaagaggatattccgaagacggccttcaccactcggtacgggctatatgagtgcacggttatgtctttcggacttaccaacgcacccgcattcttcatgaatctgatgaacaaagtgttcatggaatttctggacaagtttgttgtggtattcatcgacgacatacttatctactcaaaatccgaggaagaacatgagcaacatctccgtctggtactcgaaaagttgaaggagcaccagctatacgccaagttcagcaagtgtgacttctggttgacggaagtaaaatttctgggtcatgtcattacagctcagggtgtggcagtcgacccatcgaacgtggagtcagttaccaaatggaccccacctaagaccgtgtcgcagattcggagttttctaggactggcaggttattaccgccgattcatcgaaaatttctccaggatcgcccgacccatgactcagttgcttaagaaagatgagaagtttaaatggacagctgagtgcgataagagttttgaggagctcaagaagaagttagtatccgcaccagtattgattctgcccgacccgacgaaagacttccaagtctattgtgatgcatcccgtcacggacttggatgtgtcctaatgcaagagggcagagtggttgcgtatgcctcgcggcagttgcgtccacacgaaggaaattatccaactcatgacttggaattggcagcagtggttcatgctttgaagatctggaggcactatctgattggaaaccgctgcgaagtatatacggaccataagagtctgaaatacatcttcacccaaccggacctaaaccttcgacaacgaagatggttggagctaatcaaagactatgacatgagtattcactaccacccgggtaaagccaatgtggtggcagacgctttaagccggaaaagctactgcactgccctatgcgtcgagggcatgtgtgaggaattgaggcaggagtttgaacatctcaacgtgggaattgttgaacacgggttcgtagccgctctggaggcacggcctactctcgtggatcaagtcagagcagctcaagtaaatgattctgagatagcagagctgaaaaagaatatgagagtcggaaaagcccgggatttccacgaagatgagcatggcaccatctggatgggagaaagattgtgtgtacctaacgacaaggaactgaaggatctgatactcaccgaggctcatcagacccagtactccattcacccaggcagcaccaaaatgtaccaagaccttaaagaaaaattttggtgggtcagcatgaggagagaaatagctgaattcgtcgcactctgcgatgtttgccaacgagtgaaagcagagcatcaaagaccagcaggtttactccaacctctccaaatcccggaatggaaatgggaggagattggaatggactttataacaggactgccccggacatcattgggtcacgattcaatctgggtagtcgtggatcgactcactaaggttgctcactttataccagtacataccacctatacgggaaagaggttggcagaattgtacctcgcaaggatcatgtgtttgcatggggtacccaagaagatagtatccgaccgaggtagtcagttcacctcaaagttttggcagaaacttcaggaagaattggggacccgtttaaacttcagcacggcctatcacccgcaaactgatggtcagaccgagcgagtcaatcaaatcttggaggatatgttgagagcatgcgctcttgattttggtggagcttgggacaaaagcttgccatacgcggaattctcgtacaacaacagctaccaggccagtctacagatggcaccgtttgaagctttgtacggccggaagtgccgcacacctctcttctgggatcagacaggcgaacgtcaactgttcggaacagaagtattagcggaagcagaagagaaagtcagaatcatcagggaaaggttgaggattgctcagtctcgacagaagagctacgcggataaccgtcgaagggagctcacttttgaggcaggagattacgtgtatcttcgtgtcactccgctccggggagttcaccgttttcagacgaaaggcaagttggcaccacgcttcgtgggaccatacaaaattttggaacgaaggggagaagttgcttatcagttagaacttccatccaatatgatcggcatccatgacgtgttccacgtgtcccaattaaagaagtgtttaagggtacctgaagaacaggctgattcggaacacattgatatccaggaggacctaacatatgtggagaagccggttcgcatacttgataccagcgaaaggaggaccagaaataaggtcactaggttttgccgagttcagtggagtcatcattcagaagaggaagcaacctgggaaagggaagatgagttgaaagccgcccatccgcacctcttcaccagctcctccgaatctcggggccgagattccgtttaa

SEQ ID NO: 13838 - DNA, 5358 bp, Oryza sativa
  Clone ID: TFbOSC401061j.C1.o25.fg
atggccggtcacccacccaaccaccgcggagaaggcatgatcgattttgtggcagagctggcacgcatgacactggtggtgggctaccccaacgcgccggagtacacgaccattccgccgctcagtggcgagcttcctcaccgtgtccgcttggaggtccatggctacgtggggacttgcctcgctaacatggcggttgaggcgtcaggaggcacagcagatcatgcctgtcaggaggcagcctacttgatgatggccaggttacgggagcgccacgactacatcttccacgacacggcgtaccgctaccacccccgtcgagcccatggtgatggcgtcagctccttccgtccgacagctggcgagaacgacaccaccttcggtcacatgtgtgctgtgatgaggggattggaccggatgcactcggacctgcacaaggcgaccaaggccttgaatgatgggaagctcatgaggatcgtcgctctgaaggacgagatagcgcgcctgaagaaggagaatgctcagttgaagggtcttccagtaccaggaggagtccggatccgcactacgccccgtaagaggacgactgcacccgtgcgcatccagcttgcgcccaggaacccacctccaccagcagctcccgcagcacctccagttccgcccgcagctccggcagttcccgcagttcctccagctccagctccagctccagctcccgcgttcactctctccttcgctccagcatcagccgccagaggtccagccagtggtaccggaggttgcttgtttgggatggtctacaccaggactggcaaccgcacgacaggcgagggcagcaacggtgaagaacgcgctgatggtgtgcaccccaacggtgattctggcaatggtccgccaccacttcccgagaatccgacccttgcccaagttatggcacatcagactcagatgatggcagccatgatgcagcagatgcagcagcagcaccagcagatgcaccagaggatgatgcagcacgccgaacagcagcaccagcagtttggtccccctccccctcagtccaagttgccagagtttctacgcgtcaggccacccaccttctccagcaccaccaaccccatggaggcgaacgactggctccatgcaatagagaagaagctgaatctcctgcagtgcaatgatcaggagaaggtcgctttcgccacacaccagcttcagggtcctgcgtcagcttggtgggacaaccacatggccacccgcccaccgggtactgaagtcacatgggcagagttctgccgtagcttcaggaaggcacaggtgccagatggggtcgtggcacaaaagaagagggaattccgtgcgctccatcagggcaacaggactgtgacagagtacctccatgagttcaatcgcctcgcgcgatatgcaccagaggatgtccgcaccgacgccgagaagcaggagaagttcatggcgggtctggatgatgagctgaccaaccaactgatatctggggactacgccgactttgagaggctggttgacaaggcaatccgtcaggaggaccaacgcaacaagatggacaggaaaagaaaggcggcgcagttccggtccaaccaaggtagtcagcaccgaccgcgcttcactcccggacagcagggtggacctaccaccatgatcgtccgccagcaccgcccgttcaaccctagcaacttccatcagggcaccagtggcagccagaaccaccatggaagtcagcccaaccgcggtacagctccacgcccatcagtggcaccggcacaatcaggccagcccgcacaagccaagaaggagacgggagcaaaaccagggtcctgcttcaactgtggcgagcttggccacttcgctgacaaatgcccgaagcccaggcgtgccggaccaaggtttatccaggctcgtgtcaaccacgcgtctgcggaggaggcacaagcagcaccagaggtcgtactgggtacgtttcctgttaactcaatccctgcaacagtactttttgattctggtgcaacgcattctttcatctcaaagaaatttgtcgggatgcatgggttaataagagaggaacttagcacaccgatgcgggttcataccccagggaatagctccacttcggttcaattcagcccttctataacaatagaaattcaaaggtcaccatttctagccaacctcattcttctcgaatccaaagacctagatgtcattcttgggatggattggctgaccaagtttaagggagtcatcgactgtgcgagtcgcacagtcaccttgaccaacgagaagggagaaacagtggtgtacaaatctctagtctcaccaaagaaaggggtctcgttgaatcagattgagacggaaatcccagtggataccgtagagaagaacttgagaaaattggaagatatacccatagtctgcgagtatccagaagtgttccccgaagacctcactaccatgccacccaagagggagattgaattccggattgatttggcaccaggaaccgctccaatctataagagaccgtacagaatggcggccaacgaattagcggaggtcaagaagcaagttgatgaacagctgcagaaagggtacatacgaccaagcacttcaccttggggcgctccggtcatttttgtggagaaaaaggataagacaaagaggatgtgcgtcgattatcgcgcacttaacgaggtcacaatcaagaataaatatcctttaccgcgaatcgacgatttatttgatcaactgaaaggagctaaagtgttttctaagatagacctgcgatcaggctaccaccagttgagaatccgggaagaggatattccgaagacggccttcaccactcggtacgggctatatgagtgcacggttatgtctttcggacttaccaacgcacccgcattcttcatgaatctgatgaacaaagtgttcatggaatttctggacaagtttgttgtggtattcatcgacgacatacttatctactcaaaatccgaggaagaacatgagcaacatctccgtctggtactcgaaaagttgaaggagcaccagctatacgccaagttcagcaagtgtgacttctggttgacggaagtaaaatttctgggtcatgtcattacagctcagggtgtggcagtcgacccatcgaacgtggagtcagttaccaagtggaccccaccgaagacagtgtcgcagattcgaagttttctaggactggctggttattaccgccgattcatcgaaaatttctccagaatcgcccgacccatgactcagttgcttaagaaagacgagaagtttaaatggacagctgagtgcgataagagctttgaggagctcaagaagaaattagtatccgcaccggttttgatcctgcccgaccagatgaaagacttccaagtctattgtgatgcatcccgtcacggacttggatgtgtcctaatgcaagagggcagagtggttgcatatgcctcgcggcagttgcgtccacacgagggaaattatccaactcatgacttggaattggcagcagtggttcatgctttgaagatctggaggcactatctgattggaaaccgctgcgaagtatatacggaccataagagtctgaaatacatcttcacccaaccggacctaaaccttcgacaacgaagatggttggaactaatcaaagactatgacatgagtattcactaccacccgggtaaagccaatgtggtggcagacgcattaagccgaaaaagttactgcactgccctatgcatcgagggcttgtgtgagaaattgcggcaggagtttgagcatctcaacgtgggaattgttgaacacgggttcgtagccgctctggaggcacggcctactctcgtggatcaagtcagagcagctcaagtaaatgattctgagatagcagagctgaaaaagaatatgagagtcggaaaggcccgggatttccacgaagatgagcatggcacaatctggatgggagaaagattgtgtgtacctgacgacaaggaactgaaggatctgatactcaccgaggctcatcagacccagtactccattcacccaggcagcaccaaaatgtaccaagacctcaaggaaaaattttggtgggtcagcatgaggagagaaatagctgaattcgtcgcactctgcgatgtttgccaacgagtgaaagcagagcaccaaagaccagcaggtttactccaacctctccaaatcccggaatggaaatgggaggagattggaatggactttataacaggactgccccggacatcatcgggacatgattcaatctgggtagtcgtggatcgactcactaaggttgctcactttataccagtacataccacctatacgggaaagagattggcagaattgtacctcgcaaggatcatgtgtttgcatggggtacccaagaagatagtatccgaccgaggtagtcagttcacctcaaagttttggcagaaactgcaggaagaaatggggacccgtttaaatttcagcacggcctatcacccgcaaactgatggtcagaccgagcgagtcaatcaaatcttggaggatatgttgagagcttgcgctcttgattttggtggagcttgggacaaaagcttgccatatgcggaattctcgtacaacaacagctaccaggccagtctacagatggcaccgtttgaagctttatacggccggaagtgccgcacacctctcttctgggatcagacaggcgaacgtcaactgttcggaacagaagtattagcggaagcagaagagaaagtcagaatcatcagggaaaggttgaggattgctcagtctcgacagaagagctacgcggataaccgtcgaagggagctcacttttgaggccggagactacgtgtatcttcgtgtcactccgctccggggagtacaccgttttcagacgaaaggcaagttggcaccacgcttcgtgggaccatacaaaatcttggaacgaaggggagaagttgcctatcagctagaacttccatccaatatgatcggcatccatgacgtgttccacgtgtcccaattaaagaagtgtttaagggtacctgaagaacaggctgattcggaacacattgatatccaggaggacctaacctatgtggagaagccggttcgcatacttgatgccagcgaaaggagaaccagaaacaaggttacccggttttgccgagttcagtggagtcatcattcggaagaggaagcaacctgggaaagggaagatgagttgaaagccgcccatccgcacctcttcaccagctcctccgaatctcggggccgagattccgtttaa

SEQ ID NO: 13839 - DNA, 1062 bp, Oryza sativa
  Clone ID: TFbOSC401097j.C1.o3.fg
atgtctgaggtcggatcacaagatgagtttgtgaagacaaatacggacggttctgagaagggcgagtattctggtggcaacaggccagtcatgtcacggattggtaagatggcgccgacaggaagggacggatctgacagcacatgtgaacgttttcaatcaacagtcactgatcttgtgaagatggatgtggaagttgacgatgaagacaaggctatagttcttttgtgttcgttacctgaatcgtatgagcatgtggtgactactttgacgtacggcaaggagaccatcaaaactaaagatatcacttctgcgttgttggctcgtgatcagatgagaaagaacaaagagggtgaaacatctcaagcggagggtttgctagtcaaagaagatcatgctgggcataaggtaaagaagaacaaaaagaagaagatggtgcagtgcttcagatgtgatgagttggggcatataagcagggagtgtccaacactaaagggaaaagctaaggctaatgcagcgacttcttcgaatgactcggatagcgatggttgtgatcttctcacgatgtcaagtgcacagtctaaggatgcagaagtgtggatattagatttagctagcttgtttcatgtgacgccaaggaaggagtggttctcttcatacaagtctggtgagtgtggttttgtctacttaggcgatgacacaagttatccagccgtgggagtaggtgaagtcaaaattaagctagaagatggagggctaaagaggaatctgatttcgcttggaaccttgcatgaagaagggttaatattccacggtaatcggaataggaagaccattgagatcatgaagggcaagatgactgtgatgactggagaaaaggtggagtcgcatctttacaagctgcaagggtgcactgttgcaggtggagtccaggaggaagcggttgctgggataggaattgtttttgtggcggcgggtctagcgcagactcgtcgggcggcttgcggtgaagctgcaaagaagacaacccaagtctggaagacaggtggatcggcatggtga

SEQ ID NO: 13840 - DNA, 4950 bp, Oryza sativa
  Clone ID: TFbOSC401127j.C1.o10.fg
atggccggtcacccacccaaccaccgcggagaaggcatgatcgatttcgtggcagagttggcacgtatgacactggtggtgggctaccccaacgcgccggagtacacgaccattccaccgctcagtggcgagcttcctcaccgtgttcgcttggaggtccatggctacgtggggacttgcctcgctaacatggcggtcgaggcgtcaggaggcacagcagatcacgcctgtcaggaggcagcctacttgatgatggccagactacgggagcgccacaactacatcttccacgacacggcgtaccgctaccacccccgtcgagccaacggtgatggcgtcagctccttccgtccgacagctggcgagaacgacaccacctttggtcacatgtgtgctgtgatgaggggattggacaggatgcactcggacctgcacaaggcgaccaaggccttgaacgatgggaagctcatgaggatcgtcgctctgaaggatgagatagcgcgcctgaagaaggagaacgctcagctaaagggtcttccagcgccaggaggagtccggatccgcaccacgccccgcaagacgacgactgcacccgtgcgcatccagcttgcgcccaggaaaccacctccaccagcagctcccgcagcacctccagttccgcccgcagttcctgcagctccagttccagctcccgcgttcactctctccttcgctccagcatcagccgccagaggtccagccagtggcaccggaggttgcttgtttgggatggtctacaccaggaatggtagccgtgcaacaggcgagggcagcaacggcgaagaacgcgctgatggtgtgcaccccaacagtgattctggcaatggtccgccaccacttcccgagaatccgacccttgcccaagttatggcacatcagactcagatgatggcagccatgatgcagcagatgcagcagcagcaccagcagatgcaccaaaggatgatgcagcacgccgaacagcagcaccagcagtttggtccccctccccctcagtccaagttgccagagtttctacgcgtcaggccacccaccttctccagcaccaccaaccctatggaggcgaacgactggctccatgccatagagaagaagctgaacctcctgcagtgcaatgatcaggagaaggtcgctttcgccacacaccagcttcagggtcctgcgtcagcttggtgggacaaccacatggccacccgcccaccgggtactgaagtcacatgggcagagttttgccgtagcttcaggaaggcacaggtgccagatggggtcgtggcacaaaagaagagggaatttcgtgcactccatcagggcaacaggactgtgacagagtacctccatgagttcaatcgcctcgcgcgatatgcaccagaggatgtccgcaccgacgccgagaagcaggagaagttcatggcgggtctggatgacgagctgaccaaccaactgatatctggggactacgccgactttgagaggctggttgacaaggcaatccgccaggaggatcaacgcaacaagatggacaggaagaggaaggccgcacagttcagggcacctcagggaagtcaccagaggccgcgcttcactcccggacagcagggtggacctaccaccatgatcatccgccagcaccgcccgttcaaccctagcaacttccaccagggcaccagtggcagtcagaaccaccatggaggtcagcccaaccgcggtgcagctccacgcccatcagtggcaccggcacagtcaggccagcccgcgcaagccaagaaggagacgggagcaaaaccagggtcctgcttcaactgtggcgagcttggccacttcgctgacaaatgcccgaagcccaggcgtgccgggccaaggtttatccaggctcgtgtcaaccacgcatctgcggaggaggcacaagcagcaccagaggtcgtactgggtacgttccctgttaactcaatccctgcaacagtactttttgattctggtgcaacgcattctttcatttcaaagaaatttgtggggagatcaccatttctagccaacctcattcttcttgaatccaaagacctagatgtcattcttgggatggattggctgaccaagtttaagggagtcatcgattgtgcgagtcgcacagtcaccttgaccaacgagaagggggaaaccgtggtgtacaaatctctagtctcgccaaagaaaggggtctcgttgaatcagattgagacggaaatcccagtggacaccgtagagaagaacttgagaaaattggaagatatacccatagtctgcgagtatccagaagtgttccccgaagacctcactaccatgccacccaagagagagattgaattccggattgacttggcaccgggaactgctccaatctataagagaccgtacagaatggcggccaacgaattagccgaggtcaagaagcaggttgatgagcagctgcagaaagggtacattcgaccaagcacttcaccttggggcgctccggtcatttttgtggagaaaaaggataagacgaagaggatgtgcgttgattatcgcgcactcaacgaggtcacaatcaagaacaaatatcccttgccgcgaattgacgatttatttgatcaactgaaaggagctaaagtgttttctaagatagacctgcgatcaggctaccaccagttgagaatccgggaagaggatattccgaagacggccttcaccactcggtacgggctatatgagtgcacggttatgtctttcggacttaccaacgcacccgcattcttcatgaatctgatgaacaaagtgttcatggaatttctggacaagtttgttgtggtgttcatcgacgacatacttatctactcaaaatccgaggaagaacatgagcaacatctccgtctggtactcgaaaagttgaaggagcaccagctatacgccaagttcagcaagtgtgacttctggttgacggaagtcaaatttctgggtcatgtcattacagctcagggtgtggcagtcgacccatcgaacgtggagtcagttaccaaatggaccccacctaagaccgtgtcgcagattcggagttttcttggacttgcgggttattaccgccgattcatcgaaaatttctccagaatcgcccgacccatgactcagttgcttaagaaagatgagaagtttaaatggacagctgagtgcgataagagttttgaggagctcaagaagaaattagtatccgcaccagttttgattctgcccgacccgacgaaagacttccaagtctattgtgatgcatcccgtcacggacttggatgtgtcctaatgcaagagggcagagtggttgcgtatgcctcgcggcagttgcgtccacacgaaggaaattatccaactcatgacttggaattggcagcagtggttcatgctttgaagatctggaggcactatctgattggcaaccgctgcgaagtatatacggaccataagagtctgaaatacatcttcacccaaccggatctaaaccttcggcaacgaagatggttggaactaatcaaagactacgacatgagtattcactaccacccgggtaaagccaatgtggtggcagacgctttaagccggaaaagttactgcactgccctatgcatcgagggcatgtgtgaggaattgcggcaggagtttgaacatctcaacatgggaattgttgaacacgggtttgtagccgctctggaggcacggcccactctcgtggatcaagtcagagcagctcaagtaaatgattctgagatagcagagctgaaaaagaatatgagagtcggaaaagcccgggatttccacgaagatgagcatggcacaatctggatgggagaaagattgtgtgtacctgacgacaaggaatcgaaggatctgatactcaccgaggctcatcagacccagtactccattcatccaggcagcactaaaatgtatcaagacctcaaagaaaagttttggtgggttagcatgaggagagaaatagctgaattcgtcgcactctgcgatgtttgccaacgagtgaaggcagagcaccaaagaccagcaggtttactccaacctcttcaaatcccggaatggaaatgggaggagattggaatggactttataacaggactgccccggacatcatcgggtcacgattcaatctgggtagtcgtggatcgactcactaagcttgtggacaaaagcttgccatatgcggaattctcgtacaacaacagctaccaggccagtctacagatggcaccgtttgaagctttatacggccggaagtgccgcacgccgctcttctgggatcagacaggcgaacgtcaactgttcggaacagaagtattagcggaagcagaagagaaagtcagaatcatcagggaaaggttgaggattgctcagtctcgacagaagagctacgcggataaccgtcgaagggagctcacttttgaggcaggagattacgtgtatcttcgtgtcactccgctccggggagtacaccgttttcagacgaaaggcaagttggcaccacgcttcgtgggaccatacaaaatcttggaacgaaggggagaagttgcttatcagctagaacttccatccaatatgatcggcatccatgacgtgttccacgtgtcccaattaaagaagtgtttaagggtacctgaagaacaggctgattcggaacacattgatatccaggaggacctaacatatgtggagaagccggttcgcatacttgataccagcgaaaggagaaccagaaacaaggttacccggttttgccgagttcagtggagtcatcattcggaagaggaagcaacctgggaaagggaagatgagttgaaagccgcccatccgcacctcttcaccagctcctccgaatctcggggccgagattccgtttaa

SEQ ID NO: 13841 - DNA, 3345 bp, Oryza sativa
  Clone ID: TFbOSC401161j.C1.o52.gm
atggtctacaccaggactggcaaccgcacggcaggcgagggcagcaatggcgaagaacgcgctgatggtgtgcaccccaacagcgattccggcaatggtccgccaccccttcccgagaatccgacactggcccaagttatggcacatcagactcagatgatggcagccatgatgcagcagatgcagcagcagcaccagcagatgcaccagaggatgatgcagcacgccgaacaacagcaccagcagtttggtccccctccccctcaatccaagctgctagagtttctacgcgtcaggccacccaccttctccagcaccaccaaccccatggaggcgaatgactggctccatgccatagagaagaagctgaatctcctgcagtgcaacgatcaggagaaggtcgctttcgccacacaccagcttcagggtcctgcgtcagcttggtgggacaatcacatggccacccgcccgccaggcgctgaagtcacttgggcggagttttgccgtagtttcaggaaggcacaggtgccagacggggttgtagcgcaaaagaagagggaattccgggtgctccatcagggcaacaggacagtgacagagtaccttcatgagttcaatcgcctcgcgcgatatgcaccggaggatgtccgcactgacgccgagaaacaggaaaagtttatggcaggcctggatgacgagctgaccaaccaactgatatctggggactacgctgattttgaaaggctggttgacaaggcaatccgtcaggaggatcagcgcaacaaaatggacaggaagagaaaggcggcgcagttccggtccaaccaaggtagtcagcaccgaccgcgtttcactcccggacagcagggtggacctaccaccatgatcgtccgtcagcaccgcccgttccactctagcaacttccaccagggcgctagcggcagtccgaaccaccagggaggccagcccaaccgtggtgcagctccacgcccaccaatggcaccagcacagccagccccgtccgcgcaagccaagaaggagactggcacaaaaccggggtcctgtttcaactgtggcgagcttggccactttgccgacaaatgcccgaagcccaggcgtgccggaccaaggtttatccaggctcgtgtcaaccacgcgtctgcggaggaggcacaagcagcaccggagatcgagacggaaatcccagtggacaccgtggagaaaagcttgaggaaattggaagatatacccatcgtctgtgagtatccagaagtgtttcctgaagacctcactaccatgccacccaagagagagattgaattccggattgatttagcaccgggaaccgcagcaatttacaagagaccgtacaggatggcggccaacgaactagcagaggtcaagaagcaggtcgatgagcaactacagaaaggatacatccgaccgagtacttcgccttggggtgctccggtcatttttgtggagaaaaaggataagacgaagaggatgtgcgtcgattaccgcgcactcaatgaggtcacgatcaagaataaatatcctttaccgcggattgatgatttgtttgatcaactgaagggagctaaggtgttctccaagatagacctgcgatcaggctatcaccagttaaggatccgggaagaggatatcccaaagacggccttcaccactcggtacgggttatatgagtgcacggttatgtctttcggactcaccaacgcacccgcattcttcatgaatctaatgaacaaagtgttcatggagtttctggacaagtttgttgtggtattcatcgacgatatacttatctactcaaagtctgaagaagaacatgagcagcatctccgtctggtactcgagaagttgaaggagcaccagttatacgccaagttcagcaagtgtgatttctggttgacggaagtcaaatttctgggtcatgttattacagctcagggtgtggccgtcgacccatccaacgtggagtcggttaccaaatggaccccaccgaagaccgtgtcgcagattcgaagttttcttggacttgcgggatattaccgccgattcatcgaaaacttctccagaatcgcccgacccatgactcagttgcttaagaaggatgagaagtttaaatggacagctgagtgcgataaaagttttgaggagctcaagaagaaattagtatctgcaccagttttgattctgcccgaccagatgaaagacttccaagtctattgcgatgcatcccgccacggacttggatgtgtcctaatgcaagagggcagggtggttgcgtatgcctcacgacagttacgtccacacgaagggaattatccaactcatgacttggaattggcagcggtggttcatgctttgaagatctggaggcactatctgatcggcaaccgctgcgaggagtttgagcacctcaacgtgggaattgttgaacacgggttcgtagccgctctggaagcacggcctacgctcgtcgatcaagttagagccgctcaagtaaatgatcctgaaatagcagagctgaaaaagaacatgagagtcggaaaggctcgggatttccttgaggatgagcatggcacaatctggatgggagaaagattgtgtgtacctgacgacaaggaactgaaagatctgatactcaccgaggctcatcaaacccagtactccattcacccaggcagcaccaaaatagcatcaaaggccagcaggcttactccaacctcttcaaatcccggaatggaaatgggaggaaattggaatggactttataacaggactgccccggacatcatcgggtcacgattcaatctggaggtattagcggaagcagaagagaaagtcagaatcatcagggaaaggttgaggattgcccagtctcgacagaagagctacgcagataaccgtcgaagggagctcacttttgaggcaggagattacgtgtatcttcgcgtcactccgctccggggagtacaccgctttcagacaaaaggcaagttggcaccacgcttcgtgggaccatacaagatcctggaacgaaggggggaagttgcttatcagttagaacttccatccaacatgatcggcatccatgacgtgttccatgtgtcccaattaaagaagtgcttaagggtacctgaagaacaggctgattcggaacacattgatatccaggaggatttgacatatgtggagaagccggcaagggtgggcgtgatggagcggggcgggccctgcgacggcctctatcgcttccggattcacctaggcacgagaggggactgcccgttgcccgctggggacgggggtgaaacctga

SEQ ID NO: 13842 - DNA, 2985 bp, Oryza sativa
  Clone ID: TFbOSC401171j.C1.o7.np
atggccggtcacccacccaaccaccgcagagaaggcatgatcgactttgtggccgagttggcacgcatgacactggtggtgggctaccccaacgcgccggagtacacgaccattccaccgctcagtggcgagcttcctcaccgtgtccgcttggaggtccatggctacgtggggacttgcctcgctaacatggcggtcgaggcgtcaggaggcacagcagatcacgcctgtcaggaggcagcctacctgatgatggccagactacgggagcgccacaactacatcttccacgacacggcgtaccgctaccacccccgtcgcgccaacggtgatggcgtcagctccttccgtccgacggctggcgagaacgacaccacctttggtcacatgtgtgctgtgatgaggggattggacaggatgcactcggacctgcacaaggcgaccaaggccttgaacgatgggaagctcatgaggatcgtcgctctgaaggacgagatagcgcgcctgaagagggagaacgctcacctaaagggtcttccagcgccaggaggagtccggatccgcactacgccccgcaagacgacgacgacacccgtgcgcatccagcttgcgcccaggaacccacctccagcagcagctcccgcagcacctccagttccgcccgtagttcctgcagctccagctccagcccccgcgtccgctctctccttcgctccagcatcagccgccagaggtccggccagtggcaccggaggttggttgtctgctactcccagtggcagccgcgatctcagcagcagcagctccagtggctcacagtcaggcagcggcgagacatatctgccaggctccaggagtcgctcagagggacctgatggtctacaccaggactggcaaccgcacgacaggcgagggcagcaacggcgaagaacgcgctgatggtgtgcaccccaacagtgattccggcaatggtccgccaccacttcccgagaatccgacccttgcccaagttatggcacatcagactcagatgatggcagccatgatgcagcagatgcagcagcagcaccagcagatgcaccagaggatgatgcagcacgtcgaacagcagcaccagcactttggtccccctccccctcagtccaagttgcctgagttcctacatgtcaggccacccaccttctccagcaccaccaaccctatgaaggcaaatgactggctccatgcaatagagaagaagctgaatctcctgcagtgcaatgatcaggagaaggtcgctttcgccacacaccagcttcagggtcctgcgtcagcttggtgggacaaccacatggccacccgcccaccgggtactgaagtcacatgggcagagttctgccgtagcttcaggaaggcacaggtgctagatggggtcgtggcacaaaagaagagggaatttcgtgcactccaccagggcaacaggactgtgacagagtacctccacgagttcaatcgcctcgcacgatatgcaccagaggatgtccgcaccgacgccgagaagcgggagaagttcatggcgggtctggatgatgagctgaccaaccaactgatatccggggactacgctgactttgagaggctggttgacaaggcaatccgtcaggaggaccaacgcaacaagatggacaggaagaggaaggccgctcagttcagggcacatcagggaagtcaccagaggccgcgcttcactcccggacagcagggtggacctaccaccatgatcgtccgccagcaccgcccgttcaaccctagcaactttccccagggcgccaatggcagtcagaaccaccatggaggtcagcccaaccgcggtgcagctccacgcccaccaatggcaccggcacagtcaggcccgtccgcgcaagccaagaaggagactggagcaaaaccagggtcctgcttcaactgtggcgagcttggccacttcgctgacaaatgcccgaagcctaggcgtgccgggccaaggtttatccaggctcgtgtcaaccacgcatctgcggaggaggcacaggcagcaccagaagtggtactgggtacgtttcctgttaactcaatcgctgcaacagtactttttgattctgatgcaacgcattctttcatttcaaagaaatttgtggggatgtatgggttaaggaaagaagaacttagcacaccaatgagagttcataccccgggaaatagttcaacctcagtcagttttagcccttcagtgctaatagaaatccaaagatcaccatttctagccaacctcattcttctcgaatccaaagacctagatgtcattcttgggatggactggctgaccaagttcaagggagtcatcgattgtgcgaatcgcacagtcaccttgaccaacgagaagggagaaaccgtggtgtacaaatcactagcctcaccaaagcaaggggtctcgttgaatcagattgagacggaaatcccagtggacaccgtagagaagaacttgagaaaattggaagatatacccatagtctgcgaatacccagaagtgttccccgaagacctcactaccatgccacccaagagagagattgaattccggattgacttggcaccgggaactgctccaatctataagagaccgtacagaatggcggccaacgaattagcagaggtcaagaagcaagttgatgagcagctgcagaaagggtacattcgaccaagtacttcaccttggggtgctccggtcatttttgtggagaaaaaggataagacgaagaggatgtgcgttgattatcgcgcactcaacgaggtcacaatcaagaacaaatatcctttgccgcgaatcgatgatttgtttgatcaactgaagggagctaaagtgttttctaagatagacctgcgatcaggctaccaccagttgagaatccgggaagaggctataactgccactggatttcatacaggccatggcaaggcaagccatgc

SEQ ID NO: 13843 - DNA, 5472 bp, Oryza sativa
  Clone ID: TFbOSC401197j.C1.o33.fg
atggaaagacctaagagccctctgaatccttttcattgcatatgttccttgcaattggattttgttccgggaaaatggggatctgttcttgtggttcaagggaaaaatcttggtcgctcgtttaaaatggccggtcacccacccaaccaccgcggagaaggcatgattgatttcgtggcagagttggcacgcatgaccctggtggtgggctaccccgacgcgccggagtacacgaccatcccaccgctcagtggcgagcttcctcaccgtgtccgcttggaggtccatggctacgtggggacttgcctcgctaacatggcggttgaggcgtcaggaggcaccgcagatcatgcctgtcaggaggcagcctacttgatgatggccaggttacgggagcgccacgactacatcttccacgacacggcgtaccgctaccacccccgtcgagcccatggtgatggcgtcagctccttccgtccgacagctggcgagaacgacaccaccttcggtcacatgtgtgctgtgatgaggggattggataggatgcactcggacctgcacaaggcgaccaaggccttgaacgatgggaagctcatgaggatcgtcgctctgaaggacgaggtagcgcgcctgaagaaggagaatgctcagttgaagggtcttccagcaccaggaggagtccggatccgcactacgccccgtaagaggacgactgcacccgtgcgcatccagcttgcgcccaggaacccacctccaccagcagctcccgcagcaccttcagttctgcccgcagttcctgcagctccagcttcagctccagctccagctcccgcgttcactctctccttcgctccagcatcagccgccagaggttcagccagtggtaccggaggttgcttgtttgggatggtctacaccaggactggtagccgcgcaacaggcgagggcagcaacggtgaagaacgcgctgatggtgtgcaccccaacggtgattctggcaatggtccgccaccacttcccgagaatccgacccttgcccaagttatggcacatcagactcagatgatggcagccatgatgcagcagatgcagcagcagcaccaacagatgcaccagaggatgatgcagcacgccgaacagcagcaccagcagtttggtccccctccccctcagtccaagttgccggagtttctacgtgtcaggccacccaccttctccagcaccaccaaccctatggaggcaaatgactggctccatgcgatagagaagaagctgaatctcctgcagtgtaatgaccaggagaaagtcgctttcgccacacaccagcttcagggtcctgcgtcagcttggtgggacaaccacatggccacccgcccaccgggtactgaagtcacatgggcagagttctgccgtagctttaggaaggcacaggtgccagatggggtcgtggcacaaaagaagagggaattccgggcgctccaccagggcaacaggactgtgacagagtacctccatgagttcaatcgcctcgcgcgatatgcaccagaggatgtccgcaccgacgccgagaagcaggagaagttcatggcgggtctggatgacgagctgaccaaccaactgatatctggggactacgccgactttgagaggctggttgacaaggcaatccgtcaggaggatcagcgcaacaaaatggacaggaaaagaaaggcggcgcagttccggtccaaccaaggtagtcagcaccgaccgcgcttcactcccggacagcagggtggacctaccaccatgatcgtccgccagcaccgcccgttcaaccctagcaacttccaccagggcactagtggcagtcagaaccaccatggaggccagcccaaccgcggtgcagctccacgcccaccgatggcaccggcacagtcaggccagcccgcacaagccaagaaggagacgggagcaaaaccagggtcctgcttcaactgtggcgagcttggccacttcgctgacaaatgcccgaagcccaggcgtgccggaccaaggtttatccaggctcgtgtcaaccacgcatctgcggaggaggcacaagcagcaccagaggtcgtactgggtacgtttcctgttaactcaatccctgcaacagtactttttgattctggtgcaacgcattctttcatctccaagaaatttgtcgggatgcatgggttaataagagaggaacttagcacaccgatgcgggttcataccccagggaatagctccacttcggttcaattcagcccttctataacaatagaaattcaaaggtcaccgtttctagccaacctcatccttctcgaatccaaagacctagatgtcattcttgggatggattggctgaccaagtttaagggagtcatcgattgtgcgagtcgcacagtcaccctgaccaatgagaaaggagaaaccgtggtgtacaaatctctagtctcgccaaagaaaggagcctcgttgaatcagattgagacggaaatcccagtggacaccgaagagaagaacttgagaaaattggaggacatacccatagtctgcgagtatccagaagtgttccccgaagacctcaccaccatgccacccaagagggagattgaattccggattgatttggcaccaggaaccgctccaatttacaagagaccatacaggatggcggccaacgaattagcagaggtcaagaagcaagttgatgaacagctgcagaaagggtacatacgaccaagcacttcaccttggggcgctccggtcatttttgtggagaaaaaggataagacaaagaggatgtgcgtcgattatcgcgcacttaacgaggtcacaatcaagaataaatatcctttgccgcgaatcgacgatttatttgatcaactgaaaggagctaaagtgttctctaagatagacctgcgatcaggctaccaccagttgagaatccgggaagaggatattccgaagacggccttcaccactcggtacgggctatatgagtgcacggttatgtccttcggacttactaacgcacccgcattcttcatgaatctgatgaacaaagtgttcatggaatttctggacaagtttgttgtggtattcatcgacgacattcttatctattcaaagtccgaggaagaacatgaacaacatctccgtctagtactcgagaagttgaaggagcaccagctatacgccaagttcagcaagtgtgacttctggttgacggaagtcaaatttctgggccatgtcattacagctcagggtgtagcagttgatccatcgaacgtggagtcagttaccaagtggaccccaccgaagacagtgtcgcagattcgaagttttctaggactggctggttattaccgtcgtttcatcgaaaacttctcaagaatcgcccgacccatgactcagttgcttaagaaagacgagaagtttaaatggacagctgagtgcgacaagagctttgaggagctcaaaaggaaattagtatccgcaccggttttgatcctgcccgaccagacgaaagacttccaagtctattgcgatgcatcccgtcacggacttggatgtgtcctaatgcaagagggcagagtggttgcatatgcctcgcggcagttgcgtccacacgaaggaaattatccaactcatgacttggaattggcagcagtggtccatgctttgaagatctggaggcactatctgatcggcaaccgctgcgaagtatatacggaccataagagtctgaaatacatcttcacccaaccagacctaaaccttcgacaacgaagatggttggaactaatcaaagactatgacatgagtattcactaccacccgggtaaagccaatgtggtggcagacgctttaagccggaaaagttactgcactgctctatgcatcgagggcatgtgtgaggaattgcggcaggagtttgagcatctcaacgtgggaattgttgaacacgggttcgtagccgctctggaggcacggcctacgctcgtggatcaagttagagccgctcaagtaaatgatccggaaatagcagaactgaaaaagaacatgagagtcggaaaggctcgggatttccttgaggatgagcatggcacaatctggatgggagaaagattgtgtgtaccggacgacaaggaattgaaggatctgatactcaccgaagctcatcagaccccgtactccattcatccaggcagcactaaaatgtatcaagacctcaaagagaagttttggtgggtcagcatgaggagagaaatagctgaattcgtcgcactctgcaatgtttgccagcgagtgaaagcagagcaccaaagaccagcaggtttactccaacctcttcaaatcccggaatggaaatgggaggagattggaatggactttataacaggactgccccggacatcatcgggacatgattcaatctgggtagtcgtggatcgactcaccaaggtggctcactttataccagtacataccacctatacgggaaagagattggcagaattgtacctcgcaaggatcatgtgtttgcatggggtacccaagaagatagtatccgaccgaggtagtcagttcacctcaaagttctggcagaagctgcaggaagaattggggacccgtttgaatttcagcacggcctatcacccgcaaactgatggtcagaccgagcgagtcaatcaaatcctggaagatatgttaagagcttgcgctcttgattttggtggagcttgggacaaaagcttaccatatgcggaattctcgtacaacaacagctaccaggccagtctacagatggcaccgtttgaagctctatacggccggaagtgccgcacacctctcttctgggatcagacaggcgaacgtcaactgttcggaacagaagtattagcggaagcagaagagaaagtcagaatcatcagggagagattgaggattgctcagtctcgacagaagagctacgcggataaccgtcgaagggagctaacttttgaggccggagactacgtgtatcttcgtgtcactccgctccggggagtacaccgtttccagacgaaaggcaagttggcaccacgcttcgtgggaccatacaaaattttggaacgaaggggagaagttgcttatcagctagaacttccatccaatatgatcggcatccatgacgtgttccacgtttcccagttaaagaagtgcttaagggtacccgaagaacaggctgattcggaacacattgatatccaggaagacctgacatatgtggagaagccggttcgcatacttgataccagtgaaaggagaaccagaaacaaggtcacccggttttgccgagttcaatggagtcatcattcggaagaggaagcaacctgggaaagggaagatgagttgaaagccgcccatccgcacctcttcaccagctcctccgaatctcggggccgagattccgtttaa

SEQ ID NO: 13844 - DNA, 3579 bp, Oryza sativa
  Clone ID: TFbOSC401235j.C1.o16.fg
atgggttgcaagatggccggtcacccacccaaccaccgcggagaaggcatgatcgactttgtggcagagttggcacgcatgacactggtggtaggctaccccaacgcgccagagtacacgacgattccaccgctcagtggcgagcttcctcaccgtgttcgcttggaggtccacggctacgtgggtacttgcctagctaacatggtggtcgaggcagctggaggcacagcagatcacgcctgtcaggaggcagcatacctgatgatggccagactacgagagcgccacaactacatcttccacgacacggcataccggtttcaccctcgtcgagccagcaatgatgatgtcagttccttccgtccgacagctggcgagaacgacaccacctttggtcacatgtgtgctgtgatgaggggattggacaggatgcactcggacctgcacaaggcgaccaaggccttgaacgatgggaagctcatgaggatcgtcgctctgaaggacgagataacgcgcctgaagagggagaacgcccagttaaagggtcttcccgcgccaggaggagtctggatccgcactacgccccgcaagactacgacggcacccgtgcgcatccagcttgcgcccaggaacccacctccatcagcagctcccgcagcacctccagttccacccacagttcctgcagctccagctccagctcccgcgtccgctctctccttcgctccagcatcagccgccagaggtccagccagtggcaccggaggttgtttgtttgggatggtctacaccaggaatggtagccgcgcaacaggcgagggcagcaacggcgaagagcgcactgatggggcgcacccccacagcgattctggcaatggtccgccaccacttcccgagaatccgacccttgcccaagttatggcacatcagactcagatgatggcagccatgatgcagcagatgcagcagcagcaccagcagatgcaccagaggatgatgcagcacgtcgaacagcagcaccagcactttggtccccctccccctcagtccaagttgcctgagttcttacgtgtcaggccacccaccttctccagcaccaccaaccctatggaggcgaatgactggctccatgcaatagagaagaagctgaatctcctgcagtgcaatgatcaggagaaggtcgcttttgccacacaccagcttcaaggtcctgcgtcggcttggtgggacaaccacatggccacccgcccaccgggtactgaagtcacatgggcagagttctgccgtagcttcaggaaggcacaggtgccagatggggtcgtggcacaaaagaagagggaatttcgcgcactccatcagggcaacaggactgtgacagagtacctccacgagttcaatcgcctcacgcgatatgcaccagaggatgtccgtaccgacgccgagaagcaggagaagttcatggcgggtctggatgacgagctgaccaaccaactgatatctggggactacgccgactttgagaggctagtcgacaaggcaattcgtcaggaggatcaacgcaacaagatggataggaagaggaaggccacacagttcagggcacctcagggaagtcaccagaggccgcgcttcactcccggacagcagggtggacctaccaccatgatcgtccgccagtaccgcccgttcaatcctagcaactttccccagggctctagtggcagtcagaaccaccatggaggtcaatccaaccgcggtgcagctccacgcccaccaatggcaccggcacagtcaggcccgtccgcgcaagctaagaaggagactggggcaaaaccagggtcctgcttcaactgtggcgagcttggccacttcgctgacaaatgcccgaagcctaggcgtgccgggccaaggtttatccaggctcgtgtcaaccacgcatctgcggaggaggcacaagcagcaccagaggtcgtactgggtacgttccctgttaactcgatccctgcaatagtactttttgattctggtgcgacgcattctttcatttcaaagaaatttgtcgggatgcatgggttaataagagagaaacttagcacaccgatgcgggttcataccccagggaatagctccacttcggttcaattcagcccttctataacaatagaaattcaaagatcaccatttctagccaacctcattcttctcgaatccaaagatctagatgtcattcttgggatggattggctgaccaagttcaagggagtcatcgattgtgcgaatcgcacagtcaccttgaccaacgagaaggggaaaacggtagtgtacaaatcaccagactcaccaaagcaaggagtctccttgaatcagattgaagcggaaatcccagtggacaccgtggagaagaatttgaggaaattggaagacatacccatagtctccgagtacccagaagtgttccccgaagacctcactaccatgccacccaagagagagattgaattccggattgacttggcaccgggaaccgctccaatttacaagagaccgtacagaatggcggccaacgaattagccgaggtcaagaagcaggttgatgagcagctgcagaaagggtacattcgaccaagtacttcaccgtggggtgctccggtcatttttgtggagaaaaaggataagacgaagaggatgtgcgttgattatcgtgcactcaacgaggtcacaatcaagaacaaatatcccttgccgcgaatcgacgatttatttgatcaactgaaaggagctaaagtgttttctaagatagacctgcgatcaggctaccaccagttgagaattcgggaagaggatattccgaagacggccttcaccactcggtacgggctatatgagtgcacggttatgtccttcggacttaccaacgcacccgcattcttcatgaatctgatgaacaaagtgttcatggaatttctggacaagtttgttgtggtgttcatcgacgacattcttatctattcaaagtccgaagaagagcatgaacaacatctccgtctggtactcgagaagttgaaggagcaccagctatacgccaagttcagcaagtgtgacttctggatgacggaagtcaaatttctgggtcatgtcattacagctcagggtgtggcagtcgacccatcgaacgtagagtcagtcaccaagtggaccccaccgaagaccgtgtcacagattcgaagttttctaggactggcaggttattaccgccgattcatcgaaaacttctccagaatcgcccgacccatgactcagttgcttaagaaagatgagaagtttaaatggacagctgagtgcgataagagtttcgaggagctcaagaagaaattagtatccgcactagttttgattctgcctgaccagatgaaagacttccaagtctattgcgatgcatcccgtcacggacttggatgtgtcctaatgcaagagggcagagtggttgcgtatgcctcgcggcagttgcgtccacacgaaggaaattatccaactcatgacttggaattggcagcagtggttcatgctttgaagatctag

SEQ ID NO: 13845 - DNA, 4971 bp, Oryza sativa
  Clone ID: TFbOSC401325j.C1.o17.fg
atgtcgggtcaaacggggaatggcaaggatggtgataagggaggtacgtttccttatgattatctctccacatctatatcttatgtgagcacctatagcggcaaagctccgtacttcaatggtacggactatgccgcttcgaaacataagatgaagatgcatttgaaatctattaaccctttgatttggagaatagtcgaaaaaggctatgttttacagaatcccgaggaacccaccaaggaggacgatgagaacgagcacaagaacgctcaagccgctaatgcaattcttagcgccttgagtggaagcgagttcaaccgtgtggacggcattgagagtgccaaagtgatttgggacacgcttcggaatttgcatgaaggcacggatagtgttcgcgagtccaaggtggagattctcaaggggcaatttgagcgcaagatcgttaatgagatcaagggacttggctccaaggacatgaccgatgaggttgtggtcaagaagatggttcgagcaatcactccaaggaactctaccttggtgaccatcattcgtgagcgtccggactataagactctcacacctcatgacttgctcggacgtatccttgcccataacatgctcgagcaagagtccaaggaggtcatccaatacatcaaccaaacctcaaccacaagcatcaagaaggaagacttggcattgaaggcgaaggaagaagaagaagagagtcgcaagagcaagagcaaggcggagatcgatgatgaagagatggctctcttcgtcaagaagttcggcaagttcatgaagcaaagcggcttcttcaagggaagttcgtccaagcattcctccaacaagtcaagtggaagacgctccgcaagggtgtgctatgtgtgcaaagagcccgggcacttcattacggattgcccccacatcaaggattgcctccacttcaaggaagacaagaagaagcttgagaagaaggagaagcacaagcatagcaagcatgatcgctatggccaagctcaccttgggatgatcttcggctccgactccgagtcaagctcaagtgatgaagaaggagttgccacgttcgccgtcaagccttcatcaccaccgagactcttcaactactcaagtgatgaggatgctcccatttgcctcatggcaaaggagcctaaggtaccctctcccctcaagtcatttaatgttgatcttgttagtgatttggaggaagatgttgaggatgaggttatggatgacgagttgttcaaatccatagccaaggaatccataccacacttgagtgagttgcttaggagaattgagaatcaatatgcaactcttgagaggcaagaggaattgctcattcgtgagaaagagcggtctcatgaactcaagagtgaacttgctaaggagagagagaaaaatgaggctttggtacggctttacaagcaaaccaaagagtctcatgctaatcttgaggtggcgaacgctcaacttcaagagagagtggatgacttggacaaagcttacctctctcttgaagagaagttcgaaaccttaaagaatagtgtctctttccctagcgaggcatcgtgctccaaaattgtcccaagcaatgaaccatgtgtgaggtgcaaagatattgatattgaaacttgtgctactaactctacttctttgagtgctttgcaaaagcaaaacgagaagcttatgggactccttcataatggcttacttaagtgccatatgggtagtaaggccctaaaggagtacctaggctatcaaagggacaacttcaaccatgaaggtcttgggtatgttcctccacctaaaggaagggtggacaagagtgtgatgatcaagaagccccaatgtcttagcaactttgttaaggccaaatgtatccttcctaatgataatgcttctcattgttttgatgcatcttatgttcttaggaagaacgctagtggtcgcgttgttgctaagtatgttggcccaaggggtaaaaatatttctatcaagagagtgctttgggtgcctaaggcacttgttactaacatgagaggacccaagcaagaatatgtctccggtggaagaagttgggtgattgatagtggttgtactaatcatatgaccggagaagaatcaatgttttcatctcttgatccaaatggcacttctcaagagaacatcatctttggggacgatggaaagggaaaggctagcccatgttggtatgaggaatcttcacaaacttctaaagcacgacacatccttggactaacaaatattcaatttgagaaagatagggtgtgtagtgcatgtcaagccgggaaacaaattggagcacatcacccagtcaagaacgtaatgactactacaagaccgttggagcttcttcacatggacctcttcgggccaattgcttatctaagcattggaggtaacaaatatggtcttgttattgttgatgacttttcatgcttcacgtgggtgttcttcttgcatgacaagagtgagacacaagccatcttcaagaagtttgcaagaagagcccaaaacgagttcgacctcaagatcaagaacattcgaagcgacaacgtcaaggaattcaagaacacgtgcatcgagagtttccttgatgaagaaggcatcaagcatgagttctcggctccatactcacctcaacaaaatggagtagccgagaggaagaatcggactctcatcgagattgcgaggacaatgttggacgaatacaagacatcggaccgcttttgggccgaagccgtcaacaccgtatgtcacgacatcaaccgcctctatcttcaccgccttcttaagaagactccctatgagcttcttaccggtaacaaaccaaatgtctcttactttcgtgttttcggtagtaagtgctacattcttaataagaaggctagatcctcaaagtttgctcctaaagtggatggggggttcttgcttggatatgggtcaaatgagtgcgcataccgcgttttcaacaaaacctccggtattgttgagatcgcgcctgatgtgacatttgacgaaactaacggctctcaagtagagcaagttgactcacatgtgttaggtgaagaggaggaccctagagaagcaatcaaaaggttggctcttggagacgtacgtcctagggagccacaacaaggggcctcttcctcaacacaagtggagccacctacatcgacccaagccaatgatccctctacttcaagcttggatcaaggtgaagaaggcgagcaagtgccaccctcttcaataaatctagctcacccaagaatccaccaaagtatccaacgagatcaccccaccgacaacatcttaggagacatcaacaagggagtatccactcgttctcatattgcaaatttttgtgagcattactcgtttgtgtcttctcttgaacctctaagggtggaagaagctcttaatgatccggattgggtgatggcgatgcaagaggagttgaacaatttcaccaggaatgaagtgtggactttggtggagcgatctcggcaaaatgtgattggcacaaagtggatctttcgcaacaagcaagacgaggccggggtcgtgataaggaacaaagcgaggttagtggcgcaagggttcacccaaatcgaaggattagatttcggtgaaacttttgcgccggtagctagacttgagtcaattcgcatattgcttacttttgctactaacctcaattttaagctatatcaaatggatgtcaaaagcgccttcctcaacgggcttatcaacgagttggtatacgtggagcaaccaccgggcttcaaggatccaaaatatcccaaccacgtgtacaagctccacaaggcactctacgagcttaagcaagcccctagagcttggtatgagtgtcttcgaaattttcttgtgaaaaacggctttgagatcgggaaagccgattcaactctttttactaaaagacatgataatgatatttttgtctgccaaatatatgtcgatgacattatatttggttctactaacaagtcttttagtgaagagtttagtaggatgatgaccaagcgttttgagatgtccatgatgggtgaattgaagttcttcctcggccttcaaatcaagcaactcaaggaaggaactttcatttgccaaacaaagtatttaaaggacatgctcaagaagtttggaatggagaatgcgaagccaatccacactcccatgccatcaaatggccacctcgacctcaacgagcaaggtaaagacgtcgaccaaaaggtataccgttccatcattggctcactcctttacctttgtgcatctaggcctgatattatgcttagtgtgtgcatgtgtgcaagatttcaagccgctccgaaggagtgtcaccttgtggccgtgaagagaattcttagatatttagtgcacacacctaatcttggtctttggtatcctaagggagcgaggtttgatctcattggttatgccgatgcggattatgccgggtgcaaagtggataggaaaagcacatcgggtacttgccaattcttgggtaggtcccttgtttcttggtcttccaagaagcaaaactccgtcgccctatccaccgccgaagcggaatacatttcgacggggagttgttgtgctcaacttatttggatgaagcaaaccttgagagactatggcctcaatgtgtccaaaatcccactcctatgtgacaatgagagtgccattaagatagccaataatcccgtccaacattcccgaaccaaacatatagatattcgccaccatttcttgagagatcattccacaagaggcgacatagacatccaacatgtgagaatcgacaaacaattggcggatatcttcaccaagcctctagatgaagctaggttttgtgagttgagaagtgaactaaatatcttggattctcggaatgtggcttga

SEQ ID NO: 13846 - DNA, 4210 bp, Oryza sativa
  Clone ID: TFbOSC401394j.C1.o1.np
atagccggccacccacccaaccaccacggagaaggcatgattgactttgtggcagagttagcacgtatgacgctggtggtgggctaccccaacgcgccagagtacacaactgttccaccactcagtggcgagcttcctcaccgtgtccgcctagaggtccatggctatgtgggcacctgcctcgctaacatggtggttgaggcgtccggagacacagcagatcacgcttgtcaggaggcagcatacctgatgatggccaaactacgggagcgccacaactacatcttccacgacacggcgtaccgatttcaccctcgtcgagccagcggtgatgatgtcagtactttccgtccgacagccggcgataacgacaccacctttggtcacatgtgtgctgtgatgaggggattggataggatgcactcggatctgcacaaggcgtccaaggccttgaatgatgggaagctcatgaggatcgtcactctgaaggacaagatagcgcgcctgaagagggagaatgctcagttaaagggtcttcccgcgccaggaggagtccggatccgcactacgccccgcaagtcgacaacgacacccgtgtgcatccagcttgcgcccaggaacccacctccatcagcagctcccgcagcacctccagttccgcccacagctccagcagttcctgcagctccagcaccagctccagctctcgttcccgtgtcagctcctgcatccgctctctccttcgcgcctgcattagccgtcagggtccccgccagtggcaatggaggttggttgccagctactcccagtggcagtcgcgacctcagcagcagcagctccagtggctcagagccgggcagcggcgagacttatctgccaggctctaggagtcgctcagagggacctggtcttttcctccagatggtctacaccaggaatggtagccgcacaaccggcgagggcagcaacggcgaagagcgcgctgatggtgtgcatcccaacagtgattctggcaatggtccgccaccacttcctgagaatccgacgctagcccaagtgatggcacatcagacgcagatgatggcagccatgatgcagcagatgcagcaccagcaccagcagatgcaccaaaggatgctgcagcacgccgaacagcagcaccagcagtttggtccccctccctctcagtccaagttgccagagtttctacgcgttagaccacccactttctccagcaccaccaaccccatggaggcgaatgactggctccatgccatagagaagaagctaaatctcctgcagtgcaatgatcaggagaaggtcgctttcgccacacaccagcttcaaggtcctgcgtcagcttggtgggacaatcacatggccacccgcccgccaggcactgaagtcacttgggcggagttctgtcgtagcttcaggaaggcgtaggtgccagacggggtcgtggcacaaaagaagagggaattccaggcactccatcagggcaacaggacagtgaccgagtacctccatgagttccatcgcctcgcgcgatatgcaccggaggatgtccgcactgacgccgagaagcaggaaaagttcatggcaggtctggatgacgagctgaccaaccaactgatatctggggactacgcggattttgaaaggctggtggacaaggcaatccgtcaggaggatcagcaaaacaagatggacgggaagagaaaggcggcacagttccggtccaaccaaggaaaccatcagcgactgcgcttcgctcccgggcagcagggtggacctaccaccatgatcatctgccagtaccgcccgttcaactctagcaacttccaccagggcgccagtggcagtcaaaaccaccatggaggtcagcccaaccgcggtgcagctccacgcccaccagtggcaccggcacagtcaggcccgtccgcgcaagccaagaaggagactggaacaaaaccagggtcctgcttcaactgtggcgagcttggccacttcgctgacaaatgcccgaagcctaggcgtgccgggccaaggattgtccaggctcgtgtcaaccacgcatctgcggaggaggcacaagcagcaccagaggtcgtactgggtacatttcttgttagctcaatccctgcaacagtactttttgattccggtgcaacgcattctttcatttcaaagaaatttgtggggatgcatgggttaaggaaagaagagcttaatacaccaatgagggttcataccctgggaaatagttcaacctcggtcagttttagcccttcagtgctaatagaaatccaaagatcaccatttctagccaacctcattcttcttgaatccaaagacctagatgtcattcttgggatggattggctgaccaagttcaagggagtcattgattgtgcgaatcgcacagtcaccttgaccaacaagaagggagaaaccgtagtgtacaaatcactagtctcaccaaagcaacgggtctccttgaatcagattgaggcggaaatcccagtggtcaccgaggagaagaatccgaggaaattggaagagattcccatagtttgcgagtacccagaagtctttcccgaagacctcactaccatgccacccaagcgagagattgaattccgaattgatttggcaccgggaaccgcgccaatttacaagagaccgtacaggatggcggccaacgaactagcagaggtcaagaagcaggttgatgagcagctgcagaaagggtacattcgaccaagtactttaccttagggtgctccggtcatttttgtggagaagaaggataagacgaagaggaggcgttgattatcgcgcactcaacgaggtcacaatcaagaacaaatatcctttgccgcgaattgatgatttgtttgatcaactgaaaggagctaaagtgttttctaagatagacctgcgatcaggctaccaccagttgagaattcgggaagaggatattccaaagacggccttcaccactcggtacgggctgtatgagtgcacggtcatgtctttcggacttaccaacgcacccgcattcttcatgaatctgataaacaaagtgttcatggaatttctggacaagtttgttgtcgttttcatcgacgacatacttatctattcaaagtctgaagaagaacatgagcaacatctccgtctggtactcgaggagttgaaggagcaccagttatacgccaagttcagcaagtgtgacttttggttgtctgaagtcaaatttctgggtcacgtcattacagctcagggcgtggcagttgatccatcgaacgtggagtcagttaccaaatggaccccacctaagacctgtcgcagattcgaagttttcttgaacttgcaggttattaacgccgattcatcgaaaacttctccaggatcgctcgacccatgactcagttgcttaagaaagatgagaagtttaaatggacagctgagtgcgataagagttttgaggagctcaaaaagaaattagtatccgcaccagttttgattctgcccgaccagatgaaagacttccaagtctactgcgatgcatcccgccacggacttggatgtgtcctaatgcaagagggaagagtggttgcgtatgcctcgcggcagttgtgtccacacgaagggaattatccaactcatgacctagaattggcagcagtggttcatgctttgaagatctggaggcactatctgattggcaaccgctgtgaagtatatacggatcacaagagtctgaaatacatcttcacccaaccggacctaaatctccgacaacaaaaatggttggaattaatcaaagactatgatatgagcattcactaccaccaggggaaagccaatgtggtggcagacgcattaagcaggaagagttactacactgccctatgcatcgagggcatgtgtgaggaattgcggcaggagtttgagcatctcaacgtggcaattgttgaacacgggttcgtagccgttctggaggcacggcctacgctcgtggatcaagtcagagcagctcaagtaaatgatcctgaaatagcagagctgaaaaagaacatgagagtcggaaaagcccgggatttccatgaagatgaacacggcacaatctggttgggcctggttgcttgccttctctctgattctgccttatgtttgaagtaacttactctcccttactcta

SEQ ID NO: 13847 - DNA, 3474 bp, Oryza sativa
  Clone ID: TFbOSC401435j.C1.o23.gm
atggtctacaccaggaatggtagccgcgcaacaggcgagggcaacaacggcgaagagcgcactgagggtgtgcatcccaacagcaattccggcaatggtccgccaccacttcccgagaatccgacgctagcccaagtgatggcacatcagactcagatgatggcagccatgatgcagcagatgcagcagcagcaccagcagatgcaccagcggatgctgcagcacgctgaacagcagcatcagctgtttggtccccctccccctcagtccaagttgccagagtttctacgtgtcaggccacccaccttctccagcaccaccaaccctatggaggcgaatgactggctccatgccatagagaagaagctgaatctcctgcagtgcaatgatcaggagaaggttgctttcgccacacaccagcttcaaggtcctgcgtcagcttggtgggacaatcacatggccacccgcccgccaggcactgaaggtaacatgactgtgacggagtatctccatgagttcaatcgcctcgcgcgatatgcaccggaggatgtccgtactgacgccgagaagcaggaaaaattcctagcaggtctggatgatgagctaaccaaccagttgatatctggagattacgccaatttcgaaaggctggtggacaaggcaatccgtcaggaggatcaacgcaacaagatggacaggaagaggaaggccgctcagttcagggcacctcagggaagtcaccagaggccgcgcttcgctcccgggcagcagggtggacctaccaccatgatcgtccgccagtaccgcccgttcaaccctagcaattttccccagggcgccagtggcagtcagaaccaccatggaggtcagcccaaccgcggtgcagctccacgcccaccaacggcaccggcacagtcaggcctgtccgcgcaagccaagaaggagactggagcaaaaccagggtcctgcttcaactgtggcgagcttggccacttcgctgacaaatgcccgaagcctaggcgtgccgggccaaggtttatccaggctcgtgtcaaccacgcatctgcggaggaggcacaagcagcaccagaggttgtactggtcaccttgaccaacgagaagggagaaacagtagtgtacaaatcaccagactcaccaaagcaaggggtctccttgaatcagattgaagcggaaatcccagtggtcaccgtggaaaagaatttgaggaaattggaagatatccccatagtctgcgagtatccagaagtgttccccgaagacctcactaccatgccacccaagagagagattgaattccggattgacttggcaccgggaaccgctccaatttacaagagaccgtacagaatggcggccaacgaactagcagaggtcaagaagcaggttgatgagcagctgcagaaagggtacattcgaccaagtacttcaccttggggtgctccggtcatttttgtggagaaaaaggataagacgaagaggatgtgcgttgattatcgcgcactcaacgaagtcacaatcaagaacaaatatcctttgccgcgaatcgatgatttgtttgatcaactgaaaggagctaaagtgttttctaagatagacctgcgatcaggctaccaccagttgagaattcgggaagaggatattccaaagacggccttcaccactcggtacgggctatatgagtgcacggttatgtctttcggacttaccaacgcacctgcatttttcatgaatctgatgaacaaagtgttcatggaatttctggacaagtttgttgtggtattcatcgacgacatacttatctattcaaagtccgaagaagaacatgagcaacatctccgtctggtactcgagaagttgaaggagcaccagctatatgctaagttcagcaagtgtgacttctggttgacggaagtcaagtttctggggcatgtcattacagctcagggtgtggcagttgatccatcgaacgtggagtcagttaccaaatggaccccacctaagaccatgtcgcagattcggagttttcttggacttgcgggttattaccgccgattcattgaaaacttctccaggatcgcccgtcctatgactcagttgcttaagaaagatgagaagtttaaatggacagctgagtgcgataagagttttgaggagctcaagaagaaattagtatccgcaccagttttgattctgcccgaccagatgaaagacttccaagtctattgcgatgcatcccgtcacggacttggatgtgtcctgatgcaagagggcagagtggttgcgtatgcctcgcggcagttgcgtccacacgaagggaattatccaacccatgacctggaattggcagcagtggttcatgctttgaagatctggaggcactatctgattggcaaccgctgcgaagtatatacggaccataagagtttgaaatacatcttcacccaaccggacctaaatctccgacaacgaagatggttggaactaatcaaagactatgacatgaacattcactaccacccgggtaaagccaatgtggtggcagatgcattaagcaggaaaagttactgcactgccctatgcatcgagggcatgtgtgagaaattgcagcaggagttggagcgtctcaacgtgggaattgttgaacacgggttcgtagccgctctggaagcacggcctacgctcgtcgatcaagttagagccgctcaagtgaatgatgccgaaatagcagagctgaaaaagaacatgagagtcggaaaggctcgggatttccttgaggatgaacacggcacaatctggttgggagaaagattgtgtgtacctgacgacaaggaactgaaggatctgatactcaccgaggctcatcagacccagtactccattcatccaggcagcaccaaaatggaaaggttgaggattgcccagtctcgacagaagagctacgcggacaaccgccgaagggagctcacttttgaagcaggggattacgtgccgaggcccagccaggccgccccttcctccctctcccgagccactgaccggtggggcccgtttgccggcgccgcgccccgccttgatgacgtcgtcctcgcgacgcgctgccaccatcggtggccgtccgaccgggtcgctgccgccgcgctccgcgctccgtgcccgcgccgttgccggtggtgccgggcagacggttgccgcctcccccttgccgcgccgcgccgctgctctcgcgtgcgccgctttcgcccgcgggagctgtcgccggccgtcgccgcgggtggccgcgccgccgcgcgccgtcgtttggccagccgactttgtgccgtgctgtgccccagccgcgccgcccctggcagcctgatcggcttgggccgatccggaccgtcggttcccgtggaccggcggtggaccgcctcggtggtcccggtccacggtggaccggcgcccttgtgccgctga

SEQ ID NO: 13848 - DNA, 5265 bp, Oryza sativa
  Clone ID: TFbOSC401567j.C1.o10.np
atggccggccacccacccaaccaccgcggagaaggcatgattgactttgtggcagagttggcacgtatgacgctggtggtgggctaccccaacgcgccagagtacacgactgttccaccgctcagtggcgagcttcctcaccgtgttcgcctggaggttcacggctacgtgggtacctgcctagctaatatggtggttgaggcatccggaggcacagcagatcacgcctgtcaggaggcagcatacctgatgatggccagactacgggagcgccacaactacatcttccacgacacggcgtaccgatttcaccctcgtcgagccagcggtgatgatgtcagtactttccgtccgacagccggcgagaacgacactacctttggtcacatgtgtgctgtgatgaggggattggataggatgcactcagacttgcacaaggcgtccaaggccttgaatgatgggaagctcatgaggatcgtcgctctgaaggacgagatagcgcgcctgaagagggataatgctcagttaaagggtcttcccgcgccaggaggagtccggatccgcactacgccccacaagaccacgactgcacccgtgcgcatccagcttgcgcccaagaacccacctccatcagcagctcccgcagcacctccagttccgctcgcagctccggtagttcctgcagctccagtaccagctctagctcccgttcacgtgtcagctcccgcgtctgctctctccttcgctccagcatcagccgctaggggtccagccagtggcaacggaggttggttgtctgctactcccagtggcagctgcgatctcagcagcagtagatccagtggctcagagctgggcagcggcgagacttatctgccaggctccaggagtcgctcagagggacctggtcttttcctccagatggtctacaccaggaatggtagccgcgcaacaggtgagggcagcaacggcgaagagcgcactgagggtgtgcatcccaacagcaattccggcaatggtccgccaccacttcccgagaatccgacgctagcccaagtgatggcacatcagacttagatgatggcagccatgatgcagcagatgcagcagcaacaccagcagatgcaccagcggatgctgcagcacgccgaacagcagcatcagtagtttggtccccctccccctcagtccaagttgctagagtttctacgtgtcaggccacccaccttctccagcaccaccaaccctatggaggcgaatgactggctccatgccatagagaagaagctgaatctcctgcagtgcaatgatcaggagaaggttgctttcgccacacaccagcttcaaggtcctgcgtcagcttggtgggacaatcacatggccacccgcccgccaggcactgaagtcacttgggaagagttctgtcgtagcttcaggaaggcgcaggtggcagatggggtcgtggcacaaaagaagagggaattccgggcactccattagggcaacagaactgtgacggagtatctccatgagttcaatcacctcgcgcgatatgcaccggaggatgtccgcactgacgccgagaagcaggaaaaattcctagcaggtctggatgatgagctaaccaaccagttgatatctggagattacgccgatttcgaaaggctggtggacaaggcaatccgtcaggatgatcaacgcaacaagatggacaggaagaggaaggccgctcagttcagggcacctcagggaagtcaccagaggccgcgcttcgctcccgggcagcagggtggacctaccaccatgatcgtccgccagtaccgcccgttcaaccctagcaactttccccagggcgccagtggcagtcagaaccaccatggaggtcagcccaaccgcggtgcagctccacgcccaccaacggcaccggcacagtcaggcccgtccgcgcaagccaagagggagactggagcaaaaccagggtcctgcttcaactgtggcgagcttggccacttcgctgacaaatgcccgaagcctaggcgtgccgggccaaggtttatccaggctcgtgtcaaccacgcatctgcggaggaggcacaagcagcaccagaggtcgtactgggtacgtttcctgttaactcaatccctgcaacaatactttttgattctggtgcaacacattcgttcatttcaaagaagtttgtcgggatgcatgggttaaggaaagaagagcttagcacaccaatgagggttcatacctcgggaaatagctcaacctcagtcagttttagcccttcagtgctaatagaaatccaaagatcaccatttctagccaacctcattcttctcgaatccaaagacctagatgtcattcttgggatggattggctgaccaagtttaagggagtcatcgattgtgcgaatcgcacagtcaccttgaccaacgagaagggagaaacagcagtgtacaaatcaccagactcaccaaagcaaggggtctctttgaatcagattgaggcggaaatcccagtggacaccgtgaagaagaatttgaggaaattggaagatatacccatagtctgcgagtatccagaagtgttccccgaagaccttactaccatgccacccaagagagagattgaattccggattgacttggcaccgggaaccgctccaatttacaagagaccgtacagaatggcggccaacgaactagcagaggtcaagaagcaggttgatgagcagctgcagaaagggtacattcgaccaagtacttcaccttggggtgctccggtcatttttgtggagaaaaaggataagacgaagaggatgtgcgttgattatcgcgcactcaacgaggtcacaatcaagaacaaatatcctttgccgcgaatcgatgatttgtttgatcaactgaaaggagctaaagtgttttctaagatagacctgcgatcaggctaccaccagttgagaattcgggaagaggatattccaaagacggccttcaccactcggtacgggctatatgagtgcacggttatgtctttcggacttaccaacgcacccgcattcttcatgaatctgatgaacaaagtgttcatggaatttctggacaagtttgttgtggtattcatcgacgacatacttatctattcaaagtccgaagaagaacatgagcaacatctccgtctggtactcgagaagttgaaggagcaccagctatacgccaagttcagcaagtgtgacttctggttgacggaagtcaaatttctgggccatgtcattacagctcagggtgtggcagttgatccatcgaacgtagagtcagttaccaaatggatcccaccgaagaccgtgtcgcagattcgaagttttctaggactggcaggttattaccgccgattcatcgaaaacttctccaggatcgcccgacccatgactcagttgcttaagaaagatgagaagtttaaatggacagctgagtgcgataagagttttgaggagctcaagaagaaattagtatccgcaccagttttgattctgcccgaccagatgaaagacttccaagtctattgcgatgcatcccgtcacggacttggatgtgtcctaatgcaagagggcagagtggttgcgtatgcctcgcggcagttgcgtccacacgaagggaattatccaactcatgacctggaattggcagcagtggttcatgctttgaaaatctggaggcactatctgattggcaaccgctgcgaagtatatacagaccataagagtctgaaatacatcttcacccaaccggacctaaatctccgacaacgaagatggttggaactaatcaaagactatgacatgagcattcactaccacccgggtaaagccaatgtggtggcagacgcattaagcaggaaaagttactgcactgccctatgcatcgagggcatgtgtgaggaattgcggcaggagtttgagcatctcaacgtgggaattgttgaacacgggttcgtagccgctctggaggcacggcctacgctcgtggatcaagtcagagcagttcaagtaaatgattctgaaatagcagagctgaaaaagaacatgagagtcggaaaaacccgggatttccacgaagatgaacacggcacaatctggttgggagaaagattgtgtgtacctgacgacaaggaactgaaggatctgatactcaccgaggctcatcagacccagtactccattcatccaggcagcaccaaaatgtatcaagacctcaaagaaaagttttggtgggtcagcatgaggagagaaaagctgaattcgtcgcactctgcgatgtttgtcaacgagtgaaggcagagcaccaaagaccagcaggtttactccaacctcttcaaatcccagaatggaaatgggaggagattggaatggactttataatagcactgccccggacatcatcgggtcacgattcaatctgggtagtcgtggatcgactcactaaggttgctcacttcataccagtacataccacgtatacgggcaaaaggttggcggagctctacctctcgagaatcatgtgtctacatggagtacccaaaaagattgtatctgatcgagggagtcagttcacctcaaaattctggcagaagctgcaggaagaattggggacccgtttaaatttcagcacggcctatcacccacaaactgatggtcagaccgagcgagtcaatcaaatcttggaagatatgttgagagcttgcgctcttgattttggtggagcttgggacaaaaacttgccatatgcggaattctcgtacaacaacagctaccaggccagtctacagatggcaccgtttgaagctttatacggccggaagtgccgcacacctctcttctgggatcagacaggcaagcgtcaactgttcgggacagaggtattagcggaagcagaagagaaagtcagaatcatcagggaaaggttgaggattgcccaatcttgacagaagagctacgcggataaccgccgaagggagctcacttttgaggcaggggattacgtgtatcttcgtgtcactccgctccggggagtacaccgttttcagacgaaaggcaagttggcaccacgcttcgtgggaccctacaaaatcttggaacgaaggggagaagttgcttatcagttagaacttccatccaatatgatcggcatccatgacgtgttccacgtgtcccaattatttagcaaattacgagttgacaaatatcagcaagactttattc

SEQ ID NO: 13849 - DNA, 4611 bp, Oryza sativa
  Clone ID: TFbOSC401630j.C1.o1.fg
atggccggtcacccacccaaccaccgcggagaaggcatgatcgatttcgtggcagagttggcacgtatgacactggtggtgggctaccccaatgcgccggagtacacgacgattccgctgcttagtggcgagcttcctcaccgtgtccgcttggaggtccatggctacgtggggacttgcctcgctaacatggcggtcgaggcatctggaggcacagcagatcacgcctgtcaggaggcagcctacttgatgatggccagactacgggagcgccacaactacatcttccacgacacggcgtaccgctaccacccccgtcgagccaacggtgatggcgtcagctccttccgtccgacagctggcgagaacgacaccacctttggtcacatgtgtgctgtgatgaggggattggacaggatgcactcggacttgcacaaggcgaccaaggctttgaacgatgggaagctcatgaggatcgtcgctctgaaggacgagatagcgcgcctgaagaaggagaacgctcagctaaagggtcttccagcgccagaaggagtccggatccgcaccacgccccgcaagacgacgactgcacctgtgcgcatccagcttgcgcccaggaacccacctccagcagcagctcccgcagcacctccagttccgcccgcagttcctgcagctccagttccagctcccgcgttcactctctccttcgctccagcatcagccgccaggggtccagccagtggcaccggaggttgcttgtttgggatggtctacaccaggactggcagtcgcgcgacaggcgagggcagcaacggcgaagagcgcactgatggtgtgcaccccaacagcgattctggcaatggtccgccaccacttcccgagaatccgacgcttgcccaagttatggcacatcagactcagatgatggcagccatgatgcagcagatgcagcagcagcaccagcagatgcaccagaggatgatgcagcacgccgaacagcagcatcaacagtttggtccccctccccctcagtccaagttgccagagtttctacgcgtcaggccacccaccttctccagcaccaccaaccctatggaggcgaacgactggctccatgcaatagagaagaagctgaatctcctgcagtgtaatgatcaggagaaggtcgcttttgccacacaccagcttcagggtcccgcgtcagcttggtgggacaaccacatggccacccgcccaccgggtactgaagtcacatgggcagagttctgccgtagcttcaggaaggcacaggtgccagatggggtcgtggcacaaaagaagagggaatttcgtgcactccatcagggcaataggactgtgacagagtacctccatgagttcaatcgcctcgcgcgatatgcaccagaggatgtccgcaccgacgccgagaagcaggagaagttcatggcgggtctggatgacgagctgaccaaccaactgatatctggggactacgccgactttgagaggctggttgacaaggcaatccgtcaggaggaccaacgcaacaagatggacaggaagaggaaggccgctcagttcagggcacatcagggaagtcaccagaggccgcgcttcactcccggacagcagggtggacctaccaccatgatcgtccgccagcaccgcccgttcaaccctagcaacttccaccagggcaccagtggcagtcagaaccaccatggaggtcagcccaaccgcggtgcagctccacgcccatcagtggcaccggcacagtcaggccagcccgcgcaagccaagaaggagactggagcaaaaccagggtcctgcttcaactgtggcgagcttggccacttcgctgacaaatgcccgaagcccaggcgtgccgggccaaggtttatccaggctcgtgtcaaccacgcatctgcgcaggaggcacaaacagcaccggaggtcgtactgggtacgttccctgttaactcaatccctgcaacagtactttttgattctggtgcaacacattctttcatctcaaagaaatttgtcgggatgcatgggttaataagagaggaacttagcacaccgatgcgggttcataccccagggaatagctccacttcggttcaattcagcccttctataacaatagaaattcaaaggtcaccatttctagccaacctcattcttctcgaatccaaagacctagatgtcattcttgggatggattggctgaccaagtttaagggagtcatcgattgtgcgagtcgcacagtcaccttgaccaacgagaagggagaaaccgtggtgtacaaatctctagtctcgccaaagaaaggggtctcgttgaatcagattgagacggaaatcccagtggacaccgtagagaagaacttgagaaaattggaagatatacccatagtctgcgagtatccagaagtgttccccgaagacctcactaccatgccacccaagagagagattgaattccggattgacttggcaccgggaactgctccaatctataagagaccgtacagaatggcggccaacgaattagcagaggtcaagaagcaagttgatgagcagctgcagaaagggtacatacgaccaagcacttcaccttggggcgctccggtcatttttgtggagaaaaaggataagacgaagaggatgtgcgtcgattatcgcgcacttaacgaggtcacaatcaagaataaatatcctttcccgcgaatcgacgatttatttgatcaactgaaaggaactaaagtgttttctaagatagacctgcgatcaggctaccaccagttgaagaatccggaaagaggatattccgaagacggccttcaccactcgtttgttgtggtgttcatcgacgacatacttatctactcaaaatccgaggaagaacatgagcaacatctccgtctggtactcgaaaagttgaaggagcaccagctatacgccaagttcagcaagtgtgacttctggttgacggaagtcaaatttctgggccatgtcattacagctcagggtgtggcagttgatccatcgaacgtggagtcagttaccaaatggaccccacctaagaccgtgtcgcagattcgaagtttccttggacttgcgggttattaccgccgattcatcgaaaatttctccaggatcgcccgacccatgactcagttgcttaagaaggatgagaagtttaaatggacagctgagtgcgataagagctttgaggagctcaagaagaaattagtatccgcaccggttttgatcctgcccgaccagatgaaagacttccaggtctattgcgatgcatcccgtcacggacttggatgtgtcctaatgcaagagggcagagtggttgcatatgcctcgcggcagttgcgtccacacgaaggaaattatccaactcatgacttggaattggcagcagtggttcatgctttgaagatctggaggcactatctgattggcaaccgctgcgaagtatatacggaccataagagtctgaaatacatcttcacccaaccggatctaaaccttcgacaacgaagatggttggaactaatcaaagactatgacatgagtattcactaccacccgggtaaagccaatgtggtggcagacgctttaagccggaaaagttactgcactgccctatgcatcgagggcatgtgtgaggaattgcggcaggagtttgaacatctcaacatgggaattgttgaacacgggttcgtagccgctctggaggcacggcctacgctcgtggatcaagttagagccgctcaagtaaatgatccggaaatagcagagctgaaaaagaacatgagagtcggaaaggctcgggatttctttgaggatgagcatggcacaatctggatgggagaaagattgtgtgtacctgacgacaaggaactgaaggatctgatactcaccgaggctcatcagacccagtactccattcatccaggcagcactaaaatgtatcaagacctcaaagaaaggttttggtgggtcagcatgaggagagaaatagctgaattcgtcgcactctgcgatgtttgccaacgagtgaaagcagagcaccaaagaccagcaggtttactccaacctcttcaaatcccggaatggaaatggaaggagattggaatggactttataacaggactgccccggacatcatcgggtcacgattcaatctgggtagtcgtggatcgactcactaaggttgctcactttatactagtacataccacctatacgggaaagagattggcagaattgtacctcgcaaggatcatgtgtttgcatggggtacccatgaagatactatccgaccgaggtagtcagttcacctcaaagttttggcagaaactgcaggaagaattggggacccgtttaaacttcagcacggcctatcacccgcaaactgatggtcagaccgagcgagtccatcaattcttggaggatatgttgagagcttgcgctcttgattatgatggagcttgggacaaacgcttgccatatgcggaattctcttacaacaacagctaccaggccaatctgcagatggcactgtgtcgcgtcccaaatcgactctaa

SEQ ID NO: 13850 - DNA, 3663 bp, Oryza sativa
  Clone ID: TFbOSC401655j.C1.o2.fg
atggtctacaccaggaatggcacccgcaccacgggcgagggcagcaacggcgaagagcgcactgatggtgtgcatcccaatagtgattccggcaatggtccgccaccactccccgagaatccgacccttgcccaagtaatggctcatcagacgcagatgatgacagccatgatgcagcaaatgcaacagcagcaccaacagatgtaccagaggatgcagcagcaagccgagcagcaccagcagcagtttggcccccctccccctcagtccaaactgccagagtttctacgcgtcaggccacccaccttttctagcaccaccaaccctatgaaggcaaatgattggctccatgccatagagaagaagctcaatctcctgcagtgcaatgatcaggagaaggtcgccttcgccacacaccagctccaaggtcccgcgtcagcttggtgggacaatcacatgactacccgcccgccaggcactgaagtcacttgggcagagttctgccgcaacttcaggaaggcgcaggtgctagatggggtcgtggcacaaaagaagagggaattccgagcactccaccagggcaacaggacagtgacggagtatctccatgagttcgatcgcctcgcgcgatatgcaccggaggatgtccgtactgacgccaagaagcaggagaaattcctagcaggtctggatgatgagctaaccaaccagttgatatccggagattacgccgactttgagaggctggttgacaaggcaatccgtcaggaggatcagcacaacaaaatggataggaagaggaaggcggcgcagttccggtccaaccaagcaagccaccagcgaccgcgcttcattcccagacagcagggtgaacctaccaccatgatcgtccgccagcaccgccctttcaactcaagcaacttccaccagggcgctagtggcagccagaaccaccgtggaggtcagcccaaccgcagtgcaactccgcgcccaccaatggcaccagcacagtcagctccgtctgtgcaagccaagaaggagaccggagcaaagccagggtcctgcttcaactgtggtgagcttggccacttcgctgacaaatgcccgaagcctaggcgtgctgggccaaggtttgtccaggcccgtgtcaaccacgcgtctacagaggaggcacaagcagcaccagaggtcgtactgggtacgtttcctgttaattcaatccctgcaacagtactttttgattctggtgcaatgcattcgttcatttacaagaagtttgtcgggatgcatgggttaataagagaggaacttagcacaccaatgcgggttcataccccagggaatagctccacttcggtacaattcagcccttctgtaacaatagaaatccaaagatcaccatttctagccaacctcattcttctggaatccaaagacctagatgtcattcttgggatggattggctgaccaagttcaagggagtcattgattgtgcgaattgcacagtcaccttgatcaatgagaagggagaaacagtagtgtacaaatcactagtctcaccaaaacaaggggtctctttgaatcagattgaggtggagatcccagtggtcaccgaggagaagaattcgaggaaattggaagagattcccatagtctgcgagtacccagaagtgtttcccgaagacctcactaccatgccacccaagagagagattgaattccggattgatttggcaccgggaaccgctccaatttacaagagaccgtacaggatggcagccaacgaactagcagaggtcaagaagcaggttgatgagcagctgcagaaagggtacattcgaccaagtacttcaccttggggtgcaccggtcatttttgtggagaaaaaggataagacgaagaggatgtgcgtcgactatcgcgcactcaatgaggtcacaatcaagaacaaatatcctttaccgcggatcgatgatttgtttgatcaactgaagggagctaaagtgttttctaagatagacctacgatcaggctaccaccagttgagaattcgggaagaggatattccaaagacggccttcaccactcagtatgggttgtatgagtgcacggttatgtctttcggacttaccaatgcacccgcattcttcatgaacttgatgaacaaagtgttcatggaatttctggataagtttgtggtggtattcattgacgacatactcatctattccaaattggaagaagaacatgagcaacatctccgtctggtactcgagaaattgaaggagcaccagttgtatgccaagttcagcaagtgtgacttctggttgtcggaagtcaaatttctgggtcacattattacagctcaaggcgtggcagttgattcatcgaacgtggagtcagttaccaaatggaccccacctaagaccgtgtcgcagattcggagttttcttggacttgcagggtattaccgtcggttcattgaaaatttctccaggatcgcccgacccatgactcagttgcttaagaaagatgagaaatttaaatggacagccgagtgtgacaagagttttgaggagctcaagaagaaattagtatccgccccagttctgattctgcccgaccagatgaaagacttccaagtctattgcgacgcatcccgccacgggcttggatgtgttctaatgcaagagggtagagtggtcgcatacgcctcgcggcagttgcgtccacatgaagggaattatccaactcatgacctggaattggcagtagtggttcatgctttgaagatctggaggcactatctgattggcaaccgctgcgaagtatatacggaccacaagagtctgaaatacatcttcacccaaccggacctaaatctccgacaacgaagatggttggaactaatcaaagattatgacatgagcattcactaccacccgggtaaagccaatgtggtggcagatgcattaagcaggaaaagctactgcaatgccctatgcaccgaggacatgtgtgaagaattgcagcaggagcttgagcgtctcaacgtgggaattgttgaacataggttcgtagccgctctggaagcacggcctacgcttgtggatcaattcagagcagctcaagtaaatgaccccgaaatagttgaactgaaaaagaatatgagagtgggaaaagcccgggacttccttgaggatgaacatcgcacaatctggatgggagaaagattgtgtgtacctgacgacaaggaactgaaggatctgatactcaccgaggctcatcagactcagtactccattcatccaggcagcaccaaaatgtatcaagacctcaaagaaaagttttggtgggtcagcatgagaagggaaatagctgaattcgtcgcactctgcgacgtttgccaacgagtgaaggcagagcaccaaaggccagtaggtttattccaacctcttcaaatcccgaaatggaagtgggaggagattggaatggactttataacaggactgccccggacatcatcgggtcacgattcaatctgggtagtcgtggatcgactcactaaggttgctcacttcataccagtacataccacctatacggggaagaaattggcagagctgtgcctggcaaggattgagtttgatctattgagataa

SEQ ID NO: 13851 - DNA, 10053 bp, Oryza sativa
  Clone ID: TFbOSC401894j.C1.o32.fg
atgggttccaagatggccggccacccacccaaccaccgcggagaaggcatgatcgactttgtggcagagttggcacgcatgacactggtggtgggctaccccaacgcgccagagtacacgacgattccacagctcagtggcgagcttcctcaccgtgttcgcttggaggtccacggctacgtgggtacctgcctagctaacatggtggtcgaggcatctggaggcacagcagatcatgcctgtcaggaggcagcctacttgatgatggccagactacgggagcgccacaactacatcttccacgacacggcgtaccgcttccacccccgtcgagccaacggtgatgacgtcagctccttccgtccgacagctggcgagaacgacaccacctttggtcacatgtgtgctgtgatgaggggattggacaggatgcactcggacctgcacaaggcgaccaaggccttgaacgatgggaagctcatgaggatcgtcgctctgaaggacgagatagcgcgcctgaagagggagaacgctcagctaaagggtcttccagcgccaggaggagtccggatccgcactacgccccgcaagacgacgacggcacccgtgcgcatccagcttgcgcccaggaacccacctccatccgcagctcccgcagcacctccagttccgcccgcagctccggcagttcctgcagctccagctcccgcgtccgctctctccttcgctcccgcatcagccgccaggggtccagccagtggcaatggaggttgcttgtttgggatggtctacaccaggaatggtagccgcgcaacaggcgagggcagcaacggcgaagaacgcgctgacggtgtgcaccccagcagtgattccggcaatggtccgccaccacttcccgagaatccgacccttgcccaagttatggcacatcagactcagatgatggcagccatgatgcagcagatgcagcagcagcaccagcagatgcaccagaggatgatgcagcacgtcgaacagcagcaccagcagtttggtccccctccccctcagtccaagttgcctgagttcctacgcgagaaggtcgctttcgccacacaccagcttcagggtcccgcgtcagcttggtgggacaatcacatggccacccgcccaccaggtactgaagtcacatgggcagagttctgccgtagcttcaggaaggcgcaggtgccagacggggtcgtggcacaaaagaagagggaattccgggcactccatcagggcaacaggactgtgacagagtacctccacgagttcaatcgcctcgcgcgatatgcaccagaggatgtccgcaccgacgctgagaagcaggagaagttcatggcgggtctggatgatgagctgaccaaccaactgatatccggggactacgctgactttgagaggctggttgacaaggcaatccgccaggaggatcaacgcaacaagatggacaggaagaggaaggccgcacagttcagggcacctcagggaagtcaccagaggccgcgcttcgctcctgggcagcagggtggacctaccaccatgatcgttcgtcagcaccgcccgttcaaccctagcaactttccccagggcgccagtggcagtcagaaccaccatggaggtcagtccaaccgcggtgcagcttcacgcccaccaatggcaccggcacagtcaggccagcccgcgcaagccaagaaggagattggagcaaaaccagggtcctgcttcaactgtggcgagcttggccacttcgctgacaaatgcccgaagcctaggagtgccgggccaaggtttatccaggctcgtgtcaaccacgcatctgcggaggaggcacaagcagcaccagaggtcgtactgggtacgttccctgttaactcaatccctgcaacagtactttttgattctggtgcgacgcattctttcatttcaaagaaatttgtcgggatgcatgggtttataagagaagaacttagcacaccgatgcgggttcataccccagggaatagctccacttcggttcaattcagcccttctataacaatagaaattcaaagatcaccatttctagccaacctcattcttctcgaatccaaagacctagatgtcattcttgggatggattggctgaccaagttcaagggagtcatcgattgtgcgaatcgcacagtcaccttgaccaacgagaagggggaaacggtagtgtacaaatcaccagactcaccaaagcaaggagtctccttgaatcagattgaagcggaaatcccagtggacaccgtggagaggaatttgaggaaattggaagacatacccatagtctccgagtatccagaagtgttccccgaagacctcactaccatgccacccaagagagagattgaattccggattgacttggcaccgggaaccgctccaatttacaagagaccgtacagaatggcggccaacgaactagcagaggtcaagaagcaggttgatgagcagctgcagaaagggtacattcgaccaagtacttcaccttggggtgctccggtcatttttgtggagaaaaaggataagacgaagaggatgtgcgttgattaccgcgcactcaacgaggtcacaatcaagaacaaatatcctttgacgcgaatcgatgatttgtttgatcaactgaaaggagctaaagtgttttctaagatagacctgcgatcaggctaccaccagttgagaattcgggaagaggatattccgaagacggccttcaccactcggtacgggctatatgagtgcacggttatgtccttcggacttactaacgcacccgcattcttcatgaatctgatgaacaaagtgttcatggaatttctggacaagtttgttgaggtgttcatcgacgacattcttatctattcaaagtccgaagaagaacatgaacaacatctccgtctggtactcgagaagttgagggagcaccagctatacgccaagttcagcaagtgtgacttctggttgacggaagtcaaatttctgggccatgtcattacagctcagggtgtggcagtcgacccatcgaacgtggagtcagttaccaaatggaccccaccgaagaccgtgtcgcagattcgaagttttcttggacttgcaggttattaccgtcgattcatcgaaaatttctccagaatcgcccgacccatgactcagttgcttaagaaggatgagaagtttaaatggacagccgagtgcgataagagcttcgaggagctcaagaagaaattagtatccgcaccagttttgattctgcccgacccgatgaaagacttccaagtctattgtgatgcatcccgtcacggacttggatgtgtcctaatgcaagagggcagagtggttgcgtatgcctcgcggcagttgcgtccacacgaagggaattatccaactcatgacttggaattggcaacagtggttcatgctttgaagatctggaggcactatctgattggcaaccgctgcgaagtatatacggaccataagagtctgaaatacatcttcactcaaccggacctaaatctccgacaacgaagatggttggaactaatcaaagactatgacatgagtattcactaccacccgggtaaagccaatgtggtggcagacgctttaagccggaaaagttactgcactgccctatgcatcgagggcatgtgtgaggaattgcgacaggagtttgagcatctcaacgtgggaattgttgaactcgggttcgtagccgctctggaggcacggcctacgctcgtggatcaagttagagcagctcaagcaaatgattctgaaatagcagagctgaaaaagaacatgagagtcggaaaagcccgggatttccacgaagatgagcatggcacaatctggttgggagaaagattgtgtgtacctgacgacaaggaactgaaggatctgatactcaccgaggctcatcagacccagtactccattcacccaggcagcactaaaatgtatcaagacctcaaagaaaggttttggtgggtcagcatgaggagagaaatagctgaattcgtcgcactctgcgatgtttgccaacgagtgaaggcagagcaccaaagaccagcaggtttactccaacctcttcaaatcccggaatggaaatgggaggagattggaatggactttataacaggactgccccggacatcatcgggtcacgattcgatctgggtagtcgtggatcgactcactaaggttgctcacttcataccagtacataccacatatacgggcaaaaggttggcggagctttacctttcgagaatcatgtgcctacatggagtacccaaaaagattgtatctgaccgagggagtcagttcacctcaaaattctggcagaagctacaggaagaactggggacccgtttaaatttcagcacggcctatcacccgcaaactgatggtcagaccgagcgagtcaatcaaatcttggaagatatgttgagagcttgtgctcttgattttggtggagcttgggacaaaagcttgccatatgcggaattctcgtacaacaacagctaccaggccagtctacagatggcaccgtttgaagctttatacggccggaagtgccgcacacctctcttctgggatcagacaggcaaacgtcaactgttcggaacagaagtattagcggaagcagaagagaaagtcagaattatcagggaaagattgaggattgctcagtctcgacagaagagctacgcggataaccgtcgaaaggagctcacttttgaggcaggagattacgtgtatcttcgtgtcactccgctccggggagtacaccggtttcagacgaaaggcaagttggcaccacgcttcgtgggaccatacaaaatcttggaacgaaggggagaagttgcttatcagttagaacttccatccaatatgatcggcatccgtgacgtgttccatgtgtcccaattaaagaagtgcttaagggtacctgaagaacaggctgattcggagcacattgatatccagggggacctaacatatgtggagaagccgtgggtagtactcagtcttgctctacttttcccaacctcagagttcgagttcgggtcagatgaaggtgtgacaaccatcatcgaaaaatacgacggaagcgtcaaccccgccgagtttctccagatctacacgaccgggatcgaggccgccgggggtgacgacagggtcatggcgaatttcttccccatggccctgaagggtcaggcgcggggttggctaatgaacttgccacccgcgtcggtccactcttgggaggatttgtgccagcagttcaccacgaacttccagggcatatatccgcgcccagacgaagaagcggacttgcatgcggtacagcgaagggacgatgagtctcttcgctcatacattcagcggttctgtcaagtccgcaacaccataccgtgcatccccgcacacgcggtgatctacgcgttcagggggggcgtgcggcacaaccgcatgctcgagaagatcgcctccaaggagccccagaccaccgcgcagctttttgagctcgcggaccgtgtggctcgcaaggaggaggcctggacctggaactcctccggttctggtgtggcagctccggccgcccccgggtccgccgctcggtcagggcggcgggacaggaggaggaagaagggctcggcccgttccgacgacgagagtcatgtcctcgccgtcgagggcgcttcgcgggccccccgaaaggggaggcctgcgagcaacaaaaagaaggaggccggcgctcccagcagggagcgcccgaccggcaagtggtgtaccgtgcacaacacctccctccacgacctcgcggactgccgcgcggtcaaaagtttggctgagcggacgagaaagtgggaggaggagaagaggcaggagcgtcgtgagggcaagaccccggcggctcccgccggcaaccggcgaggtgaggccaagcagaaggccaccgccgaggacatcgacgatggcgacgatgacctggggttccaggagcctgaggccaccgtcgccaccgtcgatgggggagcgtgcgctcacgcttctcgccggagcctcaaggccatgaagcgagagcttctggccgcggcccctacccatgaggcgacgtggcgggcgcggtggtcggaggttgccctctccttcgaccagaccgaccacccgccgtgcgttgcccggggaggacagatcgcgatgccgctgggtcatatcgacctcccggtcaccttcggtggttccgccaacttctgcacggagcgggtggacttcgatgtggcggacctcagtctgccctacaacgcggtcctggggaggcccgcgttggtgaagttcatggcggcggtccactacgcctatctccagatgaagatgccgggccccggtggccccatcaccgtccatggcgacctcaaagtcacgcttgcttgtatggagcagcgcgcggaccaccttgccgcggcgtacaagcccgcgggtggcgacgagaggctcagcacctccgtcccggccgccccaaggcagcggatggtcacgtgcgatgaggtctcggtcaaggaggaagacgcgctcgtctccttactgcgggcaaacaccgacgtcttcgcctggagaccggcggacatgcccgaggtccccagggaggtgattgagcaccgtctcgccgtgcagctgggcgcaaggccggtccggcagaaagtgcggcggcaggccccggaacgtcaagccttcatccgcgaggaggtggcgcgacttctggaggccggattcatccgtgaggtcatccatccggagtggctggcgaacccggtcgtcgttcccaaggcgaacggcaagcttcggatgtgcatcgactacaccgaccttaacaaggcatgtcctaaggacccttaccccctgccacgcatagatcagattgtcgactccaccgcggggtgcgaccttttgtgttttctagatgcatactctagttatcatcagattcgcatggctagggaggatgaggaaaaaactgcattcattacccctataggaacttattgttatacgacaatgcctttcgggttaaagaatgcaggtcctacttttcaacgtactactcgaatttctttgggtagccagataggacgcaatgttgaggcctatgttgatgacttggttgtgaagacgcgcaaccaagagaccttactctcggatctagcggaaactttcaaaagtctccgctccgcccgcataaagctgaaccccgataagtgcgtgttcggcgtgcctgcgggcaagcttctcgggttcttggtctctgcccgaggcatcgaggccaaccccgagaagatacgagctatagagcggatgcacccccccagcatgcttagggatgtgcagtgcgtcaccggctgcatggccgccctaagtcggttcatatcgaggctgggagagaaggcactacccctatttaagctcctcaaacgctccgggccgtttacctggacggaggaggctgagcgggccttcactcagttgaaggcgtacctcagttctcccccagtcctggtcgccccggagccagatgagccgttgctactctacctggcggcaaccccgcaggtggtcagcgcggcgttggtcgtggagcgcgacaaggacaaccctcactccgcgcatccccaccctgtgtcgactcgacccgggagagagcagggaggagaggcccccgagccgaacggcggcccaggccctcgacggccggagctggccctccgcctgcttgtccgacggtgccaggtcgtcggcacagaagccgagtgcgccccgtgtggcctctcggacgaagagcgccctggagatgcggcccctggcgaagaggatcggccccgccgaaagatgcagcggcccgtctacttcgttagcgaggccctccgggacgccaagacccgataccctcaggcccagaagatgctttacgctattctgatggcttcgaggaagttgcgccattatttccaggcgcatcgggtcacggtggttacgtcttaccccctcggccaaatcttgcataaccgagagggtactggacgggtggtgagatgggcaatcgaactctctgaattcgatttgcgctttgaaccacgccacgcgatcaagagccaggccctcgccgactttgtggcggagtggaccccagctcccgagcccgtctccgcccccaaggccagctcgggcccctcgcagctgcctcacaccgcctactggggcgccggtgcgggggtcacgttgacctcgccgagcggagacgtcctcagatacctggtccgcctcgactttcgggcgaccaacaatatggcggagtacgagggactccttgcgggactcagagtggcagctggactggggatccgccgcctcctggtgtttggcgactcccagttggtcgttaaccaggtctgtaaggagtaccagtgctctgacccgcagatggacgcttacgtgcgccaggtgcggcgtatggagcgccatttcgacgggatagagcttcggcacgtgcccagacgggataacacggtcgccgacgaactctcaaggctcgcttcctcgcgagcccagaccccaccgggcgcctttgaagaaaggcttgcccagccgtcggcgcgacccgaccccctaggagagacggacgcgcctgaacggcccccgaggcccgtcggagtccaggcctcgggacccgaggggagcgctcccagctcccctagattgattgcttggatcactgagatccaggcgtacctcgcagataagactctacccgaggaccgcgaagggagtgaacgcgtccggcgcatctccaagcgctacgtgctggtggaagggaccctctatcggcgcgcggctaacggagtcctcctgaagtgcattcctcgggaacaaggcgtcgagcttctcgccgatatccatgaaggcgagtgcggagcccactccgtctcacgcaccttggttggcaaggcctttcgccagggtttctattggccgacggctctcaacgatgcggtcgacctggtccggcggtgcagggcgtgccagtttcatgccaggcaaacccatcagccgacccaggccctgcagaccatacctctttcgtggccgtttgctgtctgggggctcgatatcctgggtccgttcaggcgggccccgggcgggttcgagtatctgtatgtcgctgtcgacaagttcactaagtggcccgaggcttatccggtcatcaaaatcgataagcactccgcacttaaattcatcaggggcatcactgctcggtttggggtgcctaatcgtatcattacagataacggcacccagttcactagtgagctcttcggtgactactgcgaagacatgggcatcaagctctgcttcgcctcccccgcccaccccagaagcaatggccaagtggagcgcgccaatgcggaaatcctcaagggcctcaaaaccaagaccttcaacatcctcaagaagcacggcgactcgtggatcgaggagctgccagcggtgctctgggcgaaccgaaccacgccaagccgagcaaccggggaaacgcctttcttcctcgtctacggcgcggaggcggtcctcccatctgagctcaccctgaggtcccctcgggtcaccatgtattgcgaggctgatcaagatcagcttcgccgagacgacctcgactatttggaagagcgaagacggcgcgcggccctccgagccgcgcgctaccagcagagcctgcggcgctaccatcagcgccacgtccgggcccgatcactctgcgtcgacgacctcgtcctacgccgcgtccaaacgcgtgctggactgagcaagctctcaccaatgtgggagggtccgtatcgagtaatcggcgtcccccagccgggctccgttcggctggccacgggcgacggcacagagctgcctaacccgtggaacatcgaacaccttcgtcgcttctacccctag

SEQ ID NO: 13852 - DNA, 4698 bp, Oryza sativa
  Clone ID: TFbOSC401978j.C1.o63.fg
atggccgagcacccacccaaccaccgcggagaaggcatggatgacttcgtggcagagttggcacgcatgacactggtggtgggctaccccaacgcgccggagtacacgactgttccaccgctcagtggcgagcttcctcaccgtgtccgcttggaggtccatggttacgtggggacttgcctcgctaacatggtggtcgaggcgtctggagccacagcagatcacgcatgtcaggaggcagcatatctgatgatggccagactgcgggagcgccacaactacatcttccacaacacggtgtaccgtttccaccctcgtcgagccaacgacagtgatgtcagttccttccgtccgacagccggcgagaacgacaccaccttcagtcacgcgtccaaggccttgaatgatgggaagctcatgaggatcgtcgctctgaaggacgagatagcgcgcctgaagagggagaatgctcagttgaagggtcttcccgcgccaggaggagtccagatccgcaccacgcctcgcaagtcgacaacggcacccgtgcgcatccagcttgcgcccaggaacccacctccgtcagcagctcccgcagcacctccagttccgcccgcagctccagcagttcctacagctccagcgccagccccagctcctgttcccgtgtcagctccagcatccgctctctccttcgcacctgcatcagccgtcaggggccccgccagtggcaatgggggttggttgcctgctactcccagtggcagtcgcgaccgcagcagcagcagctccagtggcatagagccgggcagcggcgagacttatctgccaggctccaggagtcgctcagaggacctgatggtctacaccaggactggcacccgcacgacaggcgagggcagcaacggcgaagaacgcgctgatggtgtgcaccccaacagtgattccggcaatggtccgccaccacttcccgagaatccgacgctagcccaagttatggcacatcagactcagatgatggcagccatgatgcagcagatgcagcagcagcaccagcagatgcaccagaggatgctgcagcacgctgaacagcagcaccggcagtttggtccccctccccctcagtccaagttgccagagtttctacgtgtcaggccacccaccttctccagcaccaccaaccccatggaggcgaatgactggctccatgccatagagaagaagctgaatctcctgcagtgcaatgatcaggagaaggtcgctttcgccacacaccagcttcaaggtcctgcgtcagcttggtgggacaatcacatggccacccgcccgccaggcactgaagtcacttgggcggagttctgtcgtagcttcaggaaggcacaggtgccagacggggtcgtggcacaaaagaagagggaattccgggcgctccatcagggcaataggacagtgacagagtacctccatgagttcaatcgcctcgcgcgatatgcaccggaggatgtccgcactgacgccgagaagcaggaaaagttcatggcaggtctggatgacgagctgaccaaccaactgatatctggggactacgctgattttgaaagactggttgacaaggcaatccgtcaggaggatcagcgcaacaaaatggacaggaagagaaaggcggcacagttccggtccaaccaaggaaaccatcagcgaccgcgtttcactcccggacagcagggtggacctaccaccatgatcgtccgccagcaccgcccgttcaactccagcaacttccaccagggcgctagtggcagtcagaaccaccatggaggtcagcctaaccgcggtgcagctccacgcccaccagtggcaccagcacaatcaggcccgtccgcacaagctaaggagaccgaagccaaacctgggtcctgtttcaactgtggtgagcttggccacttcgccgacaaatgcccgaagcccaggcgtgccgggccaaggaaagaagagcttagtacaccaatgagggttcataccccaggaaatagttcaacctcagtcaattttagcccttcagtgctaatagaaatccaaagatcaccatttctagccaacctcattcttctcgaatccaaagacctagatgtcattcttgggatggattggctgaccaagtttaagggagtcatcgattgtgcgaatcgcacagtcaccttgaccaacgagaagggagaaaccgtggtgtacaaatcactagtctcaccaaagcaaggggtctccttgaatcagatcgagatggaaatcccagtggtcaccgaggagaagaattcgaggaagttggaagagattcctatagtctgcgagtacccagaagtgtttcccgaagatctcactaccatgccacccaagcgaaagattgaattccggattgatttggcaccgggaaccgcgccaatttacaagagaccgtacaggatggcggccaacgaattagcagaggtcaagaagcaggttgatgagcaactgcagaaagggtacattcgaccgagtacttcaccttggggtgctccggtcatttttgtggagaaaaaggataagacgaaaaggatgtgcgttgattatcgcgcactcaacgaggtcacaatcaagaataaatatcatttaccgcggatcgatgatttgtttgatcaactgaagggagctaagttaaggatccgggaagaggatattccaaagacggctttcaccactcgatacgggctgtatgagtgcacggttatgtctttcggacttaccaacgcacccgcattcttcatgaatctgatgaacaaagtgttcatggaatttctcgacaagtttgttgtggttttcatcgacgacattcttatctattcaaagtctgaagaggaacatgagcagcatcttcgtctggtactcgagaagttgaaggagcaccaattatacgccaagttcagcaagtgtgacttctggttgacagaagtcaaatttctgggtcatgttattacagctcagggtgtggcagttgatccatcgaacgtggagtcagttaccaaatggaccccaccgaagaccgtgtcgcagattcgaagttttcttggacttgctggttattaccgccgattcatcgaaaacttctccaggatcgcccgacccatgactcagttgcttaagaaagatgagaagtttaaatggacagctgagtgcgataagagctttgaggagctcaagaagaaattagtatccgcaccagaaggcagagtggttgcgtatgcctcgcgacagttgcgtccacacgaagggaattatccaacccatgatttggaattggcagcagtggttcatgctttgaagatctgggggcactatctgattggcaaccgctgtgaagtatatacggatcacaagagtctgaaatacatcttcacccaaccggatctaaatctccgacaacgaagatggttggaattaatcaaagactatgatatgagcattcactaccacccggggaaagccaatgtggtggcagacgcattaagcaggaaaagttactgcactgctctatgcatcgagggcatgtgtgaggaattgcggcaggagtttgagcatctcaacgtgggaattgttgaacatgggttcgtagccgctctagaagcacggcctacgctcgtcgatcaagttagagccgctcaaataaatgatccggaaatagcagagctgaaaaagaacatgagagtcggaaaggctcgggatttccttgaggatgagcatggcacaatctggatgggagaaagattgtgtgtacctgacgacaaggaactgaaggatctgatactcaccgaggctcatcagacacagtattccattcacccaggcagcactaaaatgtaccaagacctcaaagaaaagttttggtgggtcagtatgagaagagaaatagctgaattcgtcgcactctgcgatgtttgccagcgagtgaaggcagagcatcaaaggccagcaggtttactccaacctcttcaaattccagaatggaaattgcataccacctatacgggaaagagattggcagagttgtacctggcaaggatcatgtgtttgcatggggtacctaagaagatagtatctgaccgagggagtcagttcacctcaaaattttggcagaaactgcagaaagaattggggacccgtttaaatttcagtaccgcctaccatccgcagacagatggtcagaccgagcgagtcaatcaaatcttggaagatatgttgagagcttgcgctcttgacttcggtggagcttgggacaacagcttgccatatgcggaattctcatacaacaacagttaccaagccagtctacagatggcaccgtttgaagctttatacggccggaagtgccgcacacctctcttctgggatcagacaggcgagcgtcaattgttcgggacagaggtattaacggaagcagaagagaaagtcagaaccatcagggaaaggttgagaattgcccagtctcgacagaagagctacgcggataaccgccgaaggaagctcacttttgaagcaggggattatgtgtatcttcgggttaccccgctccggggagtgcaccgttttcaaaccaaaggcaagttagcaccacgtttcgtgggaccctacaaaatcttggaacgaagggggaagttgcttattagctag

SEQ ID NO: 13853 - DNA, 4196 bp, Oryza sativa
  Clone ID: TFbOSC402030j.C1.o1.np
atggtgaacactcgcgccagtggaagtggaaacaataacaatgaagggaacccaactcttgctcaagtcctggctcaacagactcagttaatgaacatgatgatacagcagatgcagaaccagctcaaccaagggaacaacaatgctccaccgccgcagaacaagttaactgattttcttcgtgtaaggccacctaccttttctagcactaccaacccagtagaagcaggtgattggctacacgctgttgagaagaagttggaactgctccagtgtacggatcaggagaaagttgttttcgcttcacatcagttgcaaggacctgcatcagaatggtgggatcatttccggatgaacagagcagaaggacaaccaatcacttgggaagagtttactgaaggattcaagaagacacacatacctgtaggagttgttgctttgaagaagcgtgagtttagggcgcaggagaagttcttggaaggcttaaaggatgaactgtcagttacgttaatctcccatgactatgttgattttcagcagctggttgacaaagcaattcgacttgaagacaagaagaacaggatggataaccgtaaaaggaaaatgattgtattccaggaggcacaaggtagtagccagaggcagcgtatcacgttcaaccctagcaactttccccagggcgccagtggcagtcagaaccaccatggaggtcagtccaaccgcggtgcagctccacgcccaccaatggcaccggcacagtcaggcccgcccgcgcaagccaagaaggagactggagcaaaaccagggtcctgcttcaactgtggtgagcttggccacttcgctgacaaatgcccgaagcctaggcgtgccgggccaaggtttatccaggctcgtgtcaaccacgcatctgcggaggaggcacaagcagcaccagaggttgtactgggtacgttttctattaactcaatccctgcaacagtactttttgattctggtgcaacgcattcgttcatttcaaagaagtttgttgggatgcatgggttaataagagaggaacttagcacaccgatgcgggttcataccccagggaatagctccacttcggttcaattcagcccttctataacaatagaaattcaaagatcaccatttctagccaacctcattcttctcgaatccaaagacctagatgtcattcttgggatggattggctgaccaagtttaagggggtcatcgattgtgcgaatcgcacagtcaccttgaccaacgagaagggagaaaccgtggtgtacaaatcactagtctcaccaaagcaaggggtctctttgaatcagatgaaattggaagatatacccatagtctgcgagtatccggaagtgttcctcgaagacctcactaccatgccacccaagagagagattgattccggattgacttggcaccgggaaccgccccaatttacaagagaccgtacagaatggcggccaacgaattagccgaggtcaagaagcaggttgatgagcagctgcagaaagggtacattcgaccaagtacttcaccttggggtgctccggtcatttttgtagagaaaaaggataagacgaagaggatgtgcgttgattatcgcgcactcaacgaggtcaccatcaagaacaaatatcctttgccgcgaatcgatgatttgtttgatcaactgaaaggagctaaagtgttttctaagatagacctgcgatcaggctaccaccagttgagaattcgggaggaggatattccgaagacggccttcaccactcggtacgggctatatgagtgcacggttatgtcgttcggacttaccaacgcacccgcattcttcatgaatctgatgaacaaagtgttaatggaatttctggacaagtttgttgtggtgttcatcgacgacattcttatctattcaacgtccgaagaagaacatgaacaacatctccgtctagtactcgagaagttaaaggagcaccagctatacgccaagttcagcaagtgtgacttctggttgacggaagtcaaatttctgggccatgtcattacagctcagggtgtggcagttgatccatcaaacgtggagtcagttaccaaatggaccccgccgaagaccgtgtcgcagattcgaagttttcttggacttgcaggttattttaaatggacaactgagtgcgataagagttttgaggagctcaaaaagaaattagtatccgcaccagttttgattctgcccgaccagatgaaagacttccaagtctattgcgatgcatcccgtcacggacttggatgtgtcctaatgcaagagggcatagtggttgcgtatgcctcgcggcagttacgtccacacgaagggaattatccaactcatgacctggaattggcagcagtggttcatgctttgaagatctggaggcactatctgattggcaaccgctgcgaagtatatacggaccataagagtctgaaatacatcttcacccaaccggacctaaatctccgacaacgaagatggttggaactaatcaaagactatgacatgagtattcactaccacccgggtaaagccaatgtggtggcagacgcattaagccggaaaagttactgcactgccctatgcatcgagggcatgtgtgaggaattgtggcaggagtttgagcatctcaacgtgggaattgttgaacacgggtttgtagccgctctggaggcacggcctacgctcgtggatcaagtcagagcagctcaagtaaatgattctgaaatagcagagctgaaaaagaacatgagggtcggaaaagcccgggatttccacgaagatgagcatggcacaatctggttgggagaaagattgtgtgtacctgacgacaaggaactgaaggatctgatactcaccgaggctcatcagacccagtactccattcatccaggcagcactaaaatgtatcaagacctcaaagaaaagttttggtgggtcagcatgaggagagaaatagctgaattcgtcgcactctgcgatgtttgccaacgagtgaaggcagagcaccaaagaccagcaggtttactccaacctcttcaaatcctggaatggaaatgggaggagattgggatggactttataacgggactgccccggacatcgtcgggtcacgactcgatctgggtagtcgtggatcgactcactaaggttgctcacttcataccagtacataccacgtatacgggcaaaaggttggcggagctttacctttcgagaatcatgtgcctacatggagtacccaaaaagattgtatctgaccgagggagtcagttcacctcaaaattctggcagaagctgcaggaagaattggggacccgtttaaatttcagcacggcctatcacccgcaaactgatggtcagaccgagcgagtcaatcaaatcttggaagatatgttgagagcttgcgctctcgattttggtggagcttgggacaaaagcttgccatatgcggaattctcgtacaacaacagctaccaggccagtctacagatggcaccgtttgaagctttatacggccggaagtgccgcacacctctcttctgggatcagacaggcgagcgtcaactgttcgggacagaggtattagcggaagcagaagagaaagtcagaatcatcagggaaaggttgaggattgcccagtctcgacagaagagctacgcggataaccgccgaagggagctcacttttgaggcaggagattacgtgtatcttcgtgtcactccgctccggggagtacaccgttttcagacgaaaggcaagttggcaccacgcttcgtgggaccatacaaaatcttggaacgaaggggagaagttgcttatcagttagaacttccatccaatatgatcggtatccatgacgtgttccacgtgtcccaattaaagaagtgcttaagggtacctgaagaacaggctgattcgaaacacattgatatccaggaggacctaacatacgtggagaagccgattcgtatacttgataccagcgaaagaagaaccagaaacaaggtcaacaggttttgccgagttcagtggagtcatcattcagaagaggaagcaacctgggaaagggaggatgagttgaaagccgcccatccgcacctcttcaccagctcctccgaatctcggggccgagattccgtt

SEQ ID NO: 13854 - DNA, 1768 bp, Oryza sativa
  Clone ID: TFbOSC402030j.C1.o4.fg
atggtggttgaggcgtccggaggcacagcagatcacgcctgtcaggaggcagcatacctgatgatggccagactacgggagcgccacaactacatcttccatgacatggcataccgttttcaccctcgtcgagccagtggtgatgatgtcagcaccttccgtccgacaaccggccagaacgacaccacctttggtcacatgtgtgctgtgatgagtggattggataggatgcactcggacctgcacaaggcgaccaaggccttgaacgatgggaagctcatgaggatcgtcgctctgatggacgagatagcgcgcctgaagagggagaatgctcagttaaagggtcttcccgcgccaggaggagtccggatccgcaccacaccccgcaagacgacgacggcacccgtgcgcatccagcttgcgcccaggaacccacctccatcagcagctcccgcagcacctccagttccgcccgcagttcctgcagctccagctccagctcccgcgtccgctctctccttcgctccagcatcagccgccaggggtccagccagtggcaacggaggttgcttgcttgggatggtctacaccaggaatggtagccgcgcaacaggcgagggcagcaacggcgaagagcgcactgatggggcgcatccccacagcgattccggcaatggtccgccaccacttcccgagaatccgacgctagtccaagtaatggcacatcagacccagatgatggcagccatgatgcagcaccagcaccagcagatgcaccagcggatgctgcagcacgccgaacagcagcatcaacagtttggtccccctccccctcagtccaagttgccagagtttctacgtgtcaggccacccaccttctccagcaccaccaaccctatggaggcgaatgactggctccatgccatagagaagaagctgaatctcctgcaatgcaatgatcaggagaaggttgctttcgccacacaccagcttcaaggtcccgcgtcagcttggtgggacaatcacatggccacccgcccaccaggtactgaagtcacttgggtagagttctgccgtagcttcaggaaggcgcaggtgccagatggggttgtggcacaaaagaagagggaattccgggcactccatcagggcaacaggactgtgacagagtacctccacgagttcaatcgcctcgcgcgatatgcaccagaggatgtccgcaccgacgccgagaagcaggaaaagttcatggcgggtctggatgacgagctgaccaaccaactgatatctggggactacgctgacgttgagaggctggttgacaaggcaatccgtcaggaggatcaacgcaacaagatggacaggaagaggaaagccgcacagttcagggcacctcagggaagtcaccagaggccgcgcttcgctcccaggcagcagggtggacctaccaccatgatcgttcgtcagcaccgcccgttcaaccctagcaactttccccagggcgccagtggcagtcagaaccaccatggaggtcagtccaaccgcggtgcagctccacgcccaccaatggcaccggcacagtcaggcccgcccgcgcaagccaagaaggagactggagcaaaaccagggtcctgcttcaactgtggtgagcttggccacttcgctgacaaatgcccgaagcctaggcgtgccgggccaaggtttatccaggctcgtgtcaaccacgcatctgcggaggaggcacaagcagcaccagaggttgtactgg

SEQ ID NO: 13855 - DNA, 3804 bp, Oryza sativa
  Clone ID: TFbOSC404489j.C1.o1.fg
atggtctacaccaggactggcacccgcacgacaggcgagggcagcaacggcgaagaacgcgctgatggtgtgcaccccagcagtgattccggcaatggtccgccaccacttcccgagaatccgacccttgcccaagttatggcacatcagactcagatgatggcagccatgatgcagcagatgcagcaacagcaccagcagatgcaccagaggatgatgcagcacgccgaacagcagcaccagcagtttggtccccctccccctcagtccaagttgcctgagttcctacgtgtcaggccacccaccttctccagcaccaccaaccctatggaggcaaatgactggctccatgcaatagagaagaagctgaatctcctgcagtgcaatgatcaggagaaggtcgcttttgccacacaccagcttcaaggtcctgcgtcggcttggtgggataatcacatggccacccgcccaccgggtactgaagtcacatgggcagagttctgccgtagcttcaggaaggcacaggtgccagatggggtcgtggcacaaaagaagagggagtttcgtgcactccatcagggcaacaggactgtgacggagtacctccatgagtttaatcgcctcgcgcgatatgcaccagaggacgtccgcaccgacgccgagaagcaggagaagttcatggcgggtctggatgacgagctgaccaaccaactgatatctggggactacgctgactttgagaggctggttgacaaggcaatccgtcaggaggatcaacgcaacaagatggacaggaagaggaaggccgcacagttcagggcacctcagggaagtcaccagaggccgcgcttcactcccggacagcagggtggacctaccaccatgatcgttcgtcagcaccgcccgttcaatcctagcaactttcctcagggcgccagtggcagtcagaaccaccatggtggtcagtccaaccgcggtgcagctccacgcccaccaatggcaccggcacagtcaagcccgcccgcgcaagccaagaaggagactggagcaaaaccagggtcctgtttcaactgtggcgagcttggccacttcgctgacaaatgcccgaagcccaggcgtgccgggccaaggtttatccaggctcgtgtcaaccacgcatctgcggaggaggcacaagcagcaccagaggttgtactgggtacgtttcctgttaactcaatccctgcaacagtactttttgattctggtgcaacgcattctttcatttcaaagaaattcgtggggatgtatgggttaaggaaagaagagcttagcacaccaatgagagttcataccccgggaaatagttcaacctcagtcagttttagcccttcagtgctaatagaaatccaaagatcaccatttctagccaacctcattcttcttgaatccaaagacctagacgtcattcttgggatggattggctgaccaagtttaagggagtcatcgattgtgcgaatcgtactgtcaccttgaccaacgagaagggggaaacggtagtgtacaaatcaccagactcgccaaagcaaggagtctccttgaatcagattgaagcggaaatcccagtggacaccgtggagaagaatttgaagaaattggaagacatacccatagcctccgaatacccagaagtgtttcctgaagacctaactaccatgccacccaagagagagattgaattccggattgacttggcaccgggaaccgctccaatttacaagagaccgtacagaatggcggtcaacgaactagcagaggtcaagaagcaggttgatgagcagctgcagaaagggtacattcgaccaagtacttcaccttggggtgctccggtcatttttgtggagaaaagggataagacgaagaggatgtgcgttgattatcgcgcactcaacgaggtcacaatcaagaacaaatatcccttgccgcgaatcgacgatttatttgatcaactgaaaggagctaaagtgttttctaagatagacatgcgatcaggctaccaccagttgcgaattcgggaagaggatattccgaagacggccttcaccactcggtacgggctatatgagtgcacggttatgtccttcggacttaccaacgcacctgcattctttatgaatctgatgaacaaagtgttcatggaatttctggacaagtttgttgtggtattcatcgacgacatacttatctactcaaaatccgaggaagaacatgagcaacatctccgtctggtactcgagaagttgaaggagcaccagctatacgccaagttcagcaagtgtgacttctggttgacggaagtcaaatttctgggccatgtcattacagcccagggtgtggcagttgatccgtcgaacgtagagtcagtcaccaagtggaccccaccgaagaccgtgtcgcagattcgaagttttctaggactggcaggttattaccgccggttcatcgaaaacttctccagaatcgcccgacctatgactcagttgcttaagaaagatgagaagtttaaatggacagctgagtgcgataagagttttgaggagctcaagaagaaattagtatccgcaccggttttgattttgcccgaccagatgaaagacttccaagtctattgcgatgcatcccgtcacggacttggatgtgtcctaatgcaagaaggcagagtggttgccagtggttcatactttgaagatctggaggcacggccaacgctcgtggatcaagtcagagcagctcaagtaaatgattctgaaatagcagagctgaaaaagaatatgagagtcgggaaagcccgggatttccacgaagatgaacacggcacaatctggttgggagaaagattgtgtgtacctgacgacaaggaactgaaggatctgatactcactgaggctcatcagacccagtactccattcatccaggcagcactaaaatgtatcaagatctcaaagaaaagtttttgtgggtcagcatgaggagagaaatagctgaattcgtcgcactctgcgatgtttgccaacgagtgaaggcagagcaccaaagaccagcagcttgggacaaaagcttgccatatgcggaattctcgtacaacaacagctaccaggccagtctacagatggcaccgtttgaagctttatacggccggaagtgccgcacacctctcttctgggatcagacaggcgagcgtcaactgtttggaacagaggtattagcggaagcagaagagaaagtcaggatcatcagggaaaggttgagaattgcccagtctcgacagaagagctacgcggataaccgtcgaagggagctcacttttgaggcaggagattacgtgtatcttcgtgtcactccgctccggggagtacaccggtttcagacgaaaggcaagttggtaccacgcttcgtgggaccatacaaaatcctggaacgcaggggggaagttgcttatcagttagaacttccatccaacatgatcggcatccatgacgtgttccacgtgtcccaactaaagaagtgcttaagggtacctgaagaacaggctgattcggaacacattgatatccaggaggacctaacatatgtggagaagccggttcgtatacttgataccagcgaaaggagaaccagaaacaaggtcacccggttttgccgagttcagtggagtcatcattcagaagaggaagcaacctgggaaagggaagatgagttgaaagccgcccatccgcacctcttcaccagcacctccgaatctcggggccgagattccgtttaa

SEQ ID NO: 13856 - DNA, 5153 bp, Oryza sativa
  Clone ID: TFbOSC404956j.C1.o1.np
atggccggtcacccacccaaccaccgcggagaaggcatgatcgatttcgtggcagagttggcacgtatgacactggtggtgggctaccccaacgcgccggagtacacgacgattccgccgctcagtggcgagcttcctcaccgtgtccgcttggaggtccatggctacgtggggacttgcctcgctaacatggcggtcgaggcatctggaggcacagcagatcacgcctgtcaggaggcagcctacttgatgatggccagactacgggagcgccacgactacatcttccacgacacggcgtaccgctaccacccctgtcgagccaatggtgatggcgtcagctccttccgtccgacagctggcgagaacgacaccacctttggtcacatgtgtgctgtggtgaggggattggacaggatgcactcggacttgcacaaggcgaccaaggctttgaacgatgggaagctcatggggatcgtcgctctgaaggacgagatagcgcgcctgaagaaggagaacgctcagctaaagggtcttccagtgccaggaggagtccggatccgcaccacgccccgcaagacgacgactgcacctgtgcgcatccagcttgcgcccaggaacccacctccagcagcagctcccgcagcacctccagttccgcccgcagttcctgcagctccagttccagctcccgcgttcactctctccttcgctccagcatcagccgccagaggtccagccagtggtaccggaggttgttccctccagatggtctacaccaggaatggtagccgtgcaacaggcgagggcagcaacggcgaagaacgcgctgatggtgtgcaccccaacagtgattctggcaatggtccaccaccacttcccgagaatccgacgcttgcccaagttatggcacatcagactcagatgatggcagccatgatgcagcagatgcagcagcagcaccagcagatgcaccagaggatgatgcagcacgccgaacagcagcatcaacagtttggtccccctccccctcagtccaagttgccagagtttctacgcgtcaggccacccaccttctccagcaccaccaaccctatggaggcgaacgactggctccatgcaatagagaagaagctgaatctcctgcagtgtaatgatcaggagaaggtcgcttttgccacacaccagcttcagggtcccgcgtcagcttggtgggacaaccacatggccacccgcccaccgggtactgaagtcacatgggcagagttctgccgtagcttcaggaaggcacaggtgccagatggggtcgtggcacaaaagaagagggaatttcgtgcactccatcagggcaacaggactgtgacagagtacctccatgagttcaatcgcctcgcgcgatatgcaccagaggatgtccgcaccgacgccgagaagcaggagaagttcatggcgggtctggatgacgagctgaccaaccaactgatatctggggactacgccgactttgagaggctggttgacaaggcaatccgtcaggaggaccaacgcaacaagatggacaggaagaggaaggccgctcagttcagggcacatcagggaagtcaccagaggccgcgcttcactcccggacagcagggtggacctaccaccatgatcgtccgccagcaccgcccgttcaaccctagcaacttccaccagggcaccagtggcagtcagaaccaccatggaggtcagcccaaccgcggtgcagctccacgcccatcagtggcaccggcacagtcaggccagcccgcgcaagccaagaaggagacgggagcaaaaccagggtcctgcttcaactgtggcgagcttggccacttcgctgacaaatgcccgaagcccaggcgtgccgggccaaggtttatccaggctcgtgtcaaccacgcatctgcggaggaggcacaaacagcaccggaggtcgtactgggtacgttccctgttaactcaatccctgcaacagtactttttgattctggtgcaacgcattctttcatctcaaagaaatttgtcaggatgcatgggttaataagagaggaacttagcacaccgatgcgggttcataccccagggaatagctccacttcggttcaattcagcccttctataacaatagaaattcaaaggtcaccatttctagccaacctcattcttctcgaatccaaagacctagatgtcattcttgggatggattggctgaccaagtttaagggagtcatcgattgtgcgagtcgcacagtcaccttgaccaacgagaagggagaaaccgtggtgtacaaatctctagtctcgccaaagaaaggggtctcgttgaatcagattgagacggaaatcccagtggacaccgtagagaagaacttgagaaaattggaagatatacccatagtctgcgagtatccagaagtgttccccgaagacctcactaccatgccacccaagagagagattgaattccggattgacttggcaccgggaactgctccaatctataagagaccgtacagaatggcggtcaacgaattagcagaggtcaagaagcaagttgatgagcagctgcagaaagggtacatacgaccaagcacttcaccttggggcgctccggtcatttttgtggagaaaaaggataagacgaagaggatgtgcgtcgattatcgcgcacttaacgaggttacaatcaagaataaatatcctttaccgcgaatcgacgatttatttgatcaactgaaaggagctaaagtgttttctaagatagacctgcgatcaggctaccaccagttgagaatccgggaagaggatattccgaagacggccttcaccactcggtacggactatatgagtgcacggttatgtctttcggacttaccaacgcacccgcattcttcatgaatctgatgaacaaagtgttcatggagtttctggacaagtttgttgtggtgttcatcgacgacattcttatctattcagagtccgaagaagaacatgaacaacatctccgtctagtactcgagaagttgaaggagcaccagctatacgccaagttcagcaagtgtgacttctggttgacggaagtcaaatttctgggccatgtcattacagctcagggtgtggcagttgatccatcgaacgtggagtcagttaccaaatggaccccacctaagaccgtgtcgcagattcgaagttttctaggactggcaggttattatcgccgattcatcgaaaatttctccaggatcgcccgacccatgactcagttgcttaagaaggatgagaagtttaaatggacagctgagtgcgataagagctttgaggagctcaagaagaaattagtatccgcaccggttttgatcctgcccgaccagatgaaagacttccaggtctattgcgatgcatcccgtcacggacttggatgtgtcctaatgcaagagggcagagtggttgcatatgcctcgcggcagttgcgtccacacgaaggaaattatccaactcatgacttggaattggcagcaatggttcatgctttgaagatctggaggcactatctgattggcaaccgctgcgaagtatatacggaccataagagtctgaaatacatcttcacccaaccggatctaaaccttcgacaacgaagatggttggaactaatcaaagactatgacatgagtattcactaccacccgggtaaagccaatgtggtggcagacgctttaagccggaaaagttactgcactgccctatgcatcgagggcatgtgtgaggaattgcggcaggagtttgaacatctcaacatgggaattgttgaacacgggttcgtagccgctctggaggcacggcctacgctcgtggatcaagttagagccgctcaagtaaatgatccggaaatagcagaactgaaaaagaacatgagagtcggaaaggctcgggatttccacgaagatgagcatggcaccatctggatgggagaaagattgtgtgtacctgacgacaaggaactgaaggatctgatactcaccgaggctcatcagacccagtactccattcatccaggcagcactaaaatgtatcaagacctcaaagaaaggttttggtgggtcagcatgaggagagaaatagctgaattcgtcgcactctgcgatgtttgccaacgagtgaaagcagagcaccaaagaccagcaggtttactccaacctcttcaaatcccggaatggaaatgggaggagattggaatggactttataacaggactgccccggacatcatcgggtcacgattcaatctgggtagtcgtggatcgactcactaaggttgctcactttataccagtacataccacctatacgggaaagagattggcagaattgtacctcgcaaggatcatgtgtttgcatggggtacccaggaagatagtatccgaccgaggtagtcagttcacctcaaagttttggcagaaactgcaggaagaattggggacccgtttaaacttcagcacggcctatcacccgcaaactgatggtcagaccgagcgagtcaatcaaatcttggaggatatgttgagagcttgcgctcttgattttggtggagcttgggacaaaagcttgccatatgcggaattctcgtacaacaacagctaccaggccagtctacagatggcaccgtttgaagctttatacggccggaagtgccgcacacctctcttctgggatcagacaggcgaacgtcaactgttcggaacagaagtattagcggaagcagaagagaaagtcagaatcatcagggaaaggttgaggattgctcagtctcgacagaagagctacgcggataaccgtcgaagggagctcacttttgaggcaggagattacgtgtatcttcgtgtcactccgctccggggagtacaccgttttcagacgaaaggcaagttggcaccacgcttcgtgggaccatacaaaatcttggaacgaaggggagaagttgcttatcagctagaacttccatccaatatgggcgacatccgtgacgtgttccacgtgtcccaattaaagaagtgtttaatggtacctgaaggacaggctgattcggaacacattggggacagagctcgaattcgtatcatggtcaagcg

SEQ ID NO: 13857 - DNA, 5358 bp, Oryza sativa
  Clone ID: TFbOSC407404j.C1.o8.fg
atggaaaaacctaagagccctctgaatcctttttcattgcatatgttcttcgcaattggatttgttccgggaaaatggggatctgttcttgtggttcaagggaaaaatcttggtcgctcgtttaaaatggccggtcacccacccaaccaccgcggagaaggcatgatcgactttgtggcagagctggcacgcatgacactggtagtgggctaccccgacgcgccggagtacacgaccatcccaccgctcagtggcgagcttccttaccgtgtccgcttggaggtccatggctacgtggggacttgcctcgctaacatggcggtggaggcgtcaggaggcacagcagatcacgcctgtcaggaggcagcctacttgatgatggccaggctacgggagcgccacgactacatcttccacgacacggcgtaccgctaccacccccgtcgagcccatggtgatggcgtcagctccttccgtccgacagctggcgagaacgacaccaccttcggtcacatgtgtgctgtgatgaggggattggataggatgcactcggacctgcacaaggcgaccaaggccttgaacgatgggaagctcatgaggatcgtcgctctgaaggacgaggtagcgcgcctgaagaaggagaatgctcagttgaagggccttccagcgccaggaggagtccggatccgcactacgccccgtaagaggacgactgcacctgtgcgcatccagcttgcgcccaggaacccacctccaccagcagctcccgcagcagctccagttccgcccgcagttcctgcagctccagctccagctcccgcgttcactctctccttcgctccagcatcagccgccagaggttcagccagtggtaccggaggttgcttgtttgggatggtctacaccaggactggtagccgcgcaacaggcgagggcagcaacggcgaagaacgcgctgatggtgtgcaccccaacggtgattctggcaatgcagatgcatcagaggatgatgcagcacgccgaacagcagcaccagcagttggtccccctcccccccagtccaagttgcctgagtttctacgtgtcaggccacccaccttctccagcaccaccaaccctatggaggcaaatgactggctccatgcgatagagaagaagctgaatctcctgcagtgcaatgaccaggagaaggtcgctttcgccacacaccagcttcagggtcctgcgtcagcttggtgggacaaccacatggccacccgcccaccgggtactgaagtcacatgggcagagttctgccgtagcttcaggaaggcacaggtgccagatggggtcgtggcacaaaagaagagggaattccgtgcgctccatcagggcaacaggactgtgacagagtacctccatgagttcaatcgcctcgcgcgatatgcaccagaggatgtccgcaccgacgccgagaagcaggagaagttcatggcgggtctggatgatgagctgaccaaccaactgatatctggggactacgccgactttgagaggctggttgacaaggcaatccgccaggaggatcagcgcaacaaaatggacaggaaaagaaaggcggcgcagttccggtccaaccaaggcagtcagcaccgaccgcgcttcactcccggacagcagggtggacctaccaccatgatcgtccgccagcaccgcccgttcaactccagcaacttccaccagggcactagtggcagtcagaaccaccagggaggccagcccaaccgcggtgcagctccacgcccaccaatggcaccggcacagtcagcccagcccgcgcaagccaagaaggagacgggagcaaaaccagggtcctgcttcaactgtggcgagcttggccacttcgctgacaaatgcccgaagcccaggcgtgccgggccaaggtttatccaggctcgtgtcaaccacgcgtctgcggaggaggcacaagcagcaccagaggtcgtactgggtacgttccctgttaactcaatccctgcaacagtactttttgattctggtgcaacgcattctttcatttcaaagaaattcgtgggaatgtatgggctaaggaaagaagagcttagcacaccaatgagggttcgtaccccgggaaatagttcaacctcagtcagttttagcccttcagtgctaatagaaatccaaagatcaccatttctagccaacctcatccttctcgaatccaaagacctagatgtcattcttgggatggattggctgaccaagtttaagggagtcatcgattgtgcgaatcgcacagtcaccctgaccaatgagaaaggagaaaccgtggtgtacaaatccctagtctcgccaaagaaaggagcctcgttgaatcagattgaaacggaaatcccagtggacaccgtggggaagaacttgagaaaattggaagatatacccatagtctgcgagtatccggaagtgttccccgaaaacctcactaccatgccacccaagagggagattgaattccggattgacttggcaccgggaaccgctccaatttacaagagaccatacaggatggcggccaacgaattagcagaggtcaagaagcaagttgatgagcagctgcagaaagggtacatacgaccaagcacttcaccttggggcgctccggtcatttttgtggagaaaaaggataagacgaagaggatgtgcgtcgattatcgcgcacttaacgaggtcacaatcaagaataaatatcccttaccgcgaatcgacgatttatttgatcaactgaaaggagctaaagtgttctctaagatagacctgcgatcaggctaccaccagctgagaatccgggaagaggatattccgaagacggccttcaccactcggtacgggctatatgagtgcacggttatgtctttcggacttaccaacgcacccgcattcttcatgaatctgatgaacaaagtgttcatgaaatttctggacaagtttgttgtggtattcatcgacgacattcttatctattcaaagtccgaggaagaacatgaacaacatctccgtctggtactcgagaagttgaaggagcaccagctatacgccaagttcagcaagtgtgacttctggttgacggaagtcaaatttctgggccatgtcattacagcccagggtgtagcagttgatccatcgaacgtggagtcagttacaaaatggaccccaccaaagaccgtgtcgcagattcggagttttctaggactggcaggttattaccgccgattcatcgaaaacttctccagaatcgcccgacccatgactcagttgcttaagaaggatgagaagtttaaatggacagctgagtgcgataagagctttgaggagctcaaaaagaaattagtatccgcaccagtattgattctgcccgacccgacgaaagacttccaagtctattgtaatgcatcccgtcacggacttggatgtgtcctaatgcaagagggcagagtggttgcgtatgcctcgcggcagttgcgtccacacgaaggaaattatccaactcatgacttggaattggcagcagtggttcatgctttgaagatctggaggcattatctgattggaaaccgctgcgaagtatatacggaccataagagtctgaaatacatcttcacccaaccggatctaaaccttcgacaacgaagatggttggaactaatcaaagactatgacatgagtattcactaccacccgggtaaagccaatgtggtggcagacgctttaagccggaaaagttactgcactgccctatgcatcgagggcatgtgtgaggaactgcggcaggaatttgaacatctcaacatgggaattgttgaacacgggtttgtagccgctttggaggcacggcctacgctcgtggatcaagtcagagccgctcaagtaaatgatccggaaatagcagaattgaaaaagaacatgagagtcggaaaggctcgggatttccttgaggatgagcatggcacaatctggatgggagaaagattgtgcgtaccggacgacaaggaattgaaggatctgatactcaccgaagctcatcagacccagtactccattcatccaggcagcactaaaatgtatcaagacctcaaagaaaagttttggtgggtcagcatgaggagagaaatagctgaattcgtcgcactctgcgatgtttgccaacgagtgaaagcagagcaccaaagaccagcaggtttactccaacctctccaaatcccggaatggaaatgggaggagattggaatggactttatcacaggactgccccggacatcatcgggacatgattcaatctgggtagtcgtggatcgactcaccaaggtggctcactttataccagtacataccacctatacgggaaagagattggcagaattgtacctcgcaaggatcatgtgtttgcatggggtacccaagaagatagtctccgaccgaggtagtcagttcacctcaaagttctggcagaagctgcaggaagaaatggggacccgtttaaatttcagcacggcctatcacccgcaaactgatggtcagacagagcgagtcaatcaaatcttggaagatatgttgagagcttgcgctcttgattttggtggagcttgggacaaaagcttaccatatgcggaattctcgtataacaacagctaccaggccagtctacagatggcaccgtttgaagctctatacggccggaagtgccgcacacctctcttctgggatcagacaggcgaacgtcagctgttcggaacagaagtattagcggaagcagaagagaaagtcagaatcatcagggagagattgaggattgctcagtctcgacagaagagctacgcggataaccgtcgaagggagctaacttttgaggccggagattacgtgtatcttcgtgtcaccccgctccggggagtacaccgctttcagacaaaaggcaagttggcaccacgcttcgtgggaccgtacaaaattttggaacgaaggggagaagttgcctatcagctagaacttccatccactatgatcggcatccatgacgtgttccatgtgtcccaattaaagaagtgtttaagggtacctgaagaacaggctaattcggaacacattgatatccaagaggacctaacatatgtggagaagccggttcgcatacttgacactagcgaaaggagaaccagaaacaaggtcaccaggttttgccgtgttcagtggagtcatcattcagaagaggaagcaacctgggaaagggaagatgagttgaaggccgcccatccgtacctcttcaccagctccaccgaatctcggggccgagattccgtttaa

SEQ ID NO: 13858 - DNA, 5031 bp, Oryza sativa
  Clone ID: TFbOSC407849j.C1.o7.fg
atgggttgcaagatggccggtcacccacccaaccaccacggagaaggcatgatcgactttgtggcagagttggcacgcatgacactggtggtgggctaccccaacgcgccagagtacacgacgattccaccgctcagtggcgagcttcctcaccgtgttcgcctggaggtccatgactacgtggccggcgagaacgacaccacctttggtcacatgtgtgctgtgatgagggggttggataggatgcactcggacctgcacaaggcgaccaaggccttgaacgatgggaagctcatgaggatcgtcgctctgaaggacgagatagcgcgcctgaagagggagaatgctcagttaaagggtcttcccgcgccaggaggagtccggatccgcactacgccccgcaagacgacgacggcacccgtgcgcatccagcttgcgcccaggaacccacctccatcagcagctcccgcagcacctccggttccgcccgtagttcctgcagctccagctccagctcccgcgtccgctctctccttcgctccagcatcagccgccaggggtccagccagtggcaccggaggttgcttttttgggatggtctacaccaggaatggtagccgcgcgacaggcgagggcagcaacggcgaagagcgcactgatggggcgcatccccacagcgattctggcaatggtccgccaccacttcccgagaatccgacgctagcccaagtaatggcacatcagacccagatgatggcagccatgatgcagcagatgcagcagcagcaccagcagatgcaccagcggatgctgcagcacgccgaacagcagcatcagcagtttggtccccctccccctcagtccaagttgccagagttcctacgtgtcaggccacccaccttctccagtaccaccaaccctatggaggcgaatgattggctccatgccatagagaagaagctgaatctcctgcagtgcaatgatcaggagaaggttgctttcgccacacaccagcttcaaggtcctgcgtcagcttggtgggataaccacatgaccacccgcccaccaggtattgaagtcacttgggcagaattctgccgtagcttcaggaaggcacaggtgccagacggggtcgtggcacaaaagaagagggaatttcgtgcactccatcagggcaacaggactgtgacggaatacctccatgagttcaatcgcctcgcgcgatatgcaccagaggatgtccgtaccgacgccgagaagcaggaaaagttcatggcaggtctggacgacgagctgaccaaccaactgatatctggggactacgctgactttgagaggctggttgataaggcaatccgtcaggaggatcaacgcaacaagatggacaggaagaggaaggccgcacagttcagggcacctcagggaagtcaccagaggtcgcgcttcgctcccgggcagcagggtggacctaccaccatgatcgtccgtcagcaccgcccgttcaaccctagcaactttccccagggcaccagtggcagtcagaaccaccatggaggtcagtccaatcgcggtgcagctccacgcccaccaatggcaccggcacaatcaggcccgcccgcgcaagccaagaaggagacaggagcaaaaccagggtcctgcttcaactgtggcgagcttggccacttcgctgacaaatgcccgaagcctaggcgtgccgggccaaggtttatccaggctcgtgtcaaccacgcatctgcggaggaggcacaagcagcaccagaggtcatactgggtacgttccctattaactcaatccctgcaatagtactttttgattctggtgcgacgcattatttcatttcaaagaagtttgtcgggatgcaagggttaataagagaggaacttagcacaccaatgcgggttcataccccagggaatagctccacttcggttcaattcagcccttctataacaatagaaatccaaagatcaccatttctagccaacctcattcttctcgaatccaaagacctagatgtcattcttgggatggattggctgaccaagtttaagggagtcatcgattgtgcgaatcgcacagtcaccttgaccaacgagaagggagaaacggtagtgtacaaatcaccagactcaccaaagcaaggggtctctttgaatcagattgagacggaaatcccagtagacaccgtggagaaaaacttgaggaaattggaagatatacccatagtctgcgagtatccagaagtttttcccgaagacctcactaccatgccacccaagagagagattgaattccggattgacttggcaccgggaaccgctccaatttacaagagaccgtatagaatggcggccaacgaattagccgaggtcaagaagcaggttgatgagcagctgcagaaagggtacattcgaccaagtacttcaccttggggtgctccggtcatttttgtggagaaaaaggataaaacgaagaggatgtgcgttgattatcgcgcactcaacgaggtcacaatcaagaacaaatatcccttgccgcaaatcgacgatttatttgatcaactgaaaggagctaaagtgttttctaagatagacctgcgatcaggctaccaccagttgagaattcgggaagaggatattccgaagacggccttcaccactcggtacgggctatatgagtgcacggttatatccttcagacttactaacgcacctgcattcttcatgaatctgatgaacaaagtgttcatggaatttctggacaagtttgttgtggtattcatcgacgacatacttatctattcaaagtccgaagaagaacatgagcaacatctccgtctggtactcgagaagttgaaggagcaccagctatacgccaagttcagcaagtgtgacttctggttgacggaagtcaaatttctgggccatgtcattacagctcagggtgtggtagttgatccgtcgaacgtagagtcagttaccaaatggaccccaccgaagaccgtgtcgcagattcgaagttttctaggactggcaggttattaccgccgattcatcgaaaacttctccagaatcgcccgacccatgactcagttacttaagaaagatgagaagtttaaatggacagctgaatgcgataagagttttgaggagctcaagaagaaattagtatccgcaccagttttgattctgcccgaccagatgaaagacttcaaagtctattgcgatgcatcccgtcacggacttggatgtgtcctaatgcaagagggcagagtggttgcgtatgcctcgcggcagttgcgtccacacgaagggaattatccaactcatgacctggaattggcagcagtggttcatgctttgaagatctggaggcactatctgattggtaaccgctgcgaagtatatacggaccataagagtctgaaatacatcttcacccaaccggacctaaatctccgacaacgaagatggttggaactaatcaaagactatgacatgagtattcactaccacccgggtaaagccaatgtggtggcagacgctttaagccggaaaagttactgcactgccctgtgcatcgagggcatgtgtgaggaattgcggcaggagtttgagcatctcaacatgggaattgttgaacacgggtttgtggccgctctggaggcacggcctacgctcgtggatcaagtcagagcagctcaagtaaatgattctgaaatagcagagctgaaaaagaacatgagagtcggaaaagcccgggatttccacgaagatgagcatggcacaatctggttgggagaaagattgtgtgtacctgacgacaaggaactgaaggatctgatactcaccgaggctcatcagacccagtactccattcatccaggcagcactaaaatgtatcaagacctcaaagaaaagttttggtgggtcagcatgaggagagaaatagctgaattcgtcgcactctgcgatgtttgccaacgagtgaaggcagagcaccaaagaccagcaggtttactccaacctcttcaaatcccggaatggaaatgggaggagattggaatggactttataacgggactgccccggacatcgtcgggtcacgattcgatctgggtagtagtggatcgactcactaaggttgctcacttcataccagtacataccacatatacgggcaaaaggttggcggagctttacctttcgagaatcatgtgcctacatggagtacccaaaaagattgtatctgaccgagggagtcagttcacctcaaaattctggcagaagctgcaggaagaattggggacccgtttaaatttcagcacggcctatcacccgcaaactgatggtcagaccgagcgggtcaatcaaatcatggaagatatgttgagagcttgcgctgttgattttggtggagcttgggacaaaagcttgccatatgcggaattctcgtacaacaacagctaccaggccagtctacagatggcaccgtttgaagctttatacggccagaagtgccgcacacctctcttctgggatcagacaggtgagcgtcaactgttcggaacagaggtattagcggaagcagaagagaaagtcagaatcatcagggaaaggttgaggattgcccagtctcgacagaagagctacgcggataaccgtcgaagggagctcacttttgaggcaggagattacgtgtatcttcgtgtcactccgctccggggagtacaccgttttcagacgaaaggcaagttggcaccatgcttcgtgggaccatacaaaatcctggaacgaaggggggaagttgcttatcagttagaacttccatccaacatgatcggcatccatgacgtgttccacgtgtcccaattaaagaagtgcttaagggtacctgaagaacaggctgattcggaacacattgatatccaggaggacctaacatacgtggaaaagccggttcgtatacttgataccagtgaaaggagaaccagaaacaaggtcacctga

SEQ ID NO: 13859 - DNA, 4146 bp, Oryza sativa
  Clone ID: TFbOSC409054j.C1.o4.gm
atggtctacaccaggactggcaaccgcacgacaggcgagggcagcaacggcgaagaacgcgctgatggtgtgcaccccaacagtgattctggcaatggtccgccaccacttcccgagaacccgaccctggcccaagttatggcgcatcagactcagatgatggcagccatgatgcagcagatgcagcagcagcaccagcagatgcaccagaggatgatgcagtacgctgaacagcagcaccagcagtttggtccccctcccccgcaatccaagttgcctgagttcctgcgagtcaggccacccaccttctccagcaccaccaaccccatggaggcaaacgactggctccatgcaatagagaagaagctgaatctcctgcagtgcaatgatcaggagaaggtcgctttcgccacacaccagcttcagggtcctgcgtccgcttggtgggacaaccacatggccacccgcccaccgggtactgaagtcacatgggcagagttctgccgtagcttcaggaaggcacaggtgccagatggggtcgtggcacaaaagaagagggaatttcgtgcactccatcagggcaacaggacggtgacagagtacctccacgagttcaatcgcctcgcgcgatatgcaccggaggatgtccgcactgacgccgagaaacaagaaaagtttatggcaggcctggatgacgagctgaccaaccaactgatatccggggactacgctgactttgaaaggctggttgacaaggcaatccgtcaggaggatcagcgcaacaaaatggacaggaaaagaaaggcggcgcagttccggtccaaccaaggtagtcagcaccgaccgcgcttcactcctggacagcagggtggacctaccaccatgatcgtccgtcagcaccgcccgttccactctggcaacttccaccagggcgctagcggcagtcagaaccaccagggaggccagcccaaccgcggtgcagctccacgcccaccaatggcaccagcacagtcagcccagcccgcgcaagccaagaaggagacgggagcaaaaccagggtcctgcttcaactgtggcgagcttggccacttcgctgacaaatgcccgaagcccaggcgtgccggaccaaggtttatccaggctcgtgtcaaccacgcatctgtggaggaggcacaagcagcaccagaggtcgtactggtcaccctgaccaatgagaaaggagaaaccgtggtgtacaaatctctagtctcgccaaagaaaggagcctcgttgaatcagattgagacggaaatcccagtggacaccgaagagaagaacttgagaaaattggaggacatacccatagtctgcgagtatccagaggtgttccccgaagacctcaccaccatgccacccaagagggagattgaattccggattgatttggcaccaggaaccgctccaatctataagagaccgtacagaatggcggccaacgaattagcagaggtcaagaagcaagttgacgaacagctgcagaaagggtacattcgacccagcacttcaccttggggcgctccggtcatttttgtggagaaaaaggataagacaaagaggatgtgcgtcgattatcgcgcacttaacgaggtcacaatcaagaataaatatcctttgccgcgaatcgacgatttatttgatcaactgaaaggagctaaagtgttctctaagatagacctgcgatcaggctaccaccagttgagaatccgggaagaggatattccgaagacggccttcaccactcggtacgggctatatgagtgcacggttatgtccttcggacttactaacgcacccgcattcttcatgaatctgatgaacaaagtgttcatggaatttttggacaagtttgttgtggtattcatcgacaacattcttatctattcaaagtccgaagaggaacatgaacaacatctccgtctggtactcgagaagttgaaggagcaccagctatacgccaagttcagcaagtgtgacttctggttgacggaagtcaaatttctgggtcatgtcattacagctcagggtgtagcagttgatccatcgaacgtggagtcagttaccaagtggaccccaccgaagacagtgtcgcagattcgaagttttctaggactggctggttattaccgtcgtttcatcggaaacttctcaagaatcgcccgacccatgactcagttgcttaagaaagacgagaagtttaaatggacagctgagtgcgacaagagctttgaggagctcaaaaggaaattagtatccgcaccggttttgatcctgcccgaccagacgaaagacttccaagtctattgcgatgcatcccgtcacggacttggatgcgtcctaatgcaagagggcagagtggttgcatatgcctcgcggcagttgcgtccacacgaaggaaattatccaactcatgacttggaattggcagcagtggtccatgctttgaagatctggaggcactatctgatcggcaaccgctgcgaagtatatacggaccataaaagtctgaaatacatcttcacccaaccagacctaaaccttcgacaacgaagatggttggaactaatcaaagactatgacatgagtattcactaccacccgggtaaagccaatgtggtggcagacgctttaagccggaaaagttactgcactgctctatgcatcgagggcatgtgtgaggaattgcgacaggagcttgaacatctcaacatgggaattgttgaacacgggttcgtagccgctctggaggcacggcctacgctcgtggatcaagttagagccgctcaagtaaatgatccggaaatagcagaactgaaaaagaacatgagagtcggaaaagctcgggatttccacgaggatgagcatggcacaatctggatgggagaaagattgtgtgtaccggacgacaaggaattgaaggatctgatactcaccgaagctcatcagacccagtactccattcacccaggcagcaccaaaatgtaccaagaccttaaagaaaaattttggtgggtcagcatgagaagggaaatagctgaattcgtcgcactctgcgatgtttgccaacgagtgaaagcagagcaccaaagaccagcaggtttactccaacctctccaaatcccggaatggaaatgggaggagattggaatggactttataacgggactgccccggacatcatcgggacatgattcaatctgggtagtcgtggatcgactcaccaaggaagaattggggacccgtttaaacttcagcacggcctatcacccgcaaactgatggtcagaccgagcgtgtcaatcaaatcttggaggatatgttgagagcttgcgctcttgattttggtggagcttgggacaaaagcttaccatatgcggaattctcgtacaacaacagctaccaggccagtctacagatggcaccgtttgaagctctatacggccggaagtgccgcacaccgcttttctgggatcagacaggcgaacgtcaactgttcggaacagaagtattagcggaagcagaagagaaagtcagaatcatcagggaaaggttgaggattgctcagtctcgacagaagagctacgcggataaccgccgaagggagctcacttttgaggcaggagattacgtgtatcttcgtgtcaccccgctccggggagtacaccgctttcagacaaaaggcaagttggcaccacgcttcgtgggaccatacaaaattttggaacgaagaggagaagttgcctatcaactagaacttccgtccaacatgatcggcatccatgacgtgttccacgtatcccaattaaagaagtgtttaagggtacctgaagaacaggctgattcggaacacattgatatccaggaggacctaacatatgtggagaagccggccgaggcccagcccgacagccggccgcccgcccgcctcctctcggggtcgccgacagattccgatctctccgacgctccggtgtacttcgagatagtcgccgaggcaagggtgggcgtgatggagcggggcgggccctgcgacggcctctgtcgcttccggattcacctaggcacgagaggggactgcccgtcgcccgctggggacgggggtgaaacctga

SEQ ID NO: 13860 - DNA, 4887 bp, Oryza sativa
  Clone ID: TFbOSC409192j.C1.o1.fg
atgggttgcaagatggccggtcacccacccaaccaccgcggagaaggcatgattgattttgtggcagagttggcaagcatgacgctggtggtaggctaccccaacgcgccagagtacacgacgattccaccgctcagtggcgagcttcctcaccgtgttcgcttggaggtccacggctacgttggtacctgcctagccaatatggtggttaaggcatccggaggctcagcagatcacgcctgtcaggaggcagcatacctgatgatggccagactacaggagcgccacaactacatcttccacgacacggcataccggtttcaccctcgtcgagccagcaatgatgatgtcagtaccttccgtccgacagctggcaagaacgacaccacctttggtcacatgtgtgctgtgatgaggggattggataggatgcactcggatctgcaccaggcgaccaaggccttgaacgatgggaagctcatgaggatcgtcgctctgaaggacgagatagcgcgcctgaagagggagaacgctcagttaaagggtcttcccgcgccaggaggagtccggatccgcactacgccccgcaagactacgacggcacccgtgcgcgccagcttgcgcccaggaacccacctccatcagcagctcccgcagcacctccagttccgcccgcagttcctgcagctccagctccagctcccgcgtccgctctctccttcgctccagcatcagccgccagaggtccagccagtggcaccggagatggtctacaccaggaatggtagccgcgcaacaggcgagggcagcaacggcgaagagcgcactgatggggcgcatccccacagcgattccggcaatggtccgccaccacttcccgagaatccgacgctagcccaagtgatggcacatcagacacagatgatggcagccatgatgcagcagatgcagcagcagcaccagcagatgcaccagaggatgctgcagcacgccgaacagcagcaccagcagtttggtccccctccccctcagtccaagttgcctgagttcctacgtgagaaggttgctttcgccacacaccagcttcaaggtcccgcgtcagcttggtgggacaatcacatggccacccgcccaccaggtactgaagtcacttgggcagagttctgccgtagcttcaggaaggcgcaggtgccagatggggtcgtggcacaaaagaagagggaattccgggcgctccatcagggcaacaggactgtgacagagtacctccatgagttcaatcgcctcgcgcgatatgcaccagaggatgtccgcaccgacgccgagaagcaggaaaagttcatggtgggtctggatgacgagctgaccaagcaactgatatctggggactacgctgactttgagaggctggtggacaaggcaatccgtcaggaggatcaacgcaacaagatggacaggaagaggaaggccgcacagttcagggcacctcagggaagtcaccagaggccgcgcttcgctcccgggcagcagggtggacctaccaccatgatcgtccgccagtaccgcccgttcaatcctagcaactttcctcagggcgccagtggcagtcagaaccaccatggaggtcagcccaaccgcggtgcagctccacgcccaccaatggcaccggcacagtcaggcccgcccgcgcaagccaagaaggagactggagcaaaaccagggtcctgcttcaactgtggcgagcttggccacttcgctgacaaatgcccgaagcctaggcgtgccgggccaaggtttatccaggctcgtgtcaaccacgcatctgcggaggaggcacaagcagcaccagaggttgtactgggtacgtttcctgttaactcaatccctgcaacagtactttttgattctggtgcaacgcattctttcatttcaaagaaatttgtggggatgtatgggttaaggaaagaagagcttagcacaccaatgagagttcataccccgggaaataggtcaacctcagtcagttttagcccttcagtgctaatagaaatccaaagatcaccatttctagccaacctcattcttctcgaatccaaagacctagatgtcattcttgggatggattggctgaccaagttcaagggagtcatcgattgtgcgaatcacacagtcactttgaccaacgagaagggagaaaccgtggtgtacaaatcactagtctcaccaaagcaaggggtctctttgaatcagattgaagcagaaatcccagtggacaccgtggagaagaacttgaggaaattggaagatatacccatagtctgcgagtatccggaagtgttccccgaagacctcactaccatgccacccaagagagagattgaattccggattgacttggcaccgggaaccgctccaatttacaagagaccgtacagaatggcggccaacgaattagccgaggtcaagaagcaggttgatgagcagctgcagaaagggtacattcgaccaaaaaaagataagacgaagaggatgtgcgttgattatcgcgcactcaacgaggtcacaatcaagaacaaatatcccttgccgcgaatcgacgatttatttgatcaactgaaaggagctaaagtgttttctaagatagacctgcgatcaggctaccaccagttgagaattcgggaagaggatattccgaagacggccttcaccactcggtacgggctatatgagtgcacggttatgtccttcggacttactaacgcacctgcattcttcatgaatctgatgaacaaagtgttcatggaatttctggacaagtttgttgtggtattcatcgacgacatacttatctactcaaaatccgaagaagaacatgagcaacatctccgtctggtactcgagaagttgaaggagcaccagctatacgccaagttcagcaagtgtgacttatggttgacggaagtcaaatttctgggccatgtcattacagcccagggtgtggcagttgatccgtcgaacgtagagtcagtcaccaagtggaccctaccgaagatcgtgtcgcagattcgaagttttctaggactggcaggttattaccgccgattcatcgaaaacttctccagaatcgcccgacccatgactcagttgcttaagaaagatgagaagtttaaatggacagctgagtgcgataagagttttgaggagctcaagaagaaattagtatccgcaccggttttgattctgcccgaccagatgaaagacttccaagtctattgcgatgcatcccgtcacggacttggatgtgtcctaatgcaagagggcagagtggttgcgtatgcctcacggcagttgcgtccacacgaagggaattatccaactcatgacctggaattggcagcagtggttcatgctttgaagatctggaggcactatctgattggcaaccgctgcgaagtatatacggaccataagaactatgacatgagcattcactaccacccgggtaaagccaatgtggtggcagacgcgttaagcaggaaaagttactgcactgccctgtgcatcaagagcatgtgtgaggaattgcggcaggagtttgagcatctcaacgtgggaattgttgaacacgggttcgtagccgctctggaggcacggcctacgctcgtggatcaagtcagagcagctcaagtaaatgattctgaaatagcagagctaaaaaagaacatgagagtcgggaaagcccgggatttccacgaagatgaacatggcacaatctggttgggagaaagattatgtgtacctgacgacaaggaactgaaggatctgatactcaccgaggctcatcagacccagtactccattcatccaggcagcactaaaatgtatcaagacctcaaagaaaagttttggtgggttagcatgaggagagaaatagctgaattcgtcgcactctgcgatgtttgccaacgagtgaaggcagagcaccaaagaccagcaggtttactccaatctcttcaaatcccggaatggaaatgggaggagattggaatggactttataacaggactgccccggacatcatcgggtcacgattcgatctggatagtcgtggatcgactcactaaggttgctcatttcataccagtacataccacatatacgggcaaaaggttggcggagctttacctttcgagaatcatgtgcctacatggagtacccaaaaagattgtatccgaccgagggagtcagttcacctcaaaattctggcagaagctgcaggaagagttggggacccgtttaaatttcagcacggcctatcacccgcaaactgatggtcagaccgagcgagtcaatcaaatcttggaagatatgttgagagcttgcgctcttgattttggtggagcttgggacaaaagcttgccatatgcggaattctcgtacaacaacagctaccaggccagtctacagatggcaccgtttgaagctttatacggccggaagtgccgcacacctctcttctgggatcagataggcgagcgtcaactgttcggaacagaggtattagcggaagcagaagagaaagtcagaatcatcagggaaaggttgaggattgcccagtctcgacagaagagctacgcggataaccgtcgaagggagctcacttttgaggcaggagattacatgtatcttcgtgtcactccgctccggggagtacaccgttttcagaccaaaggcaagttggcaccacgcttcgtgggaccatacaaaatcctggaacgaaggggggaagttgcttatcagctagaacttccatccaacatgatcggcatccatgacgtgttccacgtgtcccaactaaagaagtgcttaagggtacctgaagaatag

SEQ ID NO: 13861 - DNA, 3429 bp, Oryza sativa
  Clone ID: TFbOSC409799j.C1.o20.fg
atggtctacaccaggaatggtagtcgcgcaacaggcgagggcagcaacggcgaagagcgcactgatggtgtgcatcccaatagcaattccggcaatggtccgccaccacttcccgagaatccgacgctagcccaagtgagggcacatcagggaagtcaccagaggccgcgcttcactcccgggcagcagggtggacctaccaccatgatcgtccgccagtaccgcccgttcaaccctagcaactttccccagggcgccagtggcagtcagaaccaccatggaggtcagcccaaccgcggtgcagctccacgcccaccagtggcaccagcacagtcaggcccgtccgcgcaagccaagaaggagactggaacgaaaccagggtcctgcttcaactgtggcgagcttggccatttcgccgacaaatgcccgaagcccaggtgtgccgggccaaggtttgtccaggctcgtgtcaaccacgcgtctgtagaggaggcgcaagcagcaccagaggtcgtactgggtacgttccctgttaactcaatccctgcaacagtactttttgattctggtgcaacgcattctttcatttcaaagaaatttgtggggatgcatgggttaaggaaagaagagcttagcacaccaatgagggttcataccccgggaaatagttcaacctcagtcagttttagcccttcagtgctaatagaaatccaaagatcaccatttctagccaacctcattcttctcgaatctaaagacctagatgtcattcttgggatggattggctgaccaagtttaagggagtcatcgattgtgcgaatcgcacagtcaccttgaccaacgagaagggagaaaccgtggtgtacaaatcactagtctcaccaaagcaaggggtctccttgaatcagattgaggcggaaatcccagtggacaccgtggagaagaatttgaggaaattggaagatatacccatagtctgcgagtatccagaagtgttccccgaagacctcactaccatgccacccaagagagagattgaattccggattgacttggcaccgggaaccgctccaatttacaagagaccgtacagaatggcggccaacgaactagcaaaggtcaagaagcaggttgatgagcagctgcagaaagggtacattcgaccaagtacttcaccttggggtgctccggtcatttttgtggagaaaaaggataagacgaagaggatgtgcgttgattatcgcgcactcaacgaggtcacaatcaagaacaaatatcccttgccgcgaatcgatgatttgtttgatcaactgaaaggagctaaagtgttttctaagatagacctgcgatcaggctaccaccagttgagaattcgggaagaggatattccaaagacggccttcaccactcggtatgggctatatgagtgcacggttatatctttcggacttaccaacgcacccgcattcttcatgaatctgatgaacaaagtgttcatggaatttctggacaagtttgttgtggtattcatcgacgacatacttatctattcaaagtccgaagaagaacatgagcaacatctccgtctggtactcgagaagttgaaggagcaccagctatacgccaagttcagcaagtgtgacttctggttgacggaagtcaaatttctgggccatgtcattacagctcagggtgtggcagttgatccatcgaacgtggagtcagttatcaaatggaccccacctaagaccgtgtcgcagattcggagttttcttgtacttgcgggttattaccgccgattcattgaaaacttctccaggatcgcccgtcccatgactcagttgcttaagaaagatgagaagtttaaatggacagctgagtgcgataagagttttgaggagctcaagaagaaattagtatccgcaccagttttgattctgcccgaccagatgaaagacttccaagtctattgcgatgcatcccgtcacggacttggatgtgtcctaatgcaacagggcagagtggtcgcgtatgcctcgtggcagttgcgtccacacgaagggaattatccaactcatgacctggaattggcagcagtggttcatgctttgaagatctggaggcactatctgattggcaaccgctgcgaagtatatacggaccataagagtctgaaatacatcttcacccaaccggacctaaatctgcgacaacgaagatggttggaactaatcaaagactatgacatgagcattcactaccacccgggcaaagccaatgtggtggcagacgcattaagcaggaaaagttactgcactgccctatgcatcgagggcatgtccgctctggaagcacggcctacgctcgtcgatcaagttagagccgctcaagtgaatgatcccgaaatagcagagctgaaaaagaacatgagagtcggaaaggctcgggatttccttgaggatgaacacggcacaatctggttgggagaaagattgtgtgtacctgacgacaaggaactgaagaatctgatactcaccgaggctcatcagacccagtactccattcatccaggcagcaccaaaatgtatcaagacctcaaagaaaagttttggtgggtcagcatgaggagagaaatagctgaattcgtcgcactctacgatgtttgccaacgagtgaaggcagagcaccaaagaccagcaggtttactccaacctcttcaaatcccggaatggaaatgggaggagatcagaatggactttataacaggtctgccccggacatcatcgggtcacgattcaatctgggtagtcgtggatcgactcactaaggatcagacaggtgagcgtcaactgttcgggacagaggtattagcggaagcagaagagaaagtcagaaccatcagggaaaggttgaggattgcccagtctcgacagaagagctacgcggataaccgccgaagggagctcacttttgaggcaggagattacgtgtatcttcgtgtcactccgctccggggagtacaccgttttcagacgaaaggcaagttggcaccacgcttcgtgggaccatacaaaatcttggaacgaaggggggaagttgcttatcagctagaacttccatccaatatgatcggcatccatgacgtgttccacgtgtcccaattaaagaagtgcttaagagtacccgaagaacaagctgattcggagcatattgatatccaggaggacctgacatatgtggagaagccggttcgtatacttgataccagcgaaagaagaaccagaaacaaggtcaccaggttttgccgagttcagtggagtcaccattcagaggaggaagcaacctgggaaagggaagatgagttgaaagccgcccatccgcacctcttcgccagctcctccgaatctcgggaccgagattccgtttaa

SEQ ID NO: 13862 - DNA, 4461 bp, Oryza sativa
  Clone ID: TFbOSC411348j.C1.o4.fg
atggtctacaccaggactggtagccgcgcaacaggcgagggcagcaacggtgaagaacgcgctgatggtgtgcaccccaacggtgattctggcaatggtccgccaccacttcccgagaatccgacgcttgcccaagttatggcacatcagactcagatgatggccgcgatgatgcagcagatgcagcagcagcaccagcagatgcatcagaggatgatgcagcacgccgaacagcagcaccagcagtttggtccccctccccctcagtccaagttgcctgagtttctacgtgtcaggccacccaccttctccagcaccaccaaccctatggaggcaaatgactggctccatgcgatagagaagaagctgaatctcctgcagtgcaatgatcaggagaaggtcgctttcgccacacaccagcttcagggtcctgcgtcagcttggtgggacaaccacatggccacccgcccaccgggtacggaagttacgtgggcagagttctgccgtagctttaggaaggcacaggtgccagacggggttgtagcgcaaaagaagagggaattccgggcgctccatcagggcaacaggacagtgacagagtacctccacgagttcaatcgcctcgcgcgatatgcaccagaggatgtccgcactgacgccgagaaacaggaaaagtttatggcaggcctggatgacgagctgaccaaccaactgatatccggggactacgctgactttgaaaggctggtcgacaaggcaatccgtcaggaggatcagcgcaacaaaatggacaggaaaagaaaggcggcgcagttccgatccaaccaaggtagtcagcaccgaccgcgcttcactcccggacagcagggtggacctaccaccatgatcgtccgacagcaccgcccgttccactctagcaacttccaccagggcgctagcggcagtcagaaccaccagggaggccagcccaaccgcggtgcagctccacgcccaccaatggcaccggcacagtcagcccagcccgcgcaagccaagaaggagacgggagcaaaaccagggtcttgcttcaactgtggcgagcttggccacttcgctgacaaatgcccgaagcccaggcgtgccgggctaaggtttatccaggctcgtgtcaaccacgcgtctgcggaggaggcacaagcagcaccagaggtcgtactgggtacgttccctgttaactcaatccctgcaacagtactttttgattctggtgcaacgcattctttcatttcaaagaaatttgtggggatgtatgggttaaggaaagaagagcttagcacaccaatgagggttcataccccgggaaatagttcaacctcagtcagttttagcccttcagtgctaatagaaatccaaagatcaccatttctagccaacctcattcttctcgaatccaaagacctagatgtcattcttgggatggattggctgaccaagtttaagggagtcatcgattgtgcgaatcgcacagtcaccctgaccaatgagaaaggagaaaccgtggtgtacaaatctctagtctcgccaaagaaaggagcctcgttgaatcagattgagacggaaatcccagtggacaccgaagagaagaacttgagaaaattggaggacatacccatagtctgcgagtatccagaggtgttccccgaagacctcaccaccatgccacccaagagggagattgaattccggattgatttggcaccaggaaccgctccaatctataagagaccgtacagaatggcggccaacgaattagcggaggtcaagaagcaagttgatgaacagctgcagaaagggtacatacgaccaagcacttcaccttggggcgctccggtcatttttgtggagaaaaaggataagacgaagaggatgtgcgtcgattatcgcgcacttaacgaggtcacaatcaagaataaatatcctttaccgcggatcgacgatttgtttgatcaactgaaaggagctaaagtgttttctaagatagacctgcgatcaggttaccaccagttgagaatccgggaagaggatattccgaagacggccttcaccactcggtacgggctatacgagtgcacggttatgtctttcggacttactaacgcacccgcattcttcatgaatctgatgaacaaagtgttcatggaatttctggacaagtttgttgtggtattcatcgacgacattcttatctattcaaagtccgaagaggaacatgaacaacatctccgtctggtactcgagaagttgaaggagcaccagctatacgccaagttcagcaagtgtgacttctggttgacggaagtcaaatttctgggtcatgtcattacagctcagggtgtagcagttgatccatcgaacgtggagtcagttacaaaatggaccccaccaaagaccgtgtcgcagattcggagttttctaggactggcaggttattaccgccgattcatcgaaaacttctccagaatcgcccgacccatgactcagttgcttaagaaagacgagaagtttaaatggacagctgagtgcgacaagagctttgaggagctcaaaaggaaattagtatccgcaccggttttgatcctgcccgaccagacgaaagacttccaagtctattgcgatgcatcccgtcacggacttggatgtgtcctaatgcaagagggcagagtggttgcatatgcctcgcggcagttgcgtccacacgaaggaaattatccaactcatgacttggaattggcagcagtggtccacgctttgaagatctggaggcactatctgatcggcaaccgctgcgaagtatatacggaccataaaagtctgaaatacatcttcacccaaccagatctaaaccttcgacaacgaagatggttggaactaatcaaagactatgacatgagtattcactaccacccgggtaaagccaatgtggtggcagacgctttaagccggaaaagttactgcactgctctatgcatcgagggcatgtgtgaggaattgcggcaggagtttgaacatctcaacgttggaattgttgaacacgggttcgtagccgctctggaggcacggcctacgctcgtggatcaagttagagccgctcaagtaaatgatccggaaatagcagaactgaaaaagaacatgagagtcggaaaagctcgggatttccacgaggatgagcatggcacaatctggatgggagaaagattgtgtgtaccggacgacaaggaattgaaggatctgatactcaccgaagctcatcagacccagtactccattcacccaggcagcaccaaaatgtaccaagaccttaaagaaaaattttggtgggtcagcatgaggagagaaatagctgaattcgtcgcactctgcgatgtttgccaacgagtgaaagcagagcaccaaagaccagcaggtttactccaacctcttcaaatcccggaatggaaatgggaggagattggaatggactttataacaggactgccccggacatcatcgggacatgattcaatctgggtagtcgtggatcgacttaccaaggtggctcactttataccagtacataccacctatacgggaaagagattggcagaattgtacctcgcaaggatcatgtgtttgcatggggtacccaagaagatagtatccgaccgaggtagtcagttcacctcaaagttctggcagaagctgcaggaagaaatggggacccgtttaaatttcagcacggcctatcacccgcaaactgatggtcagacagactaccaggccagtctacagatggcaccgtttgaagctctatacggccggaagtgccgcacacctctcttctgggatcagacaggcgaacgtcagctgttcggaacagaagtattagcggaagcagaagagaaagtcagaatcatcagggagagattgaggattgctcagtctcgacagaagagctacgcggataaccgtcgaagggagctaacttttgaggccggagattacgtgtaccttcgtgtcaccccgctccggggagtacaccgctttcagacaaaaggcaagttggcaccacgcttcgtgggaccgtacaaaattttggaacgaaggggagaagttgcctatcagctagaacttccatccactatgatcggcatccatgacgtgttccatgtgtcccaattaaagaagtgtttaagggtacctgaagaacaggctaattcggaacacattgatatccaagaggacctaacatatgtggagaagccggttcgcatacttgacactagcgaaaggagaaccagaaacaaggtcaccaggttttgccgtgttcagtggagtcatcattcagaagaggaagcaacctgggaaagggaagatgagttgaaggccgcccatccgtacctcttcaccagctccaccgaatctcggggccgagattccgtttaa

SEQ ID NO: 13863 - DNA, 3852 bp, Oryza sativa
  Clone ID: TFbOSC4117j.C1.o2.fg
atgccgatgacgcggcgctcaccccatatccctcgcctccttttcctccacgagctcgaatccgagagtttcgattcggcagcgacgacgttggagtgggtggtgcttgaggcgatcatggtgctgcttctgacgctgccagtgctggacaggctcccggtgcgggatgatctccgtggtgcggagcgcgctgaagacgatgatgttgatggtgctcttctgcctcttcctgctgatggacatctactggaacgtgtcgattggcccgaccgtgacccgcccaccgccgacttgcacccgcgccagacgacgcaaggagagagaaagaggggggaattggggaagaggagggtgagctatgtctggtttcaagttcagggagagccagccgacgctcagccgagcacggacgcgagctgcgccttgaaggaagaggaaggcggggtggccatgggcgccggcgaggagctcaaggaaggaggagggaaggcccaaggtctgtggggcgcggtggagccggagggcgatgatctcgtcgactatcggcaggaccggcaggcgctcgccgcgatacttcgcgccgtgcccgccgagatgctcgccacgctcgctgtcaaggagacggcgcaggaggcgtgggaagcgatcaagactcgccgtatcggtgtgcagcgcgtgcgtgaggtgaatgcacagcagctgcgccgagaattcggtgatatcctcttcaaggacggtgaaaccgtcgacgacttctcgatgcggatcggcggcctcgccaacaaccttcgcaccttaggtgataatatcactgaagctgaggtcgttcagaaattgttgcaggttgtcccagaacatctccagcaaatagccatctcgattgagaccttgctcgacgtcaatgaggtgtctctcgaggaggttactgggcgtctgcgctccgtcgagcaacgcaagcagcgcaagactgcggcggcatcgagtcaggtcgacgccaatggccgtctcctcttcaccgaggaagaatggctggcgaaattccgcaaggcggcctctctgcaagacgccgctcactcctccggcggcaacggcgaccaccggggtcgagggcgtgggaagaaggacggtggagccccgaaggaggcccagcccaagccagccaacccgggaggccgtaacccgggaaattgcaagaattgcggcaagaggggacattgggccaaagactgtcgcagcaagcccaaggcccagcaagcttacgtagcccaggaggaggacgaagagcctgctctgctcctagccaaggtgcagctggatccgccgcgtcctcgcgtcgctgcaccgacaaacgtcgtctcgccaccgagcgcgccgagggcgccttcgccgatgggcgaactcgccgtagtcgaggcaagggtcttcgcgcagctagacgacggtggcgaacatgatccggcaatgtggatcctggatactggcgcaaccaaccatatgaccgggtcccgctccgctttcgccgagctcgacacggtggtcaccggcactgtcaggtttggcgacggctcggtggttcgcatcgagggccgcggcaccgtcctgttctcctgcaggttcggggaacaccgcggcatcgccggggtctactacatcccgcggctcatggcgaacatcgtcagccttggacagctggatcgttccggcagcaaggtactgattcatcacggcgtcctgcgcgtgtgggatcctcgagggcacctactcgtccgtgtccgacgctccgacgactgcctctacaccatcaatctgtacatcgaccgtccggtctgcctcgcggcaaggagcgccgagccggcgtggcggtggcacgccaggagcaaggatgaggccgcgaacgccatcaagcactttcaggcccgtgcagaggtggagtccgggcgcaaactccgtgcactgcgcacggatcgtggcggcgaattcacctcaatcgaatttggggaatactgcgccaatctcggagttggtcggcagttgacggcgccctactccccgcagcagaacggagtagtggagcatcgaaaccaaaccatcgtcgccactgcccgcagcatgttgaaggcgaagggtgttcctgggcggttctggggagaggccatgtccacagcggtctttctcttgaatcgttcgccgacgaaaagcttggacaaccaaacgccctatgaagcatggtatggccaacggcccgctatgcatttccggcgcactttcgggtgcagggggcacgtcaagatcaccaagcccgggctgaagaaactcgatgaccggagtgcgccaatggtgctcctcggctacgtgcaaggctcgaaggcctaccggctctatgatccactcgagctccatgttgtgagcgccgacgaacctgcttcactggctgaggcggatccaaactggcgtggcgccatgcaagacgagcttaacgcgatcgtcgacaacgacacttggtcgctcactgacctaccccatggccaccgtgcaattgggctaaaatgggtctacaagctgaaacgtgacgaacagggggcgatcggggtggacttcgacgaggtcttcgcacctgtcgcccggctggaatcggtgcgcctccttctcgccgtcgccgcgcaccaagggtggcaagtccaccacatggacgtcaagtcggcattcctcaacggcgagctgctcgaggaagtttatgtctcgcagccgctgggtttcgtcgacgacaaccacaagaacaaggtgtatcgcctgcacaaagctctttacggcttgcgccaggcgcctcgcgcgtggaatgccaaacttgatagctccttgctgtcactcggctttcaccgcagcagctccgagcatggtgtgtacacacgcaccaggggaggaagacgactgacggtgggcgtctacgtcgatgacctcatcatcaccggcgatcacgacgacgagatccgcagcttcaagggagagatgatgaagctcttcaagatgagtgatttggggcactcagatactacctcggcatcgaggttacccaggacagtgatgggatcacgctggggcaagccgcatatgccggcaagattcttgagaaggcaggactcaaggactgcaatccctgtcagactcccatggagcttggttgggagtctgcgctatctcgtcaacacgcgacccgacctggcattctctgttgggtatgtcagtcgcttcatggagtcacccagggaagatcatctcgcagccgttcggcgcatactgcgctatgtggcaggcactcgctgctggggaattcgatttggcccaggtgcacggtgcgctttgccaatgttggttggttactctgacagtgatctggctggcgatccagatgagcgaaagagcacgtccggccagattttcttcgtcaatggcgggcctatcacttggcagtcctccaagcagaaggtggtggcattgtcctcctgtgaggccgagtacatcgccgcagccgccgcaacatgtcaaggagtatggctcgcgcggctgttagcggaggtgctgggcgacgagatcgccgcaccgctgctgaaggtggacaaccagtccacaatatcattgataaaaaatccagtgcatcatgaccggagtaagcatatcgatgtcaaatatcattatatccgggagtgtgcagaaaagaaactgatcgaaatgatgttcgtgggaactgcggagcagctcggtgatatattcaccaaatctctgggcagaaccaggtttcaggagcttcgtttaaagatcggtgtctgttctcttgacaagagcggtcagacttaa

SEQ ID NO: 13864 - DNA, 5130 bp, Oryza sativa
  Clone ID: TFbOSC412583j.C1.o1.fg
atggccggtcacccacccaaccaccgcggagaaggcatgatcgacttcgtggcagagctggcacgcatgacactggtggtgggctaccccaacgcgccagagtacacgaccatcccaccgctcagtggcgagcttcctcaccgtgtccgcttggaggtccatggctacgtggggacttgcctcgctaacatggcggttgaggcgtcaggaggcacagcagatcatgcctgtcaggaggcagcctacttgatgatggccaggttacgggagcgccacgactacatcttccacgacacggcgtaccgctaccacccccgtcgagcccatggtgatggcgtcagctccttccgtccgacagctggcgagaacgacaccaccttcggtcacatgtgtgctgtgatgaggggattggaccggatgcactcggacctgcacaaggcgaccaaggccttgaatgatgggaagctcatgaggatcgtcgctctgaaggacgagatagcgcgcctgaagaaggagaatgctcagttgaagggtcttccagcaccaggaggagtccggatccgcactacgccccgtaagaggacgactgcacccgtgcgcatccagcttgcgcccaggaacccacctccagcagcagcagctccggcagttcctccagctccagctccagctccagctccagctcccgcgttcactctctccttcgctccagcatcagccgccagaggaccagccagtggtaccggaggttgcttgtttgggatggtctacaccaggactggcaaccgcacgacaggcgagggcagcaacggtgaagaacgcgctgatggtgtgcaccccaacagtgattctggcaatggtccgccaccacttcccgagaatccgacgcttgcccaagttatggcacatcagactcagatgatggcagccatgatgcagcagatgcagcagcagcaccagcagatgcaccaaaggatgatgcagcacgccgagcagcagcaccagcagtttggtccccctccccctcagtccaagttgccagaatttctacgcgtcaggccacccaccttctccagcaccaccaaccccatggaggcgaacgactggctccatgcaatagagaagaagctgaatctcctgcagtgcaatgatcaggagaaggtcgcttttgccacacaccagcttcagggtcctgcgtcagcttggtgggacaaccacatggccacccgcccaccgggtactgaagtcacatgggcagagttctgccgtagcttcaggaaggcacaggtgccagatggggtcgtggcacaaaagaagagggaattccgtgcgctccatcagggcaacaggactgtgacagagtacctccatgagttcaatcgcctcgcgcgatatgcaccagaggatgtccgcaccgacgccgagaagcaggagaagttcatggcgggtctggatgatgagctgaccaaccaactgatatctggggactacgctgactttgagaggctggtcgacaaggcaatccgtcaggaggaccaacgcaacaagatggacaggaagaggaaggccgctcagttcagggcacctcagggaagtcaccagaggccgcgcctcactcccggacagcagggtggacctaccaccatgatcgtccgccagcaccgcccgttcaaccctagcaacttccaccagggcaccagtggcagtcagaaccaccatggaggtcagcccaaccgcggtacagctccacgcccaccgatggcaccggcacagtcaggccagcccgcacaagccaagaaggagacgggagcaaaaccagggtcctgcttcaactgtggcgagcttggccacttcgctgacaaatgcccgaagcccaggcgtgccggaccaaggtttatccaggctcgtgtcaaccacgcatctgcggaggaggcacaagcagcaccagaggtcgtactgggtacgtttcctgttaactcaatccctgcaacagtactttttgattctggtgcaacgcattctttcatctcaaagaaatttgtcgggatgcatgggttaataagagaggaacttagcacaccgatgcgggttcataccccagggaatagctccacttcggttcaattcagcccttctataacaatagaaattcaaaggtcaccatttctagccaacctcattcttctcgaatccaaagacctagatgtcattcttgggatggattggctgaccaagtttaagggagtcatcgattgtgcgagtcgcacagtcaccttgaccaacgagaagggagaaaccgtggtgtacaaatctctagtctcaccaaagaaaggggtctcgttgaatcagattgagacggaaatcccagtggacaccgtagagaagaacttgcggaagttggaagatatacccatagtctgcgagtatccagaagtgttccccgaagacctcactaccatgccacccaagagagagattgaattccggattgacttggcaccgggaaccgctccaatttacaagagaccatacaggatggcggccaacgaagtagcagaggtcaagaagcaagttgatgagcagctgcagaaagggtacatacgaccaagcacttcaccttggggcgctccggtcatttttgtggagaaaaaggataagacgaagaggatgtgcgtcgattatcgcgcacttaacgaggtcacaatcaagaataaatatcctttaccgcggatcgatgatttgttcgatcaactgaaaggagctagagtgttttctaagatagacctgcgatcaggctaccaccagttgagaatctgggaagaggatattccgaagacggccttcaccactcggtacgggctatatgagtgcacggttatgtctttcggacttaccaacgcacccgcattcttcatgaacctgatgaacaaagtgttcatggaatttttggacaagtttgttgtggtgttcatcgacgacattcttatctactcaaaatccgaggaagaacatgagcaacatctccgtctggtactcgaaaagttgaaggagcaccagctatacgccaaattcagcaagtgtgacttctggttgacggaagtgaaatttctgggtcatgtcattacggctcagggtgtggcagtcgacccatcgaacgtggagtcagttaccaaatggaccccacctaagaccgtgtcgcagattcggagttttctaggactggcaggttattaccgccgattcatcgaaaatttctccaggatcgcccgacccatgactcagttgcttaagaaagatgagaagtttaaatggacagctgagtgcgataagagttttgaggagctcaagaagaagttagtatccgcaccagtattgattctgcccgacccgacgaaagacttccaagtctattgtgatgcatcccgtcacggacttggatgtgtcctaatgcaagagggcagagtggttgcgtatgcctcgcggcagttgcgtccacacgaaggaaattatccaactcatgacttggaattggcagcagtggttcatgctttgaagatctggaggcactatctgattggaaaccgctgcgaagtatatacggaccataagagtctgaaatacatcttcacccaaccggacctaaaccttcgacaacgaagatggttggaactaatcaaagactatgacatgagtattcactaccacccgggtaaagccaatgtggtggcagacgcattaagccggaaaagttactgcactgccctatgcatcgagggcatgtgtgaggaattgcggcaggagtttgagcatctcaacgtgggaattgttgaacacgggttcgtagccgctctggaggcacggcctactctcgtggatcaagtcagagcagctcaagtaaatgattctgagatagcagagctgaaaaagaatatgagagtcggaaaggctcgggatttccacgaggatgagcatggcacgatctggatgggagaaagattgtgtgtacctgacgacaaggaactgaaggatctgatactcaccgaggctcatcagacccagtactccattcacccaggcagcaccaaaatgtaccaagacattaaagaaaaattttggtgggtcagcatgagaagggaaatagctgaattcgtcgcactctgcgatgtttgccaacgagtgaaagcagagcaccaaagaccagcaggtttactccaacctcttcaaatcccggaatggaaatgggaggagattggaatggactttataacaggactgccccggacatcatcgggtcacgattcaatctgggtagtcgtggatcgactcaccaaggtggctcactttataccagtacataccacctatacgggaaagagactggcagaattgtacctcgcaaggatcatgtgtttgcatggggtacccaggaagatagtatccgaccgaggtagtcagttcacctcaaagttttggcagaaattgcaggaagaattggggacccgtttaaatttcagcacggcatatcacccgcaaactgatggcgaacgtcaactgttcggaacagaagtattaacggaagcagaagagaaagtcagaatcatcagggaaaggttgaggattgctcagtctcgacagaagagctacgcggataaccgtcgaagggagctcacttttgaggcaggagattacgtgtatcttcgtgtcactccgctccggggagtacaccgttttcagacgaaaggcaagttggcaccacgcttcgtgggaccatacaaaattttggaacgaaggggagaagttgcttatcagttagaacttccatccaatatgatcggcatccatgacgtgttccacgtgtcccaattaaagaagtgtttaagggtacctgaagaacaggctgattcggaacacattgatatccaggaggacctaacatatgtggagaagccggttcgcatacttgataccagcgaaaggagaaccagaaacaaggttactaagttttgccgagttcagtggagtcatcattcagaagaggaagcaacctgggaaagggaagatgagttgaaagccgcccatccgcacctcttcaccagctcctccgaatctcggggccgagattccgtttaa

SEQ ID NO: 13865 - DNA, 5475 bp, Oryza sativa
  Clone ID: TFbOSC413746j.C1.o1.np
atggccggccacccacccaaccaccgcggagaaggcatgattgactttgtggcagagttagcacgtatgacgctggtggtgggctaccccaacgcgccagagtacacgactgttccaccgcttagtggcgagcttcctcaccgtgtccgcctggaggtccatggctatgtgggcacctgcctcgctaacatggtggttgaggcgtccggaggcacagcagatcacgcctgttaggaggcagcatacctgatgatggccagactacgggagcgccacaactacatcttccacgacacggcgtaccgatttcaccctcttcgagccagcggtgatgatgtcagtactttccgtccgacagccggcgagaacgacactacctttggtcacatgtgtgctgtgatgaggggattggataggatgcactcggacctgcacaaggcgtccaaggccttgaatgatgggaaactcatgagaatcgtcgctctgaaggacgagatagcgcgcctgaagagggagaatgctcagttaaagggtcttcccgcgccaggaggagtccggatccgcactacgccccgtaagacgacaactgcacccgtgcgcatccagcttgcgcccaggaacccacctccatcagcagctcccgcagcacctccaattccgcccgtagctccagtagttcctgtagctccagcaccagctctaactcccgttcctgtgtcagctcccacgtccgctctctccttcgctccagcatcagccgccaggggtccagccagtggcaacggaggttggttgtctgctactcccaatggcagtcgcgatcttagcagtagtagctccagtggctcagagccgggcagcggcgagacttatctgccaggctccaggagtcgctttgagggacctgatctcttcctccagatggtctacaccaggaatggtagccgcgcaacaggcgagggcagcaacggcgaagagcacactgatggtgttcatcccaacagcgattccggcaatggtccgccaccacttcccgagaatccgacgctagcccaagtgatggcacatcagactcagatgatggcagccatgatgcagcagatgcagcagcagcaccagtagatgcaccagaggatgctgcagcacgccgaacaacagcaccagcagtttggtccccctccccctcagtccaagttgccagagtttctacgtgtcaggccacccactttctccagcaccaccaaccctatggaggcgaatgattggctccatgccatagagaagaagctgaatctcctgcagtgcaatgatcaggagaaggttgctttcgccacacaccagcttcaaggtcttgcgtcagcttggtgggacaatcacatggccacccgcccgccaggcactgaagtcacttgggcagagttctgtcgtagcttcaggaaggcgcaggtgccagatggggtcgtggcacaaaagaagagagaattccgagcactccaccagggcaacaggacggtgacggagtatctccatgagttcaatcgcctcgcgcgatatgcaccggaggatgtccgtactgacgccgagaagcaggaaaaattcctagcaggtctggatgatgagctaaccaaccagttgatatctggagattacgccgatttcgaaaggctggtggacaaggcaatccgtcaggaggatcaacgcaacaagatggacaggaagaggaaggccgctcagttcagggcacatcagggaagtcaccagaggccgcgcttcgctaccgggcagcagggtggacctaccaccatgatcgtccgccagtaccgcccgttcaaccctagcaacttcccccagggcgccagtggcagtcagaaccaccatggaggtcagcccaaccgtggtgcagctccacgcccaccagtggcaccggcacagtcaggcccgtccgcgcaagccaagaaggagactggaacaaaaccagggtcctgcttcaactgtggcgagcttggccacttcgctgacaaatgcccgaagcctaggcgtgccgggttaaggtttgtccaggctcgtgtcaaccacgcatctgcggaggaggcacaagcagcaccggaggtcgtactgggtacgtttcctgttaactcaatccctgcaacagtactttttgattctggtgcaacgcattctttcatttcaaagaagtttgtcgggatgcatgggttaataagagaggaacttagcacaccaatgcgggttcataccccagggaatagctccacttcggttcaattcagcccttctataacaatagaaattcaaagatcaccatttctagctaacctcattcttctcgaattcaaagacctagatgtcattcttgggatggattggctaaccaagttcaagggagtcattgattgtgcgaatcgcacagtcaccttgaccaacgagaagggagaaacagtagtgtacaaatcaccagactcaccaaagcaaggggtctccttgaatcagattaggcggaaatccagtggtcaccgtggagaagaatttgaggaaattggaagatatccccatagtctgcgagtatccagaagtgttccccgaagacctcactaccatgccacccaagagagagattgaattccggattgacttggcaccgggaaccgctccaatttacaagagaccgtacagaatggcggccaacgaactagcagaggtcaagaagcaggttgatgagcagctgcagaaagggtacattcgaccaagtacttcaccttggggtgctccggtcatttttgtggagaaaaaggataagacgaagaggatgtgcgttgattatcgcgcactcaacgaggtcacaatcaagaataaatatcctttgccgcgaatcgatgatttgtttgatcaactgaaaggagctaaagtgttttctaagatagacctacgatcacgctaccaccagttgagaattcgggaagaggatattccaaagacggccttcaccactcggtacgggctgtatgagtgcacggttatgtccttcggacttaccaacgcacccacattcttcatgaatctgatgaacaaagtgttcatggaatttctggacaagtttgttgtcgttttcatcgacgacttacttatctattcaaagtctgaagaagaacacgagcagcatctccgtctggtactcgagaagttgaaggagcaccagctatacgccaagttcagcaagtgtgacttctggttgacggaagtcaaatttctgggccatgtcattacagctcagggtgtggcagttgatccatcgaacgtggagtcagttaccaaatggaccccacctaagaccgtgtcgcagatttagagttttcttggacttgcgggttattacagccgattcattgaaaacttctccaggatcgcccgacccatgaagatgagaaagatgagaagtttaaatggacagctgagtgcgataagagttttgaggagctcaagaagaaattagtatccgcaccagttttgattctgcccgaccagatgaaagacttccaagtctattgcgatgcatcccgtcacggacttggatgtgtcctaatgcaagagggcagagtggtcgcgtatgcctcgcggcatttgagtccacacgaagggaattatccaactcatgacctggaattggcagcagtggttcatgctttgaagatctggaggcactatctgattggcaaccgctgcgaagtatatacggaccataagagtctgaaatacatcttcacccaaccggacctaaatctccgacaacgaagatggttggaactaatcaaagactatgacatgagcattcactaccacccgggtaaagtcaatgtggtggcagacgcattaagcaggaaaagttactgcactaccctatgcatcgagggcatgtgtgaggaattgcggcaggagtttgagcatctcaacgtgggaattgttgaacacgggttcatagccgctctggaggcacggcctacgctcgtggatcaagtcagagcaggtcaagtgaatgatcctgaaatagcagagctgaaaaagaacatgagagtcgaaaaggctcgggatttccttgaggatgaacacggcacaatctggttgggagaaagattgtgtgtacttgacgacaaggaattgaaggatctgatactcaccgaggctcatcagacccagtactccattcatccaggcagcaccaaaatgtatcaagacctcaaagaaaagttttggtgggtcagcatgaggagagaaatagctgaattcgtcgcactctgcgatgtttgtcaacgagtgaaggcagagcaccaaagaccagcaggtttactccaacctcttcaaatcctggaatggaaatgggaggagattggaatggactttataacaggacttccccggacatcatcgggtcacgattcaatctaggtagtcgtggatcgactcactaaggttgctcacttcataccagtacataccacgtatacgggcaaaaggttggcggagctctacctctcgagaatcatatgtctacatggagtacccaaaaagattgtatctgatcgagggagtcagttcacctcaaaattctggcagaagctgcaggaagaattggggacccgtttaaatttcagcacggcctatcacccgcaaactaatggtcagaccgagcgagtcaatcaaatcttggaagatatgttgagagcttgcgctcttgattttggtggagcttgggataaaagcttgccatatgcggaattctcgtacaacaacagctaccaggccagtctacagatggtaccgtttgaagctttatacggccggaagtgccgcacacctctcttctgggatcaggcaggcgagcgtcaactgttcgggatagaggtattagcggaagcagaagagaaagtcagaaccatcagggaaaggttgaggattgcccagtctcgacagaagagctacgcggataaccgccgaagggagctcacttttgaagcaggggattacgtgtatcttcttgtcactccgctccggggagtacaccgttttcagacgaaaggtaagttggcaccacgcttcgtgggaccatacaaaatcttggaacgaaggggggaagttgcttatcagctagaacttccatccaatatgatcggcatccatgacgtgttccacgtgtcccaattaaagaagtgcttaagagtacccgaagaacaaactgattcggagcatattgatatccaggaggacctgacatatgtggagaagccggttcgtatacttgataccagcgaaagaagaaccagaaacaaggtcaccaggttttgccgagttcagtggagtcaccatccagaggaggaagcaacctgggaaagggaagatgagttgaaagccgcccatccgcacctcttcgctagctcctccgaatctcggggccgagattccgtt

SEQ ID NO: 13866 - DNA, 5019 bp, Oryza sativa
  Clone ID: TFbOSC414115j.C1.o1.fg
atggtggttgaggcgtccggaggcacagcagatcacgcctgtcaggaggcagcatacctgatgatggccagactacgggagcgccacaactacatcttccatgacatggcataccgttttcaccctcgtcgagccagtggtgatgatgtcagcaccttccgtccgacaaccggccagaacgacaccacctttggtcacatgtgtgctgtgatgagtggattggataggatgcactcggacctgcacaaggcgaccaaggccttgaacgatgggaagctcatgaggatcgtcgctctgatggacgagatagcgcgcctgaagagggagaatgctcagttaaagggtcttcccgcgccaggaggagtccggatccgcaccacaccccgcaagacgacgacggcacccgtgcgcatccagcttgcgcccaggaacccacctccatcagcagctcccgcagcacctccagttccgcccgcagttcctgcagctccagctccagctcccgcgtccgctctctccttcgctccagcatcagccgccaggggtccagccagtggcaacggaggttgcttgcttgggatggtctacaccaggaatggtagccgcgcaacaggcgagggcagcaacggcgaagagcgcactgatggggcgcatccccacagcgattccggcaatggtccgccaccacttcccgagaatccgacgctagtccaagtaatggcacatcagacccagatgatggcagccatgatgcagcaccagcaccagcagatgcaccagcggatgctgcagcacgccgaacagcagcatcaacagtttggtccccctccccctcagtccaagttgccagagtttctacgtgtcaggccacccaccttctccagcaccaccaaccctatggaggcgaatgactggctccatgccatagagaagaagctgaatctcctgcaatgcaatgatcaggagaaggttgctttcgccacacaccagcttcaaggtcccgcgtcagcttggtgggacaatcacatggccacccgcccaccaggtactgaagtcacttgggtagagttctgccgtagcttcaggaaggcgcaggtgccagatggggttgtggcacaaaagaagagggaattccgggcactccatcagggcaacaggactgtgacagagtacctccacgagttcaatcgcctcgcgcgatatgcaccagaggatgtccgcaccgacgccgagaagcaggaaaagttcatggcgggtctggatgacgagctgaccaaccaactgatatctggggactacgctgacgttgagaggctggttgacaaggcaatccgtcaggaggatcaacgcaacaagatggacaggaagaggaaagccgcacagttcagggcacctcagggaagtcaccagaggccgcgcttcgctcccaggcagcagggtggacctaccaccatgatcgttcgtcagcaccgcccgttcaaccctagcaactttccccagggcgccagtggcagtcagaaccaccatggaggtcagtccaaccgcggtgcagctccacgcccaccaatggcaccggcacagtcaggcccgcccgcgcaagccaagaaggagactggagcaaaaccagggtcctgcttcaactgtggtgagcttggccacttcgctgacaaatgcccgaagcctaggcgtgccgggccaaggtttatccaggctcgtgtcaaccacgcatctgcggaggaggcacaagcagcaccagaggttgtactgggtacgttttctattaactcaatccctgcaacagtactttttgattctggtgcaacgcattcgttcatttcaaagaagtttgttgggatgcatgggttaataagagaggaacttagcacaccgatgcgggttcataccccagggaatagctccacttcggttcaattcagcccttctataacaatagaaattcaaagatcaccatttctagccaacctcattcttctcgaatccaaagacctagatgtcattcttgggatggattggctgaccaagtttaagggggtcatcgattgtgcgaatcgcacagtcaccttgaccaacgagaagggagaaaccgtggtgtacaaatcactagtctcaccaaagcaaggggtctctttgaatcagattgaagcagaaatcccagtggacaccgtggagaagaatttgaggaaattggaagatatacccatagtctgcgagtatccggaagtgttcctcgaagacctcactaccatgccacccaagagagagattgattccggattgacttggcaccgggaaccgccccaatttacaagagaccagaaaaaggataagacgaagaggatgtgcgttgattatcgcgcactcaacgaggtcaccatcaagaacaaatatcctttgccgcgaatcgatgatttgtttgatcaactgaaaggagctaaagtgttttctaagatagacctgcgatcaggctaccaccagttgagaattcgggaggaggatattccgaagacggccttcaccactcggtacgggctatatgagtgcacggttatgtcgttcggacttaccaacgcacccgcattcttcatgaatctgatgaacaaagtgttaatggaatttctggacaagtttgttgtggtgttcatcgacgacattcttatctattcaacgtccgaagaagaacatgaacaacatctccgtctagtactcgagaagttaaaggagcaccagctatacgccaagttcagcaagtgtgacttctggttgacggaagtcaaatttctgggccatgtcattacagctcagggtgtggcagttgatccatcaaacgtggagtcagttaccaaatggaccccgccgaagaccgtgtcgcagattcgaagttttcttggacttgcaggttattaccgccgattcatcgaaaacttctccagaatcgcccgacccatgactcagttgcttaagaaagatgagaagtttaaatggacaactgagtgcgataagagttttgaggagctcaaaaagaaattagtatccgcaccagttttgattctgcccgaccagatgaaagacttccaagtctattgcgatgcatcccgtcacggacttggatgtgtcctaatgcaagagggcatagtggttgcgtatgcctcgcggcagttacgtccacacgaagggaattatccaactcatgacctggaattggcagcagtggttcatgctttgaagatctggaggcactatctgattggcaaccgctgcgaagtatatacggaccataagagtctgaaatacatcttcacccaaccggacctaaatctccgacaacgaagatggttggaactaatcaaagactatgacatgagtattcactaccacccgggtaaagccaatgtggtggcagacgcattaagccggaaaagttactgcactgccctatgcatcgagggcatgtgtgaggaattgtggcaggagtttgagcatctcaacgtgggaattgttgaacacgggtttgtagccgctctggaggcacggcctacgctcgtggatcaagtcagagcagctcaagtaaatgattctgaaatagcagagctgaaaaagaacatgagggtcggaaaagcccgggatttccacgaagatgagcatggcacaatctggttgggagaaagattgtgtgtacctgacgacaaggaactgaaggatctgatactcaccgaggctcatcagacccagtactccattcatccaggcagcactaaaatgtatcaagacctcaaagaaaagttttggtgggtcagcatgaggagagaaatagctgaattcgtcgcactctgcgatgtttgccaacgagtgaaggcagagcaccaaagaccagcaggtttactccaacctcttcaaatcctggaatggaaatgggaggagattgggatggactttataacgggactgccccggacatcgtcgggtcacgactcgatctgggtagtcgtggatcgactcactaaggttgctcacttcataccagtacataccacgtatacgggcaaaaggttggcggagctttacctttcgagaatcatgtgcctacatggagtacccaaaaagattgtatctgaccgagggagtcagttcacctcaaaattctggcagaagctgcaggaagaattggggacccgtttaaatttcagcacggcctatcacccgcaaactgatggtcagaccgagcgagtcaatcaaatcttggaagatatgttgagagcttgcgctctcgattttggtggagcttgggacaaaagcttgccatatgcggaattctcgtacaacaacagctaccaggccagtctacagatggcaccgtttgaagctttatacggccggaagtgccgcacacctctcttctgggatcagacaggcgagcgtcaactgttcgggacagaggtattagcggaagcagaagagaaagtcagaatcatcagggaaaggttgaggattgcccagtctcgacagaagagctacgcggataaccgccgaagggagctcacttttgaggcaggagattacgtgtatcttcgtgtcactccgctccggggagtacaccgttttcagacgaaaggcaagttggcaccacgcttcgtgggaccatacaaaatcttggaacgaaggggagaagttgcttatcagttagaacttccatccaatatgatcggtatccatgacgtgttccacgtgtcccaattaaagaagtgcttaagggtacctgaagaacaggctgattcgaaacacattgatatccaggaggacctaacatacgtggagaagccgattcgtatacttgataccagcgaaagaagaaccagaaacaaggtcaacaggttttgccgagttcagtggagtcatcattcagaagaggaagcaacctgggaaagggaggatgagttgaaagccgcccatccgcacctcttcaccagctcctccgaatctcggggccgagattccgtttaa

SEQ ID NO: 13867 - DNA, 1626 bp, Oryza sativa
  Clone ID: TFbOSC414616j.C1.o3.fg
atggctcaactaggccggctttgtgccgtgctgtgccccagccgcgccgcccctggccgcccgatcggcttgggccgattcggaccgtcggttcccgtggaccggtggtggaccgcctcggtggtcccgggatttaatacgcaaaatagtctggaaatttgggttaaatttctgggcgtgacaaagtggtatcagagccaactcgactgtaggttgagccaaatggtcaaaccttgtcaaacatggaggagaaaccgccagcttcatgcctgtccagaagtcaagtcgagtctcaagcttcgtgcagcaaagagtgagaagcaattggtcagcatgagggacaatttcaacggatcaggatcccgtcagtttcatggatcaactcagctcaattctataagcttcccacgtcaacctctcaaagatcagccacaatcccaagtcatggctaatcagactcagacagtggaagagttgttacggcagatgcgacatcgatccctgaagataactgcagccaagttaccgtcagaccaaagggaagtaagtgctacctgttatgattgtggtgagcaaggtcattatataaggaactgtccatggaaggtgttcaccaggtcacctgaaaaggacgagaagcagtgcccaggaagtaaccaagctccaagtcagtctactaacaagaaagatggtactctgcagcacagctctggagcgaataggaagggaactgatcatgtgcctaaggattatcagcggaactcggtcctagttatgaccaagaaagaacaagggacaaccgtgcaaccctttcatcaaccaatggcagtcgacgacatcagtcacaatccttctgctcttcctccaattctagccccggtggacgccaaccatggaagaagcaacgtcgctagggatgttcataaatcgctgcttgttccagtttcagctgccaaagtgcataatcagaagcctgcaccccaggaccaagcaagtcgattctgtcgcaactgtcgtaagccaggacattgtttcagtgattgtcctcttccaagagcagcaaaggcagttcgtcgtgattcacaagttatcagcactgcccacgaccccaatcgacacctgaatgtgcaacctccgcctcaacggatcatcgtcaagggcaccgtaagaggccgcattgttccaccggccatcgtttcaagcctacagcaccagcgccagcagggtaagcaatgcaaggagaacaacagctcgctacagttacaaagaggcagtatgctccttcatcagcacccgcagcaagtgtcgtcagcaccaggtcgctcgactgttgtcagttctagcaatgcacctcgtattgctccaatccggaggcccatcgacaaaccaccgctcggcaatcccgcgagtaagaagtcccacctgctacggcagtcaagagagttgttactccaccatcgaagaccaacaagcagagcaacgttcccggtgagacttcagctagtaggaactaaagggacaagtcagtcaggtttgaatgatggaagcaacaacagttccagtcaagacctctacttttcaggtctaaaaggcagttctaatcagcagcagtctacaatggtttga

SEQ ID NO: 13868 - DNA, 5409 bp, Oryza sativa
  Clone ID: TFbOSC416746j.C1.o17.fg
atggccggtcacccacccaaccaccgcggagaaggcatgatcgacttcgtggcagagctggcacgcatgacactggtagtgggctaccccgacgcgccggagtacacgaccatcccaccgctcagtggcgagcttcctcaccgtgtccgcttggaggtccatggttacgtggggacttgcctcgctaacatggcggtcgaggcgtcaggaggcacagcagatcacgcttgtcaggaggcagcctacctgatgatggccagactacgggagcgccacaactacattttccacgacacggcgtaccgctaccaccccagtcgagcccacggtgatggcgtcagctccttccgtccaacagctggcgagaacgacaccacctttggccacatgtgtgcggtgatgaggggtttggacaggatgcactcggatctgcacaaggcgaccaaggccttgaatgatgggaagctcatgaggatcgtcgctctaaaggacgaggtagcgcgtctgaagaaggagaacgctcagctgaagggtctcccagcgccaggaggagtccggatccgcactacgccccgtaagaggacgactgcaccggtgcgcatccagcttgcgcccaggaacccacctccaccagcagctcccgcagcagctccagctccgcccgcagttcctgcagctccagctccagctcccgcgttcactctctccttcgctccagcatcagccgccggaggttcagccagtggtaccggaggatggctatctgctactcccagtggcagcggcgagactgatccgtcagactccaggagtcgctcagaggggccaggttgcttgtttgggatggtctacaccaggactggcaaccgcgccacaggcgagggcagcaacggtgaagaacgcgctgatggtgtgcaccccaacggtgattctggcaatgggccgccaccacttcaggagaatccgacgcttgcccaagttatggcacatcagactcagatgatggccgccatgatgcagcagatgcagcaccagcaccagcagatgcatcagaggatgatgcagcacgccgaacagcagcaccagcagtttggtccccctcccccgcagtccaagttgcctgagttcctgcgagtcaggccacccaccttctccagcaccaccaaccccatggaggcaaacgactggctccatgcaatagagaagaagctgaatctcctgcagtgcaatgatcaggagaaggttgctttcgccacacaccagcttcagggtcctgcgtcagcttggtgggacaaccacatggccacccgcccaccgggtactgaagtcacatgggcagagttctgccgtagcttcaggaaggcacaggtgccagacggggttgtagcgcaaaagaagagggaattccgagcgctccatcagggcaacaggacagtgacagagtacctccacgagttcaatcgcctcgcgcgatatgcaccagaggatgtccgcactgacgccgagaaacaggaaaagtttatggcaggcctggatgacgagctgaccaaccaactgatatccggggactacgctgactttgaaaggctggttgacaaggcaatccgtcaggaggatcagcgcaacaaaatggaccggaaaagaaaggcggcacagttccggtccaaccaaggtagtcagcaccgaccgcgcttcactcccggacagcagggtggacctaccaccatgatcgtccgtcagcaccgcccgttcaactccagcaacttccaccagggcactagtggcagtcagaaccaccatggaagccagcccaaccgcggtgcagctccacgcccaccaatggcaccggcacagtcaggccagcccgcgcaagccaagaaggagacgggagcaaaaccagggtcttgcttcaactgtggcgagcttggccacttcgctgacaaatgcccgaagcccaggcgtgccggaccaaggtttatccaggctcgtgtcaaccacgcgtctgcggaggaggcacaagcagcaccagaggtcgtactgggtacgtttcctgttaactcaatccctgcaacagtactttttgattctggtgcaacgcattcgttcatctcaaagaaatttgtcgggatgcatgggttaataagagaggaacttagcacaccgatgcgggttcataccccagggaatagctccacttcggttcaattcagcccttctataacaatagaaatccaaagatctccatttctagccaacctcatccttctcgactccaaaggcctagatgtcatccttgggatggattggctgaccaagtttaagggagtcatcgattgtgcgaatcgcacagtcaccttaaccaacgagaagggagaaaccgtggtgtacaaatccctagtctcgccaaggaaaggggtctcgttgaatcagattgagacggaaatcccagtggacaccgtagagaagaactcgagaaaattggaagatatacccatagtctgcgagtatccggaagtgttccccgaagacctcaccaccatgccacccaagagagagattgaattccggattgacttggcaccgggaactgccccaatctataagagaccgtacaggatggcggccaacgaattagcagaggtcaagaagcaagttgatgaacagctgcagaaagggtacatacgaccgagcacttcgccttggggcgctccggtcatttttgtggagaaaaaggataagacgaagaggatgtgcgtcgattaccgcgcacttaacgaggtcacaatcaagaataaatatcctttgccgcgaatcgacgatttatttgatcaactgaaaggagctaaagtgttctctaagatagacctgcgatcaggctaccaccagttgagaatccgggaagaggatattccgaagacggccttcaccactcggtacgggctatatgagtgcacggttatgtccttcggacttactaacgcacccgcattcttcatgaatctgatgaacaaagtgttcatggaatttttggacaagtttgttgtggtattcatcgacgacattcttatctattcaaagtccgaggaagaacatgaacaacatctccgtctggtactcgagaagttgaaggagcaccagctatacgccaagttcagcaagtgtgacttctggttgacagaagtcaaatttctgggccatgtcattacagctcagggtgtagcagttgatccatcgaacgtggagtcagttacaaaatggaccccaccaaagaccgtgtcgcagattcggagttttctaggactggcaggttattaccgccgattcatcgaaaacttctccagaatcgcccgacccatgactcagttgcttaagaaggatgagaagtttaaatggacagctgagtgcgataagagctttgaggagctcaaaaagaaattagtatccgcaccagtattgattctgcccgacccgacgaaagacttccaagtctattgtgatgcatcccgtcacggacttggatgtgtcctaatgcaagagggcagagtggttgcgtatgcctcgcggcagttgcgtccacacgaaggaaattatccaactcatgacttggaattggcagcagtggttcatgctttgaagatctggaggcattatctgattggaaaccgctgcgaagtatatacggaccataaaagtctgaaatacatcttcacccaaccagacctaaaccttcgacaacgaagatggttggaactaatcaaagactatgacatgagtattcactaccacccgggtaaagccaatgtggtggcagacgctttaagccggaaaagttactgcactgctctatgcatcgagggcatgtgtgaggaattgcggcaggagttagaacatctcaacgttggaattgttgaacacgggttcgtagccgctctggaggcacggcctacgctcgtggatcaagttagagccgctcaagtaaatgatccggaaatagcagaactgaaaaagaacatgagagtcggaaaggctcgagatttccacgaggatgagcacggcacaatctggatgggagaaagattgtgtgtacccgacgacaaggagttgaaggatctgatactcacggaagctcatcagacccagtactccattcacccaggcagtactaaaatgtaccaagaccttaaagaaaaattttggtgggtcagcatgaggagagaaatagctgagttcgtcgcactctgcgatgtttgccagcgagtgaaagcagagcaccaaagaccagcaggtttactccaacctcttcaaatcccggaatggaaatgggaggagattggaatggactttataacgggactgccccggacatcatcgggacatgattcaatttgggtagtcgtggatcgactcaccaaggtggctcactttataccagtacataccacctatacgggaaagagattggcagaattgtaccttgcaaggatcatgtgtttgcatggggtacccaagaagatagtatccgaccgaggtagtcagttcacctcaaagttctggcagaagctgcaggaagaattggggacccggttaaatttcagcacggcctatcacccgcaaactgatggtcagaccgagcgtgtcaatcaaattttggaggatatgttgagagcttgcgctcttgattttggtggagcttgggacaaaagcttaccatatgcggaattctcgtacaacaacagctaccaggccagtctacagatggcaccgtttgaagctttatacggccgaaagtgccgcacacctctcttctgggatcagacaggcgaacgtcaactgttcggaacagaagtattagcggaagcagaagagaaagtcagaatcatcagggaaaggttgaggattgctcagtctcgacagaagagctacgcggataaccgccgaagggagctcacttttgaggcaggagattacgtgtatcttcgtgtcaccccgctccggggagtacaccgcttccagaccaagggcaagttggcaccacgcttcgtgggaccatacaaaattttggaacgaaggggagaagttgcctatcagctagaacttccgtccaacatgatcggcatccatgacgtgttccacgtatcccaattaaagaagtgtttaagggtacctgaagaacaggctgattcggaacacattgatatccaggaggacctaacatatgtggagaagccggttcgtatacttgataccagcgaaaggagaaccagaaataaggtcaccaggttttgccgagttcagtggagtcatcattcagaagaggaagcaacctgggaaagggaagatgagttgaaagccgcccatccgcacctcttcaccagctcctccgaatctcggggccgagattccgtttaa

SEQ ID NO: 13869 - DNA, 4995 bp, Oryza sativa
  Clone ID: TFbOSC418148j.C1.o15.fg
atggctacgtggggacttgcctcgctaacatggcgggttgaggcatctggaggcacagcagatcacgcctgtcaggaggcagcctacttgatgatggccagactacgggagcgccacaactacatcttccacgacacggcgtaccgctaccaccccagtcgagccaacggtgatggcgtcagctccttccgtccgacagctggcgagaacgacaccacctttggtcacatgtgtgctgtgatgagaggattggataggatgcactcggacctgcacaaggcgaccaaggccttgaatgatgggaagctcatgaggatcgtcgctctgaaggacgagatagcgcgcctgaagaaggagaacgctcagctaaagggtctcccagcaccaggaggagtccggatccgcactacgccccgtaagaggacgactgcacccgtgcgcatccagcttgcgcccaggaacccacctccaccagcagctcccgcagctccggcagttcccgcagttcctccagctccagctccagctccagctcccgcgttcactctctccttcgctccagcatcagccgccagaggtccagccagtggtaccggaggttggttgtccgctactcccagtggcagcgacgagactgatctgtcaggctccaggagccgctcagagggaccaggttgcttgtttgggatggtctacaccaggactggcaaccgcacgacaggcgagggcagcaacggcgaagaacgcgctgatggcgtgcaccccaacagcgattccggcaatggtccgccaccacttcccgagaatccgacgcttgcccaagttatggcacatcagactcagatgatggcagccatgatgcagcagatgcagcagcagcaccagcagatgcaccagaggatgatgcagcacgccgaacagcagcaccagcagtttggtccccctccccctcagtccaagttgccggagtttctacgtgtcaggccacccaccttctccagcaccaccaaccctatggaggcaaatgactggctccatgcgatagagaagaagctgaatctcctacagtgcaatgatcaggagaaggtcgctttcgccacacaccagcttcagggtcctgcgtcagcttggtgggacaaccacatggccacccgcccaccgggtactgaagtcacatgggcagagttctgccgtagcttcaggaaggcacaggtgccagacggggtcgtggcacaaaagaagagggaattccgggcgctccatcagggcaacaggactgtgacagagtacctccatgagttcaatcgcctcgcgcgatatgcaccagaggatgtccgcaccgacgccgagaagcaggagaagttcatggcgggtctggatgacgagctgaccaaccaactgatatctggggactacgccgactttgagaggctggttgacaaggcaatccgccaggaggatcaacgcaacaagatggataggaagaggaaggccgctcagttcagggcacatcagggaagtcaccagaggccgcgcttcactcccgggcagcagggtggacctaccaccatgattgttcgtcaacaccgcccattcaaccccagcaacttccaccagggctccagtggcagccagaatcaccatggaagtcagcccaaccgcggtacagctccacgcccaccgatggcaccggcacagtcaggccagcccgcacaagccaagaaggagacgggagcaaaaccagggtcctgcttcaactgtggcgagcttggccacttcgctgacaaatgcccgaagcccaggcgtgccggaccaaggtttatccaggctcgtgtcaaccacgcatctgcggaggaggcacaagcagcaccagaggtcgtactgggtacgtttcctgttaactcaatccctgcaacagtactttttgattctggtgcaacgcattctttcatctcgaagaaatttgtcgggatgcatgggttaataagagaggaacttagcacaccgatgcgggttcataccccagggaatagctccacttcggttcaattcagcccttctataacaatagaaattcaaaggtcaccatttctagccaacctcatccttctcgaatccaaagacctagatgtcattcttgggatggattggctgaccaagtttaagggggtcatcgattgtgcgaatcgcacagtcaccttgaccaacgagaagggagaaacagtggtgtacaaatctctagtctcacccaagaaaggagcctcgttgaatcagattgagacgaaaatcccagtggacaccgaagagaagaacttgagaaaattggaggacatacccatagtctgcgagtatccagaggtgttccccgaagacctcaccaccatgccacccaagagggagattgaattccggattgatttggcaccaggaaccgctccaatctataagagaccgtacagaatggcggccaacgaattagcggaggtcaagaagcaagttgatgaacagctgcagaaagggtacatacgaccaagcacttcaccttggggcgctccggtcatttttgtggagaaaaaggataagacaaagaggatgtgcgtcgattatcgcgcacttaacgaggtcacaatcaagaataaatatcctttgccgcgaatcgacgatttatttgatcaactgaaaggagctaaagtgttctctaagatagacctgcgatcaggctaccaccagttgagaatccgggaagaggatattccgaagacggccttcaccactcggtacgggctatatgagtgcacggttatgtccttcggacttactaacgcacccgcattcttcatgaatctgatgaacaaagtgttcatggaatttctggacaagtttgttgtggtattcatcgacgacatacttatttattcaaagtccgaggaagaacatgaacaacatctccgtctagtactcgagaagttgaaggagcaccagctatacgccaagttcagcaagtgtgacttctggttgacggaagttaaatttctgggccatgtcattacagctcagacgaaagacttccaagtctattgcgatgcatcccgtcacggacttggatgtgtcctaatgcaagagggcagagtggttgcgtatgcctcgcggcagttgcgtccacacgaaggaaattatccaactcatgacttggaattggcagcagtggtccatgctttgaagatctggaggcactatctggtcggcaaccgctgcgaagtatatacggaccataaaagtctgaaatacatcttcacccaaccagacctaaaccttcgacaacgaagatggttggaactaatcaaagactatgacatgagtattcactaccacccgggtaaagccaatgtggtggcagacgctttaagccggaaaagttactgcactgctctatgcatcgagggcatgtgtgaggaattgcgacaggagcttgaacatctcaacatgggaattgttgaacacgggttcgtagccgctctggaggcacggcctacgctcgtggatcaagttagagccgctcaagtaaatgatccggaaatagcagaactgaaaaagaacatgagagtcggaaaggctcgggatttccttgaggatgagcatggcacaatctggatgggagaaagattgtgtgtaccggacgacaaggaattgaaggatctgatactcaccgaagctcatcagacccagtactccattcatccaggcagcactaaaatgtatcaagacctcaaagagaagttttggtgggtcagcatgaggagagaaatagctgaattcgtcgcactctgcgatgtttgccagcgagtgaaagcagagcaccaaagaccagcaggtttactccaacctctccaaatcccggaatggaaatgggaggagattggaatggactttataacaggactgccccggacatcatcgggacatgattcaatctgggtagtcgtggatcgactcaccaaggtggctcactttataccagtacataccacctatacgggaaagagattggcagaattgtacctcgcaaggatcatgtgtttgcatggggtacccaagaagatagcatccgaccgaggtagtcagttcacctcaaagttctggcagaagctgcaggaagaattggggacccgtttaaacttcagcacggcctatcacccgcaaactgatggtcagaccgagcgtgtcaatcaaatcttggaggatatgttgagagcttgcgctcttgattttggtggagcctgggacaaaagcttaccatatgcggaattctcgtacaacaacagctaccaggccagtctacagatggcaccgtttgaagctctatacggccggaagtgccgcacacctcttttctgggatcagacaggcgaacgtcaactgttcggaacagaagtattagcggaagcggaagagaaagtcagaatcatcagggaaaggttgaggattgctcagtctcgacagaagagctacgcggataaccgtcgaagggagctcacttttgaggcaggagattacgtgtatcttcgtgtcactccgctccggggagtacaccgtttccagacgaaaggcaagttggcaccacgcttcgtgggaccatacaaaattttggaacgaaggggagaagttgcttatcagctagaacttccatccaacatgatcggcatccatgacgtgttccacgtgtcccaactaaagaagtgcttaagggtacctgaagaacaggctgattcggagcacattgatatccaggaggacctaacatacgtggagaagccggttcgcatacttgataccagtgaaaggagaaccagaaacaaggtcacccggttttgccgagttcagtggagtcatcattcggaagaggaagcaacctgggaaagggaagatgagttgaaagccgcccatccgcacctcttcaccagctcctccgaatctcggggccgagattccgtttaa

SEQ ID NO: 13870 - DNA, 5334 bp, Oryza sativa
  Clone ID: TFbOSC420097j.C1.o7.fg
atggccggtcacccacccaaccaccgcggagaaggcatgatcgactttgtggcagagctggcacgcatgacactggtagtgggctaccccaacgcgccggagtacacgaccattccgccgctcagtggcgagcttcctcaccgtgtccgcttggaggtccatggctacgtggggacttgcctcgctaacatggcggtcgaggcatctggaggcacagcagatcacgcctgtcaggaggcagcctacttgatgatggccagaatacgggagcgccacgactacatcttccacgacacggcgtaccgctaccacccccgtcgagcccatggtgatggcgtcagctccttccgtccgacagctggcgagaacgacaccacctttggtcacatgtgtgctgtgatgaggggattggaccggatgcactcggacctgcacaaggcgaccaaggccttgaacgatgggaagctcatgaggatcgtcgctctgaaggacgagatagcgcgcctgaagaaggagaacgctcagctaaagggtcttccagcgccaggaggagtccggatccgcaccacgccccgcaagacgacgactgcacctgtgcgcatccagcttgcgcccaggaacccacctccaccagcagctcccgcagcaccttcagttccgcccgcagttcctgcagctccagctccagctcccgcgttcactctctccttcgctccagcatcagccgccagaggttcagccagtggtaccggaggctgcttgtttgggatggtctacaccaggaatggtagccgtgcaacaggcgagggcagcaacggcgaagaacgcgctgatggtgtgcaccccaacagtgattctggcaatggtccgccaccacttcccgagaatccgacccttgcccaagttatggcacatcagactcagatgatggcagccatgatgcagcagatgcagcagcagcaccagcagatgcaccaaaggatgatgcagcacgccgagcagcagcaccagcagtttggtccccctccccctcagtccaagttgccagagtttctacgcgtcaggccacccaccttctccagcaccaccaaccctatggaggcgaacgactggctccatgccatagagaagaagctgaacctcctgcagtgcaatgatcaggagaaggtcgctttcgccacacaccagcttcagggtcctgcgtcagcttggtgggacaaccacatggccacccgcccaccgggtactgaagtcacatgggcagagttctgccgtagcttcaggaaggcacaggtgccagacggggtcgtggcacaaaagaagagggaattccgggcgctccatcagggcaacaggactgtgacagagtacctccatgagttcaatcgcctcgcgcgatatgcaccagaggatgtccgcaccgacgccgagaagcaggagaagttcatggcgggtctggatgacgagctgaccaaccaactgatatctggggactacgccgactttgagaggctggttgacaaggcaatccgtcaggaggaccaacgcaacaagatggacaggaagaggaaggccgctcagttcagggcacatcagggaagtcaccagaggccgcgcttcactcccggacagcagggtggacctaccaccatgatcgtccgtcagcaccgcccgttcaaccctagcaacttccaccagggcactagtggcagtcagaaccaccatggaagtcagcccaaccgcggtgcagctccacgcccatcagtggcaccggcacagtcaggccagcccgcacaagccaagaaggagacgggagcaaaaccagggtcctgcttcaactgtggcgagcttggccacttcgctgacaaatgcccgaagcccaggcgtgccggaccaaggtttatccaggctcgtgtcaaccacgcatctgcggaggaggcacaagcagcaccagaggtcgtactgggtacgtttcctgttaactcaatccctgcaacagtactttttgattctggtgcaacgcattctttcatctcaaagaaatttgtcgggatgcatgggttaataagagaggaacttagcacaccgatgcgggttcataccccagggaatagctccacttcggttcaattcagcccttctataacaatagaaattcaaagatcaccatttctagccaacctcattcttctcgaatccaaagacctagatgtcattcttgggatggattggctgaccaagtttaagggagtcatcgattgtgcgagtcgcacagtcaccttgaccaacgagaagggagaaacagtggtgtacaaatctctagtctcgccaaagaaaggggtctcgttgaatcagattgagacggaaatcccagtggacaccgtagagaagaacttgagaaaattggaagatatacccatagtctgcgagtatccagaagtgttccccgaagacctcactaccatgccacccaagagagagattgaattccggattgacttggcaccgggaactgctccaatctataagagaccgtacagaatggcggccaacgaattagccgaggtcaagaagcaggttgatgagcagctgcagaaagggtacattcgaccaagcacttcaccttggggcgctccggtcatttttgtggagaaaaaggataagacgaagaggatgtgcgttgattatcgcgcactcaacgaggtcacaatcaagaataaatatcctttgccgcgaatcgacgatttatttgatcaactgaaaggagctaaagtattttctaagatagacctgcgatcaggctaccaccagctgagaatccgggaagaggatattccgaagacggccttcaccactcggtacgggctatatgagtgcacggttatgtctttcggacttaccaacgcacccgcattcttcatgaatctgatgaacaaagtgttcatggaatttctggacaagtttgttgtggtattcatcgacgacatacttatctactcaaaatccaaggaagaacatgagcaacatctccgtctggtactcgaaaagttgaaggagcaccagctatacgccaagttcagcaagtgtgacttctggttgacggaagtaaaatttctgggtcatgtcattacagctcagggtgtggcagtcgacccatcgaacgtggagtcagttaccaaatggaccccacctaagaccgtgtcgcagattcggagttttctaggactggcaggttattaccgccgattcatcgaaaatttctccaggatcgcccgacccatgactcagttgcttaagaaagatgagaagtttaaatggacagctgagtgcgataagagtttcgaggagctcaagaagaaattagtatccgcaccagttttgattctgcccgacccgacgaaagacttccaagtctattgtgatgcatcccgtcacggacttggatgtgtcctaatgcaagagggcagagtggttgcgtatgcctcgcggcagttgcgtccacacgaaggaaattatccaactcatgacttggaattggcagcagtggttcatgctttgaagatctggaggcactatctgattggcaaccgctgcgaagtatatacggaccataagagtctgaaatacatcttcacccaaccggatctaaaccttcggcaacgaagatggttggaactaatcaaagactacgacatgagtattcactaccacccgggtaaagccaatgtggtggcagacgctttaagccggaaaagttactgcactgccctatgcatcgagggcatgtgtgaggaattgcggcaggagtttgaacatctcaacatgggaattgttgaacacgggtttgtagccgctctggaggcacggcccactctcgtggatcaagtcagagcagctcaagtaaatgattctgagatagcagagctgaaaaagaatatgagagtcggaaaagcccgggatttccacgaagatgagcatggcacaatctggatgggagaaagattgtgtgtacctgacgacaaggaattgaaggatctgatactcaccgaggctcatcagacccagtactccattcatccaggcagcactaaaatgtatcaagacctcaaagaaaagttttggtgggtcagcatgaggagagaaatagctgaattcgtcgcactctgcgatgtttgccaacgagtgaaggcagagcaccaaagaccagcaggtttactccaacctcttcaaatcccggaatggaaatgggaggagattggaatggactttataacaggactgccccggacatcatcgggtcacgattcaatctgggtagtcgtggatcgactcactaaggttgctcacttcataccagtgcataccacatatacgggcaaaaggttggcggagctttacctttcgagaatcatgtgcctacatggagtacccaaaaagattgtatctgaccgagggagtcagttcacctcaaaattctggcagaagctgcaggaagaaatggggacccgtttaaatttcagcacggcctatcacccgcaaactgatggtcagaccgagcgagtcaatcaaatcttggaggatatgttgagagcttgcgctcttgattttggtggagcttgggacaaaagcttgccatatgcggaattctcgtacaacaacagctaccaggccagtctacagatggcaccgtttgaagctttatacggccggaagtgccgcacgccgctcttctgggatcagacaggcgaacgtcaactgttcggaacaaaagtattagcggaagcagaagagaaagtcagaatcatcagggaaaggttgaggattgctcagtctcgacagaagagctacgcggataaccgtcgaagggagctcacttttgaggcaggagattacgtgtatcttcgtgtcactccgctccggggagttcaccgttttcagacgaaaggcaagttggcaccacgcttcgtgggaccatacaaaattttggaacgaaggggagaagttgcttatcagttagaacttccatccaatatgatcggcatccatgacgtgttccacgtgtcccaattaaagaagtgtttaagggtacctgaagaacaggctgattcggaacacattgatatccaggaggacctaacatatgtggagaagccggttcgcatacttgataccagcgaaaggaggaccagaaataaggtcactaggttttgccgagttcagtggagtcatcattcagaagaggaagcaacctgggaaagggaagatgagttgaaagccgcccatccgcacctcttcaccagctcctccgaatctcggggccgagattccgtttaa

SEQ ID NO: 13871 - DNA, 4541 bp, Oryza sativa
  Clone ID: TFbOSC4211j.C1.o3.np
cgagaaatggataaaggaggaccagcggaggagatgggccgaaggccaggccaggtgggcctagcccacgttcggattccggcaatggtccgccaccacttcccgagaatccgacccttgcccaagttatggcacatcagactcagatgatggcagccatgatacagcagatgcagcagcagcaccagcagatgcaccagaggatgatgcagcacgtcgaacagcagcaccagcagtttggtccccctccccctcagtccaagttgccagagtttctacgcgtcaggccacccaccttctccagcaccaccaaccccatggaggcgaatgactggctccatgccatagagaagaagctgaatctcctgcagtgcaatgatcaggagaaagtcgctttcgccacacaccagcttcagggtcccgcgtcagcttggtgggacaatcacatggccacccgcccaccaggtactgaagtcacatgggcagagttctgccgtagcttaaggaaggcgcaggtgccagacggggtcgtggcacaaaagaagagggaattccgggcactccatcagggcaacaggactgtgacacagtacctccacgagttcaatcgcctcgcgcgatatgcaccagaggatgtccgcaccgacgccgagaagcaggagaagttcatggcgggtctggatgatgagctgaccaaccaactgatatccggggactacgctgactttgagaggctggttgacaaggcaatccgccaggaggatcaacgcaacaagatcgacaggaagaggaaggccgctcagttcagggcacctcagggaagtcaccagaggccgcgcttcactcccgggcagcagggtggacctaccaccatgatcgtccgtcagcaccgcccgttcaaccctagcaactttccccagggcactagtggcagtcagaaccaccatggaggtcagcccaaccgcggtgcagctccacgcccatcagtggcaccggcacagtcaggccagcccgcgcaagccaagaaggagactggagcaaaaccagggtcctgcttcaactgtggcgagcttggtcacttcgctgacaaatgcccaaagcccaggcgtgccgggccaaggtttatccaggctcgtgtcaaccacgcgtctgcagaggaggcacaaacagcaccggaggtcgtactgggtacgtttcctgttaactcaatccctgcaacagtacttttcgattctggtgcaacgcattctttcatttcaaagaaatttgtggggaggtatgggttaaggaaagaagagcttagcacaccaatgagggttcataccccgggaaatagttcaacctcagtcagttttagcccctcagtgctaatagaaatccaaagatcaccatttctagccaacctcattcttcttgaatccaaagacctagatgtcattcttgggatggattggctgaccaagtttaagggagtcatcgattgtgcgaatcgcacagtcaccttgaccaacgagaagggagaaacagtggtgtacaaatctctagtctcaccaaagaaaggggtctcgttgaatcagattgagacggaaatcccagtggataccgtagagaagaacttgagaaaattggaagatatacccatagtctgcgagtatccagaagtgttccccgaagacctcactaccatgccacccaagagagagattgaattccggattgacttggcaccgggaaccgctccaatctataagagaccatacagaatggcggccaacgaattagcagaggtcaagaagcaagttgatgagcagctgcagaaagggtacatacgaccaagcacttcaccttggggcgctccggtcatttttgtggagaaaaaggataagacgaagaggatgtgcgttgattatcgcgcactcaacgaggtcacaatcaagaataaatatcctttgccgcgaatcgacgatttatttgatcaactgaaaggagctaaagtattttctaagatagacctgcgatcaggctaccaccagctgagaatccgggaagaggatattccgaagacggccttcaccactcggtacgggctatatgagtgcacggttatgtctttcggacttaccaacgcacccgcattcttcatgaatctgatgaacaaagtgttcatggaatttctggacaagtttgttgtggtattcatcgacgacatacttatctactcaaaatccgaggaagaacatgagcaacatctccgtctggtactcgaaaagttgaaggagcaccagctatacgccaagttcagcaagtgtgacttctggttgacagaagtcaaatttctgggtcatgtcattacagctcagggtgtggcagtcgacccatcgaacgtggagtcagttaccaaatggaccccaccgaagaccgtgtcgcagattcgaagttttcttggacttgcaggttattaccgtcgattcatcgaaaatttctccagaatcgcccgacccatgactcagttgcttaagaaggatgagaagtttaaatggacagccgagtgcgataagagcttcgaggagctcaagaagaaattagtatccgcaccagttttgattctgcccgacccgatgaaagacttccaagtctattgtgatgcatcccgtcacggacttggatgtgtcctaatgcaagaggacagagtggttgcgtatgcctcgcggcagttgcgtccacacgaagggaattatccaactcatgacttggaattggcagcagtggttcatgctttgaagatctggaggcactatctgattggcaaccgctgcgaagtatatacggaccataagagtctgaaatacatcttcacccaaccggacctaaatctccgacaacgaagatggttggaactaatcaaagactatgacatgagtattcactaccacccgggtaaagccaatgtggtggcagacgctttaagccggaaaagttactgcactgccctatgcatcgagggcatgtgtgaggaattgcggcaggagtttgagcatctcaacatgggaattgttgaacacgggtttgtagccgctctggaggcacggcccactctcgtggatcaagtcagagcagctcaagtaaatgattctgagatagcagagctgaaaaagaacatgagagtcggaaaagcccgggatttccacgaagatgagcatggcacaatctggatgggagaaagattgtgtgtacctgacgacaaggaactgaaggatctgatactcaccgaggctcatcagacccagtactccattcacccaggcagcactaaaatgtatcaagacctcaaagaaaagttttggtgggtcagcatgaggagagaaatagctgaattcgtcgcactctgcgatgtttgccaacgagtgaaggcagagcaccaaagaccagcaggtttactccaacctcttcaaatcccggaatggaaatgggaggagattggaatggactttataacaggactgccccggacatcatcgggtcacgatttgatctgggtagtcgtggatcgactcactaaggttgctcacttcataccagtacataccacatatacgggcaaaaggttggcggagctttacctttcgagaatcatgtgcctacatggagtacccaaaaagattgtatctgaccgagggagtcagttcacctcaaaattctggcagaagctacaggaagaactggggacccgtttaaatttcagcacggcctatcacccgcaaactgatggtcagaccgagcgagtcaatcaaatcttggaagatatgttgagagcttgtgctcttgattttggtggagcttgggacaaaagcttgccatatgcggaattctcgtacaacaacagctaccaggccagtctacagatggcaccgtttgaagctttatacggccggaagtgccgcacacctctcttctgggatcagacaggcgaacgtcaactgttcggaacagaagtattagcggaagcagaagagaaagtcagaatcatcagggaaagattgaggattgctcagtctcgacagaagagctacgcggataaccgtcgaagggagctcacttttgaggcaggagattacgtgtatcttcgtgtcactccgctccggggagtacaccggtttcagacgaaaggcaagttggcaccacgcttcgtgggaccatacaaaatcttggaacgaaggggagaagttgcttatcagttagaacttccatccaatatgatcggcatccatgacgtgttccatgtgtcccaattaaagaagtgcttaagggtacctgaagaacaggctgattcgaagcacattgatatccaggaggacctaacatatgtggagaagccggttcgtatacttgataccagcgaaagaagaactagaaataaggtcaccaggttttgccgagttcagtggagtcatcattcagaagaggaagcaacctgggaaagggaagatgagttgaaagccgcccatccgcacctcttcaccagctcctccgaatctcggggc

SEQ ID NO: 13872 - DNA, 3900 bp, Oryza sativa
  Clone ID: TFbOSC5112j.C1.o1.np
atggccgagcacccacccaaccaccgcggagaaggcatgggtgatttcgtggcagagttggcacgcatgacactggtggtgggctaccccaacgcgccggagtacacgactgttccaccgctcagtggcgagcttcctcaccgtgtccgcttggaggtccatggctacatggggacttgcctcgctaaaatggtggttgaggcgtctggaggcacagcagatcacgcatgtcaggaggcagcatatctgatgatggccagactacgggagcgccacaactacatcttccacgacacggcgtaccggttccaccctcgtcgagccagcggcagtgatgtcagttccttccgtccgacagccggcgagaacgacaccacctttggtcacatgtgcgctgtgatgagggggatggacaggatgcactcggacctgcacaaggcgtccaaggccttgaatgatgggaagcttgtgaggatcattgctctgaaggacgagatagcgcgtctgaagagggagaatgctcaattgaagggtcttcccgcgccaggaggagttcggatccgcactacgccccgcaagtcgacaacggcacccgtgcgcgtccagcttgcgcctaggaacccacctccgtcagcagctcccgcagctccagcagttcccgcagcacctccagttccgcccgcagctccagcagttcctgcagctccagcgccagctccagctcctgttcccatgtcagctcctgcatctgctctctccttcgctcctgcatcagccgtcaggggccccgccagtggaaatggaggttgcttcctccagatggtctacaccaggaatggcacccgcacgacaagcgagggcagcaacggcgaagaacgcgctgatggtgtgcaccccaacagtgattccggcaatggtccgccaccatttcccgagaatctgacgctggcccaagtaatggcacatcagactcagatgatggcagccatgatgcagcagatgcagcagcagcaccagcagatgcaccagaggatgctgcagcacgccgaacagcagcaccagcagtttggtccccctcctcctcagtccaagctgcccgagtttctacgcgtcaggccacccaccttctccagcaccaccaaccccatggaggcgaatgactggctccatgccatagagaagaagctgaatctcctgcagtgcaatgatcaggagaaggtcgctttcgccacacaccagcttcaaggtcctgcgtcagcttggtgggacaatcacgtggccacccgcccgccaggcactgaagtcacttgggcggagttctgtcgtagcttcaggaaggcgcaggtgccagacggggtcgtggcacaaaagaagaggggattccgggcactccatcagggcaacaggacagtgacagagtacctccatgagttcaatcgcctcgcgcgatatgcaccggaggatgtctgcaccgacgccgagaagcaggagaaattcctagcaggcctggatgatgagctaaccaaccagctgatatctggagactatgccgactttgaaaggttggttgacaaggcaatccgtcaggaggatcagcgcaacaaaatggacaggaagagaaaggcggcacagttccggtccaaccaaggaaaccatcagcgaccgcgcttcactctcggacagcagggtggacctaccaccatgatcgtccgccagcaccgcacgttcaagtctagcaacttccaccagggcgccagtggcagtcagaaccaccatggaggtcagcctaaccacggtgcagctccacacccaccagtggcaccagcacagtcaggcccgtccgcgcaagccaaggagactggagcaaagccagggtcctgcttcaactgtggtgagcttggccacttcgccgacaaatgcccgaagcctaggcgtgccgggtcaaagtttgtccaggctcgtgtcaaccacgcgtctgcaaaggaggcgcaagcagcaccagaggtcgtactgggtacgtttcctgttaactcaatccctgcaacagtactttttgattctggtgcaacgcattcgttcatttcaaagaagtttgtcaggatgcatgggttaataagagaggaacttagcacaccaatgcgggttcataccccagggaatagctccacttcggtacaattcagcccttctataacaatagaaattcaaagatcaccatttctagccaacatcattcttcttgattccaaagacctagatgtcattcttgggatggattggctgaccaagtttaagggagtcattgattgtgcgaatcgcacagtcaccttgactaacgagaagggagaaacaatagtgtataaatcactagtctcaccaaagcaaggggtctccttgaatcagattgaggcggaaaccccagtggtcaccgaggggatgaattcgaggaaattggaagaaattcccatagtctgcgagtacccagaagtgtttcccaaagacctcaccaccatgccacccaagagagagattgaattccggattgatttggccccgggaaccgccccaatctacaagagaccgtataggatggcagccaatgaactagccgaggtcaagaaacaggttgatgagcagctgcagaaagggtacatacgaccaagtacctcaccttggggtgctccggtcatttttgtggagaaaaaggataagacgaagaggatgtgcgtcgattatcgcgcactcaacgaggtcacaatcaagaataaataccctttaccacgaatcgatgacttgtttgaccaactgaagggagctaaggtgttctctaagatagacctgcgatcaggctatcaccagttaagaattcgggaagaagatattccaaagacggctttcaccacccggtacgggctgcatgagtgcacggttatgtctttcggacttaccaacgcacccgcattcttcatgaatctgatgaacaaagtgttcatggaatttctcgacaagtttgtggtggttttcatcgacgacatacttatctattcaaagtctgaagaagaacatgagcagcatctccgtctggtactcgagaagttgaaggagcaccaattatacgccaagttcagcaagtgtgacttctggttgacggaagtcaaatttctgggccatgttattatagctcagggcatggcagttgatccatcgaacgtggagtcagttaccaaatggaccccaccgaagaccgtgtcgcagattcgaagttttcttagactggcgggttattaccgccaattcatcgaaaacttctccaggatcgctcgacccatgactcagttgcttaagaaagatgaaaagtttaaatggacagctgagtgcgataagagctttgaggagctcaaaaagaaattagtatccgccccagttctgattctgcccgaccagatgaaagatttccaggtctattgcgacgcatctcgccacgggcttgggtgtgttctaatgcaggaaggcagagtggtagcgtatgcctcgcgatagtcgcgtccacacgaagggaattatccaacccatgatctggaattggcagcagtggttcatgctttgaagatctggaggcactatctgattggcaaccgctgtgaagtatatacggatcataagagtctgaaatacatcttcacccaaccggatctaaatctccgacaacgaagatggttggaactaatcaaagactatgacatgagcattcactaccacccggggaaagccaatgtggtggcagacgcattaagcaggaaaagttactgcactgctctatgcatcgagggcatgtgtgaggaattgcagcaagagtttaagcggctcaacgtgggaattgttgaacacgggttcatagct

SEQ ID NO: 13873 - DNA, 5478 bp, Oryza sativa
  Clone ID: TFbOSC5884j.C1.o1.fg
atggaaagacctaagagccctctgaatccttttcattgcatatgttctttgcaattggattttgttccgggaaaatggggatctgttcttatggttcaagggaaaaatcttggtcgctcgtttaaaatggccggtcacccacccaaccaccgcggagaaggcatgattgatttcgtggcagagttggcacgcatgaccctggtggtgggctaccccgacgcgccggagtacacgacgattccgccgctcagtggcgagcttcctcaccgtgtccgcttggaggtccatggttacgtggggacttgcctcgctaacatggcggtcgaggcatctggaggcacagcagatcacgcctgtcaggaggcagcctacttgatgatggccagactacgggagcgccacgactacatcttccacgacacggcgtaccgctaccacccccgtcgagcccatggtgatggcgtcagctccttccgtccgacagctggcgagaacgacaccaccttcggtcacatgtgtgctgtgatgaggggattggaccggatgcactcggacctgcacaaggcgaccaaggccttgaatgatgggaagctcatgaggatcgtcgctctgaaggacgagatagcgcgcctgaagaaggagaatgctcagttgaagggtcttccagcaccaggaggagtccggatccgcactacgccccgtaagaggacgactgcacccgtgcgcatccagcttgcgcccaggaacccacctccaccagcagctcccgcagcacctccagttccgcccgcagctccggcagttcccgcagttcctccagctccagctccagctcccgcgttcactctctccttcgctccagcatcagccgccagaggtccagccagtggtaccggaggttgcttgtttgggatggtctacaccaggactggcaaccgcacgacaggcgagggcagcaacggcgaagaacgcgtggatggtgtgcaccccaacagtgattctggcaatggtccgccaccacttcccgagaatccgacgcttgcccaagttatggcacaccagactcagatgatggcagccatgatgcagcagatgcaacagcagcaccagcagatgcaccagaggatgatgcagcacgccgaacagcagcaccagcagtttggtccccctccccctcagtccaagttgccggagtttctacgtgtcaggccacccaccttctccagcaccaccaaccccatggaggcaaatgactggatccatgcgatagagaagaagctgaatctcctgcagtgcaatgaacaggagaaggtcgctttcgccacacaccagcttcagggtcctgcgtcagcttggtgggacaaccacatggccacccgcccaccgggtactgaagttacatgggcagagttctgccgtagcttcaggaaggcacaggtgccagacggggtcgtggcacaaaagaagagggaattccgggcgctccatcagggcaacaggactgtgacagagtacctccatgagttcaatcgcctcgcgcgatatgcaccagaggatgtccgcaccgacgccgagaagcaggagaagttcatggcgggtctggatgacgagctgaccaaccaactgatatctggggactacgccgactttgagaggctggttgacaaggcaatccgtcaggaggatcagcgcaacaaaatggacaggaaaagaaaggcggcgcagttccggtccaaccaaggtagtcagcaccgaccgcgcctcactcccggacagcagggtggacctaccaccatgattgttcgtcaacaccgcccattcaaccccagcaacttccaccagggcactagtggcagtcagaaccaccatggaagtcagcccaaccgcggtacagctccacgcccaccgatggcaccggcacagtcaggccagcccgcacaagccaagaaggagacgggagcaaaaccagggtcctgcttcaactgtggcgagcttggccacttcgctgacaaatgcccgaagcccaggcgtgccggaccaaggtttatccaggctcgtgtcaaccacgcatctgcggaggaggcacaagcagcaccagaggtcgtactgggtacgtttcctgttaactcaatccctgcaacagtactttttgattctggtgcaacgcattctttcatctccaagaaatttgtcgggatgcatgggttaataagagaggaacttagcacaccgatgcgggttcataccccagggaatagctccacttcggttcaattcagcccttctataacaatagaaattcaaaggtcaccgtttctagccaacctcattcttctcgaatccaaagacctagatgtcattcttgggatggattggctgaccaagtttaagggggtcattgattgtgcgaatcgcacagtcaccctgaccaatgagaaaggagaaaccgtggtgtacaaatctctagtctcgccaaagaaaggagcctcgttgaatcagattgagacggaaatcccaatggacgccgaagagaagaacttgagaaaattggaggacatacccatagtctgcgagtatccagaggtgttccccgaagacctcaccaccatgccacccaagagggagattgaattccggattgatttggcaccaggaaccgctccaatctataagagaccgtacagaatggcggccaacgaattagcggaggtcaagaagcaagttgatgaacagctgcagaaagggtacatacgaccaagcacttcaccttggggcgctccggtcatttttgtggagaaaaaggataagacaaagaggatgtgcgtcgattatcgcgcacttaacgaggtcacaatcaagaataaatatcctttgccgcgaatcgacgatttatttgatcaactgaaaggagctaaagtgttctctaagatagacctgcgatcaggctaccaccagttgagaatccgggaagaggatattccgaagacggccttcaccactcggtacgggctatatgagtgcacggttatgtccttcggacttactaacgcacccgcattctttatgaatctgatgaacaaagtgttcatggaatttctggacaagtttgttgtggtattcatcgacgacattcttatctattcaaagtccgaggaagaacatgaacaacatctccgtctagtactcgagaagttgaaggagcaccagctatacgccaagttcagcaagtgtgacttctggttgacggaagttaaatttctgggccatgtcattacagctcagggtgtagcagttgatccatcgaacgtggagtcagttaccaagtggaccccaccgaagacagtgtcgcagattcgaagttttctaggactggctggttattaccgtcgtttcatcgaaaacttctcaagaatcgcccgacccatgactcagttgcttaagaaagacgagaagtttaaatggacagctgagtgcgacaagagctttgaggagctcaaaaggaaattagtatccgcaccggttttgatcctgcccgaccagacgaaagacttccaagtctattgcgatgcatcccgtcacggacttggatgtgtcctaatgcaagagggcagagtggttgcatatgcctcgcggcagttgcgtccacacgaaggaaattatccaactcatgacttggaattggcagcagtggtccatgctttgaagatctggaggcactatctgatcggcaaccgctgcgaagtatatacggaccataaaagtctgaaatacatcttcacccaaccagacctaaaccttcgacaacgaagatggttggaactaatcaaagactatgacatgagtattcactaccacccgggtaaagccaatgtggtggcagacgcattaagccggaaaagttactgcactgctctatgcatcgagggcatgtgtgaggaattgcgacaggagcttgaacatctcaacatgggaattgttgaacacgggttcgtagccgctctggaggcacggcctacgctcgtggatcaagttagagccgctcaagtaaatgatccggaaatagcagaactgaaaaagaacatgagagtcggaaaggctcgggatttccttgaggatgagcatggcacaatctggatgggagaaagattgtgtgtaccggacgacaaggaattgaaggatctgatactcaccgaagctcatcagacccagtactccattcatccaggcagcactaaaatgtatcaagacctcaaagagaaattttggtgggtcagcatgaggagagaaatagctgaattcgtcgcactctgcgatgtttgccaacgagtgaaagcagagcaccaaagaccagcaggtttactccaacctctccaaatcccggaatggaaatgggaggagattggaatggactttataacaggactgccccggacatcatcgggacatgattcaatctgggtagtcgtggatcgactcaccaaggtggctcactttataccagtacataccacctatacgggaaagagattggcagaattgtacctcgcaaggatcatgtgtttgcatggggtacccaagaagatagtatccgaccgaggtagtcagttcacctcaaagttctggcagaagctgcaggaagaattggggacccgtttaaacttcagcacggcctatcacccgcaaactgatggtcagaccgagcgtgtcaatcaaatcttggaggatatgttgagagcttgcgctcttgattttggtggagcctgggacaaaagcttaccatatgcggaattctcgtacaacaacagctaccaggccagtctacagatggcaccgtttgaagctctatacggccggaagtgccgcacacctcttttctgggatcagacaggcgaacgtcaactgttcggaacagaagtattagcggaagcagaagagaaagtcagaatcatcagggagagattgagggttgctcagtctcgacagaagagctacgcggataaccgtcgaagggagctaacttttgaggtcggagactacgtgtatcttcgtgtcactccgctccggggagtacaccgtttccagacgaaaggcaagttggcaccacgcttcgtgggaccatacaaaattttggaacgaaggggagaagttgcttatcagctagaacttccatccaatatgatcggcatccatgacgtgttccacgtttcccagttaaagaagtgcttaagggtacctgaagagcaggctgattcggaacacatcgatatccaggaggacctgacatatgtggagaagccggttcgcatacttgataccagtgaaaggagaaccagaaacaaggtcacccggttttgccgagttcagtggagtcatcattcggaagaggaagcgacctgggaaagggaagaggagttgaaagccgcccatccgtacctcttcaccagctcctccgaatctcggggccgagattccgtttaa

SEQ ID NO: 13874 - DNA, 5352 bp, Oryza sativa
  Clone ID: TFbOSC6690j.C1.o2.np
atggccggtcacccacccaaccaccgcggagaaggcatgatcgactttgtggcagagctggcacgcatgacactggtggtgggctaccccaacgcgccagagtacacgacgattccgccgctcagtggcgagcttcctcaccgtgtccgcttggaggtccatggctacgtggggacttgcctcgctaacatggcggtcgaggcatgtggaggcacagcagatcatgcctgtcaggaggcagcctacttgatgatggccagactacgggagcgccacaactacatcttccacgacacggcgtaccgctaccacccccgtcgagccaacggtgatggcgtcagctccttccgtccgacagccggcgagaacgacaccacatttggtcacatgtgtgctgtgatgaggggattggacaggatgcactcggacctgcacaaggcgaccaaggccttgaacgatgggaagctcatgaggatcgtcgctctgaaggacgagatagcgcgcctgaagaaggagaacgctcagctaaagggtcttccagcgccaggaggagtccggatccgcactacgccccgcaagacgacgacggcacccgtgcgcatccagcttgcgcccaggaacccacctccaccagcagctcccgcagcacctccagttccgcccgcagctccggcagttcctgcagctccagctccagctccagctccagctcccgcgttcgctctctccttcgctccagcatcagccgccagaggtccagccagtggcaccggaggttgttccctccagatggtctacaccaggactggtagccgcgcaacaggcgaggacagcaacggcgaagaacgcgctgatggtgtgcaccctagcagtgattccggcaatggtccgcccccgcttcccgagaatccgacgctagcccaagttatggcacatcagactcagatgatggcggccatgatgcagcagatgcagcagcagcaccagcagatgcaccagaggatgctgcagcacgccgaacagcagcaccagcagcttggtccccctccccctcagtccaagttgccagagtttctacgcgtcaggccacccaccttctccagcaccaccaaccctatggaggcaaatgactggctccatgcgatagagaagaagctgaatctcctgcagtgcaatgatcaggagaaggtcgctttcgccacgcaccagcttcagggtcctgcgtcagcttggtgggacaaccacatggccacccgcccaccgggtactgaagtcacatgggcagagttctgccgtagcttcaggaaggcacaggtgccagatggggtcgtggcgcaaaagaagagggaatttcgtgcactccatcagggcaaccggactgtgacagagtacctccacgagttcaatcgcctcgcgcgatatgcaccagaggatgtccgcaccgacgccgagaagcaggagaagttcatggcgggtctggatgatgagctgaccaaccaactgatatctggggactacgccgactttgagaggctagttgacaaggcaattcgtcaggaggaccaacgcaacaagatggacaggaagaggaaggccgctcagttcagggcacatcagggaagtcaccagaggccgcgcttcacttccggacagcagggtggacctaccaccatgatcgtccgccagcaccgcccgttcaaccctagcaacttcccccagggcgccagtggcagtcagaaccaccatggaggtcagcccaaccgcggtgcagctccacgcccaccaatggcaccggcacagtcaggccagcccgcgcaagccaagaaggagacgggagcaaaaccagggtcctgcttcaactgtggcgagcttggccatttcgctgacaaatgcccgaagcccaggcgtgccgggccaaggtttatccaggctcgtgtcaaccacgcatctgcggaggaggcacaagcagcaccagaggtcgtactgggtacgttccctgttaactcaatccctgcaacagtactttttgattctggtgcgacgcattctttcatttcaaagaaatttgtcgggatgcatgggttaattagagaggaacttagcacaccaatgcgggttcataccccaggaaatagctctacttcggttcaattcagcccttctataacaatagaaattcaaaggtcactatttctagccaacctcattcttctcgaatccaaagacctagatgtcattcttgggatggattggctgaccaagtttaagggggtcatcgattgtgcgaatcgcaccgtcaccttgaccaacgagaagagagaaaccgtggtgtacaaatctctagtctcgccaaagaaaggggtctcgttgaatcagattgagacggaaatcccagtggacaccgtagagaagaacttgagaaaattggaagatatacccataatctgcgagtatccagaagtgttccccgaagacctcactaccatgccacccaagagagagattgaattccggattgacttggcaccgggaactgctccaatctataagagaccgtacagaatggcggccaacgaattagcagaggttaagaagcaagttgatgagcagctgcagaaagggtacatacgaccaagcacttcaccttggggcgctccggtcatttttgtggagaaaaaggataagacgaagaggatgtgcgtcgattattgcgcacttaacgaggtcacaatcaagaataaatatcctttaccgcggatcgatgatttgtttgatcaactgaaaggagctagagtgttttctaagatagacctgcgatcaggctaccaccagttgagaattcgggaagaggatatcccgaagacggccttcaccactcggtacgggctatatgagtgcacggttatgtctttcggacttaccaacgcacccgcattcttcatgaatctgatgaacaaagtgttcatggaatttctggacaagtttgttgtggtgttcatcgacgacattcttatctattcaaagtccgaagaagaacatgaacaacatctccgtctagtactcgagaagttgaaggaacaccagctatatgccaagttcagcaagtgtgacttctggttgacggaagtcaaatttctgggccatgtcattacagctcagggtgtggcagttgatccatcgaacgtggagtcagttaccaaatggaccccacctaagaccgtgtcgcagattcggagttttcttggacttgcgggttattaccgccgattcattgaaaatttctccaggatcgcccgacccatgactcagttgcttaagaaggatgagaagtttaaatggacagctgagtgcgataagagcttcgaggagctcaagcagaaattagtatccgcaccagttttgattctgcccgacccgatgaaagacttccaagtctattgtgatgcatcccatcacggacttggatgtgtcctaatgcaagagggcagagtggttgcgtatgcctcgcggcagttgcgtccacacgaaggaaattatcccactcatgacttggaattggcagcagtggttcatgctttgaagatctggaggcactatctgattggaaaccgctgcgaagtatatacggaccataagagtctgaaatacatcttcacccaaccggacctaaaccttcgacaacgaagatggttggagctaatcaaagactatgacatgagtattcactaccacccgggtaaagccaatgtggtggcagacgctttaagccggaaaagttactgcactgccctatgcgtcgagggcatgtgtgaggaattgcggcaggagtttgaacatctcaacgtgggaattgttgaacacgggttcgtagccgctctggaggcacggcctacgctcgtggatcaagttagagccgctcaagtaaatgatccggaaatagcagagctgaaaaagaacatgagagtcggaaaggctcgggatttccttgaggatgagcatggcacaatctggattggagaaagattgtgtgtacctgacgacaaggaattgaaggatctgatactcaccgaggctcattagacccagtactccattcacccaggcagcactaaaatgtatcaagacctcaaagaaaagttttggtgggtcagcatgaggagagaaatagcggaattcgtcgcactctgtgacgtttgccaacgagtgaaggcagagcaccaaagacccgcaggtttactccaacctcttcaaatcccggaatggaaatgggaggagattggaatggactttataacgggactgccccggacatcatcgggacatgattcaatctgggtagtcgtggatcgactcaccaaggtggctcactttataccagtacataccacctatacgggaaagagattggcagaattgtacctcgcaaggatcatgtgtttgcatggggtacccaagaagatagtatccgaccgaggtagtcagttcacctcaaagttttggcagaaactgcaggaagaaatggggacccgtttaaatttcagcacggcctatcacccgcaaactgatggtcagaccgagcgagtcaatcaaatcttggaagatatgttgagagcttgcgctcttgattttgttggagcttgggacaaaagcttgccatatgcagaattctcgtacaacaacagctaccaggccagtctacagatggcaccgtttgaagctttatacggccggaagtgccgcacacctctcttctgggatcagacaggcgaacgtcaactgttcggaacagaagtattagcggaagcagaagagaaagtcagaatcatcagggaaaggttgaggattgctcagtctcgacagaagagctacgcggataaccgtcgaagggagctcacttttgaggcaggagattacgtgtatcttcgtgtcactccgctccggggagtacaccattttcagacgaaaggcaagttggcaccacgcttcgtaggaccatacaaaattttggaacgaaggggagaagttgcttatcagctagaacttccatccaacatgatcggcatccatgacgtgttccatgtgtcccaattaaagaagtgcttaagggtacctgaagaacaggctgattcggagcacattgatatccaagaggacctaacatatgtggagaagccggttcgtatacttgataccagcgaaaggagaaccagaaacaaggtcacccggttttgccgagttcagtggagtcatcattcagaagaggaagcaacctgggaaagggaagatgagttgaaagccgcccatccgcacctcttcaccagctcctccgaatctcggggccgagattccgtt

SEQ ID NO: 13875 - DNA, 2334 bp, Oryza sativa
  Clone ID: TFbOSC734j.C1.o3.gm
atggtctacactaggaatggtagccgcgcaacaggcgagggcagcaacggcgaagagcgcactgatggggtgcatcccaacagtgattccggcaatggtccgccaccacttcccgagaatccgacactagcccaagtgatggcacatcagactcagatgatggcagccatgatgcagcagatgcagcaccagcaccagcagatgcaccagaggatgctgcagcacgctgaacagcagcatcagcagtttggtccccctccccctcagtctaagttgccagagtttctacgtgtcaggccacccaccttctccagcaccaccaaccctatggaggcgaatgactggctccatgccatagagaagaagctgaatctcctgcagtgcaatgatcaggagaaggttgctttcgccacacaccagcttcaaggtcctgcgtcagcttggtgggacaatcacatggccacccgcccaccaggtactgaagtcacttgggcagagttctgccgtagcttcaggaaggcgcaggtgccagacggggtcgtggcacaaaagaagagggaattccgggcactccatcagggcaacaggactgcgacagtgtatctccatgagttcaatcgcctcgcgcgatatgcaccagaggatgtccgcaccgacgccgagaagcaggaaaagttcatggcaggtctggatgacgagctgaccaaccaactgatatctggggactacgctgactttgagaggctggttgacaaggcaatccgtcaggaggatcaacgcaacaagatggacaggaagaggaaggctgctcagttcagggcagatcagggaagtcaccagaggccgcgcttcactcccgggcagcagggtggacctaccaccatgatcgttcgtcagcaccgcccgttcaaccctagcaactttccccagggcgccagtggcagtcagaaccaccatggaggtcagtccaaccgcggtgcagctccacgcccaccaatggcaccggcacagtcaggcccgcccgcgcaagccaagaaggagactggagcaaaaccagggtcctgcttcaactgtggcgagcttggccacttcgctgacaaatgcccgaagcctaggcgtgccgggccaaggtttatccaggctcgtgtcaaccacgcatctgcggaggaggcacaagcagcaccagaggttgtactggtcaccttgaccaacgagaagggagaaacggtagtgtacaaatcaccagactcaccaaagcgaggggtctctttgaatcagattgagacggaaatcccagtggacaccgtggagaagaacttgagaaaattggaagatatacccatagtctgcgagtatccagaagtgttccccgaagacctcaccaccatgccacccaagagagagattgaattccggattgacttggcaccgggaaccgctccaatttacaagagaccgtacagaatggcggccaacgaattagccgaggtcaagaagcaggttgatgagcagctgcagaaagggtacattcgaccaagtacttcaccttggggtgctccggtcatttttgtggagaaaaaggataagacgaagaggatgtgcgttgattatcgcgcactcaacgaggtcacaattaagaacaaatatcctttgccgcgaatcgatgatttgtttgatcaactgaaaggagctaaagtgttttctaaggtagacctgcgatcaggctaccatcagttgagaattcaggaagaggatattccaaagacagccttcaccactcggtacaggctatatgagtgcacggttatgtccttcggacttaccaacgcacccgcgttcttcatgaatctgatgaacaaagtgttcatggaatttctggacaagtttgttgtggtattcatcgacgacatacttatctattcaaagtccgaagaagaacatgagcaacatctccgtctggtactcgagaagttgaaggagcaccagctatatgccaagttcagcaagtgtgacttctggttgacggaagtcaaatttctgggccatgtcattacagctcagggtgtggcagttgatccattgaacgtggagtcagttaccaaatggaccccaccgaagaccgtgtcgcagattcgaagttttcttggacttgcgggatattaccgccgattcatcgaaaacttctccaggatcgcccgacccatgactcagttgcttaagaaagatgagaagtttaaatggacagctgagtgcgataagagttttgaggagctcaaaaagaaattagtatccgcaccagttttgattctgcccgaccagatgaaagacttccaa

SEQ ID NO: 13876 - DNA, 4908 bp, Oryza sativa
  Clone ID: TFbOSC900034j.C1.o16.fg
atgggttgcaagatggccggacacccacccaaccactgtggagaaggcatgatcgactttgtggcagagttggcacgtatgacgctggtggtgggctaccccaatgcgccagagtacacgacggttccaccgctcagtggcgagcttcctcaccgtgttcgcctggaggtccacggctacgtgggtacctgcctagctaacatggtggttgaggcatctggaggcacagcagatcacgcctgtcaggaggcagcatacctgatgatggccagactacgggagcgccacaactacatcttccatgacacggcgtaccgatttcaccctcgtcgagccagtggtgatgatgtcagtaccttccgtccgacagctggcgagaacgacaccacctttggtcacatgtgtgctgtgatgaggggattggataggatgcactcggatctgcacaaggcgaccaaggccttgaatgatgggaagctcatgaggatcgtcgctttgaaggatgagatagcgcgcctgaagagggagaatgctcagttaaagggtcttcccgcgccaggaggagtccggatccgcactacaccccgcaagacgacgacgaaacccgtgcgcatccagcttgcgcccaggaacccacctccgcccgcagctccggcagttcctgcagctccagctccagctcccgttcacgtgttagctcccgcgtccgctctctccttcgctccagcatcagccgccaggggtccagccagtggcaacggaggttgcttgtttgggatggtttacaccaggaatggtagccgcgcaacgggtgagggcagcaacggcgaagagcgcactgagggtgtgcatcccaacagcaattccggcaatggtccgccaccacttcccgagaatccgacgctagcccaagtgatggcacatcagacacagatgatagcagccatgatgcagcagatgcagcagcagcaccagcagatgcaccagaggatgctgcagcacgccgaacagcagcatcagcagtttggtccccctccccctcagtccaagttgccagagtttctacgtgtcaggccacccaccttctccagcaccaccaaccctatggaggcgaatgactggctccatgccatagagaagaagctgaatctcctgcagtgcaatgatcaggagaaggttgctttcgccacacaccagcttcaaggtcctgcgtcggcttggtgggacaatcacatggccacccgcccaccaggtactgaagtcacttgggaagagttctgccgtagcttcaggaaggcgcaggtgccagatggggtcgtggcacaaaagaagagggaattccgagcactccatcagggcaacaggacggtgacggagtatctccatgagttcaatggcctagcgcgatatgcaccagaggatgtccgtaccgacgccgagaagcaggaaaagttcatggcaggtctggatgacgagctaaccaaccagttgatatctggagattacgccgatttcgaaaggctgatggacaggaagaggaaggccgctctgttcagggcacctcagggaagtcaccagaggccgcgcttcacccccgggcagcagggtggacctaccaccatgatcgtccgccagtaccgcccgttcaaccctagcaactttccccagggcgccagtggcagtcagaaccatcatggaggtcagcccagccgcggtgcagctccacgcccaccagtggcaccagcacagtcaggcccgcccgcgcaagccaagaaggagactggagcaaaaccagggtcctgcttcaactgtggcgagcttggccacttcgccgacaaatgcccaaagcctaggcgtgccgggccaaggtttatccaggctcgtgtcaaccacgcatctgcggaggaggcacaagcaacaccagaggttgtactgggtacgtttcctgttaactcaatccctgcaacaatactttttgattctggtgcaacgcattcgttcatttcaaagaagtttgtcgggatgcatgggttaaggaaagaagagcttagcacaccaatgagggttcataccccgggaaatagttcaacctcagtcagttttagcccttcagtgctaatagaaattcaaagatcaccatttctagctaacctcattcttctcgaatctaaagacctagatgtcattcttgggatggattggctgaccaagtttaagggagtcatcgattgtgcgaatcgtaccgtcaccttgaccaacgagaagggagaaacggtagtgtacaaatcaccagactcaccaaagcgaggggtctctttgaatcagattgagacgaaaatcccagaggacaccgtggagaagaacttgcggaaattggaagatatccccatagtctgcgagtatccagaagtgttccccgaagaccttactaccatgccacccaagagagagattgaattccggattgacttggcaccgggaaccgctccaatttacaagagaccgtacagaatggcggccaatgaattagccgaggtcaagaagcaggtggatgagcagctgcagaaagggtacattcgaccaagtacttcaccttggggtgctccgatcatttttgtggagaaaaaggataagacgaagaggatgtgcgttgattatcgcgcactcaacgaggtcacaatcaagaacaaatatcctttgccgcgaatcgatgatttgttcgaatttgatcaactgaaaggagctaaagtgttttctaagatagacctgcgatcaggctaccaccagttgagaattcgggaagaggatattccaaagacggccttcaccactcggtacgggctatatgagtgcacggttatgtctttcggacttaccaacgcacccgcattcttcatgaatctgatgaacaaagtgttcatggaatttctggacaaatttgttgtggtgttcatcgacgacattcttatctattcaaagtccgaagaagaacatgagcaacatctccgtctagtactcaagaagttgaaggagcaccagctaacgccatgttcagcaactcagggtgtggtagttgatctgtcgaacgtagagtcagttaccaaatggaccccaccgaagaccgtgtcgcagattcgaagttttcttggacttgcgggatattaccgccgattcatcgaaaacttctccaggatcgcccgacccatgactcagttgcttaagaaagatgagaagtttaaatggacagctgagtgcgataagagttttgaggagctcaaaaagaaattagtatccgcaccagttttgattctgcccgaccagatgaaagacttccaagtctattgcgatgcatcccgccatggacttggatgtgtcctaatgcaagagggcagggtggttgcgtatgcctcgcggcagttgcgtccacacgaaggaaattatccaactcatgacctggaattggcagcagtggttcatgttttgaagatctggaggcactatctgattggcaaccgctgcgaagtatatacggaccataagagtctgaaatacatcttcacccaaccggacctaaatctccgacaacgaagatggttggaactaatcaaagactatgacatgagcattcactaccacccgggtaaagccaatgtggtggcagacgcattaagcaggaaaagttactgcactgccctatgcatcgagggcatgtgtgaggaattgcggcaggagtttgagcatctcaacgtgggaattgttgaacacggtcagagcagagtaaatgattctgaaatagcagagctgaaaaagaacatgagagtcggaaaagcccgggatttccatgaagatgagcatggcacaatctggttgggagaaagattgtgtgtacctgacgacaaggaactgaaggatctgatactcaccgaggctcatcagacccagtactccattcatccaggcagcaccaaaatgtatcaagacctcaaagaaaagttttggtgggtcagcatgaggagagaaatagctgaattcgtcgcactctgcgatgtttgccaacgagtgaaggcagagcaccaaagaccagcaggtttactccaacctcttcaaatcccggaatggaaatgggaggagattggaatggactttataacaggactgccccggacatcatcgggtcatgattccatctgggtagtcgtggatcgactcactaaggttgctcacttcataccagtacataccacgtatacgggcaaaagcacggcctatcacccgcaaactgatggtcagaccgagcgagtcaatcaaatcttggaagatatgttgagagcttgcgctctcgattttggtggagcttgggacaaaagcttgccatatgcggaattctcgtacaacaacagctaccaggctagtctacagatggcaccgtttgaagctttatacggccggaagtgccgcacacctctcttctgggatcagacaggcgagcgtcaactgttcgggacagaggtattagcggaagcagaagagaaagtcagaatcatcagggaaaggttgaggattgcacagtctcgacagaagagctacgcggataaccgccgaagggagctcacttttgaggcgggagattacgtgtatcttcgtgtcactccgctccgaggagtgcaccgttttcaaaacaaaggcaagttggcaccacgcttcgtgggaccatacaaaatcttggaacgaaggggagaagttgcttatcagttagaacttccatccaatatgatcggcatccatgacgtgttccacgtgtcccaattaaagaagtgcttaagggtacccgaagaacaggctgattcggaacacattgatatccaggaaggacctaacctacgtggagaagccggttcgtatacttga

SEQ ID NO: 13877 - DNA, 4056 bp, Oryza sativa
  Clone ID: TFbOSC900034j.C1.o26.fg
atggtctacaccagaactggcacccgcacgactggcgagggcagcaacggcgaagaacgcgctgatggtgtgcaccccaacagtgattccggcaatggtccgccaccacttcccgagaatccgacactggcccaagttatggcacatcagactcagatgatggcagccatgatgcagcaaatgcagcagcagcaccagcagatgcatcagaggatgctgcagcatgccgaacaacagcaccagcagtttggtccccctccccctcagtccaagttgccagagtttctacgcgtcaggccacctaccttctccagcatcaccaaccccatggaggcgaatgactggctccatgccatagagaagaagttgaatctcctgcagtgcaatgatcaggagaaggtcgctttcgccacacaccagcttcaaggtcccgcgtcagcttggtgggacaatcacatggccacccgcccgctaggcactgaagtcacttgggcggagttctgtcgtagcttcaggaaggcgcaggtgccagacggggtcgtggcacaaaagaagagggaattccgggcactccatcagggcaacaggacagtgaccgagtatcttcacgagttcaatcgtctcgcgcgatatgcactggaggatgtccgcactgacgccgagaaacaggaaaagttcatggcaggtctggatgacgagctgaccaaccaactgatatctggggactacgctgattttgaaaggctggttgacaaggcaatccgtcaggaggatcagcgcaacaaaatggacgggaagagaaaggcggcgcagctccggtccaaccaagggtggacctaccaccatgatcgtccgcagcaccgcccgttcaactcaagcaacttccaccagggcgccagtggcagtcagcaccatggaggtcagcccaaccgcggtgcagctccacgcccaccaatggcaccaacacagtcagccccgtccgcgcaagccaagaaggagactggcacaaaaccagggtcctgcttcaactgtggcgagcttggccacttcgctgacaaatgcccgaagcccaggcataccgggccaaggtttgtccaggctcgcgtcaaccatgcgtccgcagaggaggcacaagcagcaccagaggtcgtactgggtacgtttcctgttaactcaatccctgcaacagtactttttgattctggtgcaacgcattcgttcatttcaaagaagtttgtcggggtgcatgggttaataagagaggaacttagcacacccatgcgggttcataccccagggaatagctccacttcggtacaattcagcccttctataacaatagaaattcaaaaatcaccattcctagccaacctcattcttcttgattccaaagacctagatgtcattctggggatggattggctgaccaagttcaagggagtcattgattgtgcgaatcgcacagtcactttgaccaacgagaagggagaaaccgtagtgtacaaatcattagtctcaccaaagcaaggggtctccttgaatcagattgaggcggaaatcccagtggtcactaaggagaagagttcgaggaaattggaagagattcccatacgagagattgaattccggattgatttggcaccgggaaccgcaccaatttacaagagaccgtacaggatggcggccaacgaactagcaaaggtcaagaagcaggttgatgagcagctgcagaaagggtacatacgaccaagtacttcaccttggggtgctccggtcatttttgtggagaaaaaggataagacgaagaggatgtgcgttgattatcgcgcactcaatgaggtcacaatcaagaataaatatcctttaccgcggatcgatgatttgtttgatcaactgaagggagctaaggtgttctctaagatagacctgcgatcaggctaccaccagttaagaatccgggaagaggatattccaaagacggctttcaccactcggtacgggctgtatgagtgcacggttatgtcttttggacttaccaacgcacccgcattcttcatgaatctaatgaacaaagtgttcatggagtttctggacaagtttgttgtggtattcatcgacgacatacttatctactcaaagtccgaagaagaacatgagcatcatctccgtctggtactcgagaagttgaaggagcaccagttatacgccaagttcagcaagtgtgacttctggttgacggaagtcaaatttctgggccatgttattacagctcagggtgtggccgtcgacccatccaacatggagtcggttaccaaatggaccccaccgaagaccgtgtcgcagattcgaagttttcttggacttgcgggttattaccgccgtttcatcgagaacttctctaggatcgcccgacccatgactcagttgcttaagaaagatgagaagttcaaatggacagctgagtgcgataagagctttgaggagctcaagaagaaattagtatccgcaccagttttgattctgcccaaccagatgaaagacttccaagtctattgcgacacatcccgccacgggcttgggtgtgttctaatgcaggaaggcagagtggtggcgtatgcctcacgacagctgcgtccacacgaagggaattatccaacccatgatctggaactggcagcagtggttcatgccttgaagatctggaggcactatttgattggcaaccgttgtgaagtatatacggatcacaagagtctgaaatacatcttcacccaaccggacctaaatctcctacaacgaagatggttggaattaatcaaagactatgatatgagcattcactaccacccggggaaagccaatgtggtggcagacgcattaagcaggaaaagttactgcactgctctatgcatcgagggcatgtgtgaggaattgcggcaggagttggagcatctcaacgtgggaattgttgaacacgggttcgtagccgctctggaagcacggcctacgctcgtcgatcaagttagagccactcaagtaaatgatccggaaatagcagagctgaaaaagaacatgagagtcggaaaggctcgggatttccttgaggatgagcatggcacaatctggatgggggaaagattgtgtgtacctgacaacaaggagctgaaggatctggtactcaccgaggcccatcagacacagtattacattcacccaggcagcaccaagatgtaccaagaccttaaagaaaaattttggtggacagatggtcagaccgagcgagtcaatcaaattttggaagacatgttgagagcttgcgctcttgactttggtggagcttgggacagatgtttgccatatgcggaattctcgtacaacaacagctaccaagccagtctacagatggcaccgttcgaagctttatacggccggaagtgccacacacctctcttctgggatcagacaggcgagcgtcaattgttcgggacagaggtattaacggaagcagaagagaaagtcagaaccatcagggaaaggttgagaattgcccagtctcgacagaagagctacgcggataaccgccgaagagagctcacttttgaagcaggggattatgtgtatctttgggttactccgctccggggagtgcaccgttttcaaaccaaaggcaagttggcaccatgtttcgtgggaccctacaaaatcttggaacgaaggggagaagttgcttatcagttagaacttccatccaatatgatcggcatccatgatgtattccacgtgtcccaattaaagaagtgcttaagagtacttgaagaacaggctgattcggaacacattgatatccaggaggacctgacatatgtggagaagctgattcgtatacttgataccagcgaaagaagaaccagaaacaaggtcaccaggttttgccgagttcagtggagtcaccattcagaagaggaagcaacctgggaaagggaagatgagttgaaagccgcccatccgcacctcttcgccagctcctccgaatctcggggccgagattccgtttaa

SEQ ID NO: 13878 - DNA, 2670 bp, Oryza sativa
  Clone ID: TFbOSC900063j.C1.o16.fg
atggaggcgaatgactggctccatgccatagagaagaagctgaatctcctgcagtgcaatgatcaggagaaggttgctttcgccacacaccagcttcaaggtcctgcgtcaccttggtgggacaatcacatggccacccgcccgccaggcactgaagtcacttgggcagagttctgtcgtagcttcaggaaggcgcaggtgccagatggggtcgtggcacaaaagaagagagaattccgagcactcaaccagggcaacaggacggtgacggagtatctccatgagttcaatcgccttgcgcgatatgcaccggaggatgtccgtactgacgccgagaagcaggaaaaattcctagcaggtctggatgatgagctaaccaaccagttgatatctggagattacgccgatttcgaaaggctggtggacaaggcaatccgtcaggaggatcaacgcaacaagatggacaggaagaggaaggccgctcagttcagggcacatcagggaagtcaccagaggccgcgcttcgctcccgggcagcagggtggacctaccaccatgatcgtcctccagtaccgcccgtttaaccctagcaacttcccccagggcgccagtggcagtcagatccaccatggaggtcagcccaaccgtagtgcagctccacgcccaccagtggcaccggcacagtcaggcccgtccgcgcaagccaagaaggagactggaacaaaaccagggtcctgcttcaactgtggcgagcttggccacttcgctgacaaatgcccgaagcctaggcgtgccgggccaaggtttgtccaggctcgtgtcaaccacgcatctgcggaggaggcacaagcagcaccggaggtcgtactgggtacgtttcctgttaactcaatccctacaacagtactttttgattctggtgcaacgcattcgttcatttcaaagaagtttgtcgggatgtatgggttaataagagaggaacttagcacaccaatgcgggttcataccccagggaatagctccactttggttcaattcagcccttctataacaatagaaattcaaagatcaccatttctagccaacctcattcttctcgaattcaaagacctagatgtcattcttgggatggattggctaaccaagttcaagggagtcattgattgtgcgaatcgcacagtcaccttgaccaacgagaagggagaaacaagaccgtacagaatggcggccaacgaactagcagaggtcaagaagcaggttgatgagcagctgcagaaagggtacattcgaccaagtacttcaccttggggtgctccggtcatttttgtggagaaaaaggataagacgaagaggatgtgcgttgattatcgcgcactcaacgaggtcacaatcaagaacaaatatcctttgccgcgaatcgatgatttgtttgatcaactgaaaggagctaaagtgttttctaagatagacctgagatcaggctaccaccagttgagaattcgggaagaggatattccaaagacgaccttcaccactcggtacgggctatatgagtgcacggttatgtctttcggacttactaacgcacccgcattcttcatgaatctgatgaacaaagtgttcatggaatttctggacaattttgttgtggtattcatcgacgacatacttatctattcaaagtccgaagaagaacatgagcaacatctccgtctggtactcgagaagttgaaggagcaccagctatacgccaagttcagcaagtgtgacttctggttgacggaagtcaaatttctgggccatgtcattacagctcagggtgtggcagttgatccatcgaacgtggagtcagttaccaaatggaccccacctaagaccgtgtcgcagattcggagttttcttggacttgcgggttattaccgccgattcattgaaaacttctccagaatcgcccgacccatgactcagttgcttaagaaagatgagaagtttaaatggacagctgagtgcgataagagttttgaggagctcaagaagaaattagtatccgcaccagttttgattctgcccgaccagatgaaagacttccaagtctattgcgatgcatcccgtcacggacttggatgtgtcctaatgcaagagggcagagtggtcgcgtatgcctcgcggcagttgcgtccacacgaagggaattatccaactcatgacctggaattggcagcagtggttcatgctttgaagatctggaggcactatctgattggcaaccgctgcgaagtatatacggaccataagagtctgaaatacatcttcacccaaccggacctaaatctccgacaacggagatggttggaactaatcaaagactatgacatgagcgttcactaccacccgggtaaagccaatgtggtggcagacgcattaagcaggaaaagttactgcactgccctatgcatcgagggcatgtgtgagaaattgcagcaggagtttaagcgtctcaacgtgggaattgttgagcacgggttcgtagccgctctggaagcacggcctacgctcgtcgatcaagttagagccgctcaagtgaatgatcccgaaatagcagagctgaaaaagaacatgagagtcggaaaggctcgggatttccttgaggatgaatacggcacaatctga

SEQ ID NO: 13879 - DNA, 5352 bp, Oryza sativa; identical to SEQ ID NO: 13874
  Clone ID: TFbOSC900133j.C1.o2.np

SEQ ID NO: 13880 - DNA, 4713 bp, Oryza sativa
  Clone ID: TFbOSC900157j.C1.o2.fg
atggccggccacccacccaaccaccgcggagaaggcatgatcgactttgtggcagagttggcatgtatgacgctggtggtaggctaccccaacgcgccagagtacacgacgattccaccgctcagtggcgagcttcctcaccgtgttcgtctggaggtccacggctacgtgggtacctgcctagctaacatggtggtggaggcatctggaggcacagcagatcacgcctgtcaggaggcagcatacctgatgatggccagactacgggagcgccacaactacatcttccacgacacggcgtactggtttcaccctcgtcgagccagcagtgatgatgtcagtactttccgtccgacagccggcgagaacgacaccacctttggtcacatgtgtgctgtgatgaggggattggataggatgcactcggacctgcacaaggcgaccaaggccttgaatgatgggaagctcatgaggatcgtcgctctgaagagggagaacgctcagttaaagggtcttcccgcgccaggaggagtccggatccgcaccacgccccgcaagacgacgactgcacccgtgcgcatccagcttgcgcccaggaacccacctccatcagcagctcccgcagcacctccagttccgcccgcagttcctgcaactccagctccagctcccgcgtccgctctctccttcgctccagcatcagccgccaggggcccagccagaggcaacggaggttgcttgtttgggatggtctacaccaggaatggtagccgcgcaacaggcgagggcagcaacagcgaagagcgcactgagggtgtgcatcccaacagcaactccggcaatggtccgccaccacttcccgagaatccgacgctagcccaagtgatggcacatcagacacagatgatggcagccatgatgcagcagatgcagcagcagcaccagcagatgcaccagaggatgctgcagcacgccgaacagcagcaccagcagtttggtccccctccccctcagtccaagttgccagagtttctacgtgtcaggccacccaccttctccagcaccaccaaccctatggaggcgaatgactggctccatgccatagagaagaagctgaatctcctgcagtgcaatgatcaggagaaggttgctttcgccacacaccagcttcaaggtcctgcgtcagcttggtgggacaatcacatggccacccgcccaccaggtactgaagtcacttgggcagagttctgccgtagcttcaggaaggcgcaggtgctagacggggtcgtggcacaaaagaagagggaatttcgggcacttcatcagggcaacaggactgtgacggagtacctccatgagttcaatcgcctcgcgcgatatgcaccagaggatgtccgtaccgacgccgagaagcaggaaaagttcatggcaggtctggatgacgagctaaccaaccagttgatatctggagattacgccgatttcgagaggctggttgacaaggcaatccgtcaggaggatcaacgcaacaagatggacaggaagaggaaggccgctcagttcagggtacctcagggaagtcaccagaggccgcgcttcgctcctgggcagcagggtggacctaccaccatgatcgtccgtcagtaccgcccgttcaaccctagcaactttccccagggcgccggtggcagtcagacccaccatagaggtcagtcaaaccgcggtgcagctccacgcccaccaatggcaccggcacagtcaggcccgcccgcgcaagccaagaaggagactggagcaaaaccagggtcctgcttcaactgtggcgagcttggccacttcgctgacaaatgcccgaagcctaggcgtgccgagccaaggtttatccaggctcgtgtcaaccacgcatctgcggaggaggcacaagcagcaccagaggtcgtactgggtatgttccctgttaactcaatccctgcaacagtactttttgattctggtgcaacgcattctttcatttcaaagaaatttgtcgggatgcatgggttaataagagaggaacttagcacaccaatgcgggttcataccccagggaatagctccacttcggttcaattcagcccttctataacaatagaaattcaaagatcaccatttctagccaacctcattcttctcgaatccaaagacctagatgtcattcttgggatggattggctgaccaagtttaagggggtcatcgattgtgcgaatcgcacagtcaccttgaccaacgagaagggagaaaccgtggtgtacaaatcactagtctcaccaaagcaagaggtctctttgaatcagattgaagcggaaatcccagtggacaccgtggagaagagtttgaggaaattggaagatatacccatagtctgcgagtatccggaagtgttccccgaagacctcactaccatgccacccaagcgagagattgaattccggattgacttggcaccgggaaccgctccaatttacaagagaccgtacagaatggcggccaacgaattagccgaggtcaagaagcaggttgatgagcagctgcagaaagggtacattcgaccaagtacttcaccttggggtgctccggtcatttttgtggagaaaaaggataagacgaagaggatgtgcgttgattatcgcgcactcaacgaggtcacaaccaagaacaaatatcctttgccgcgaatcgatgatttgtttgatcaactgaaaggagctaaagtgttttctaagatagacctgcgatcaggctaccaccagttgagaattcgggaagaggatattccgaagacggccttcaccactcggtacgggctatatgagtgcacggttatgtcgttcggacttaccaacgcacccgcattcttcatgaatctgatgaacaaagtgttcatggaatttttggacaagtttgttgtggtgttcatcgacgacattcttatctattcaaagtccgaagaagaacatgaacaacatctccgtctagtactcgagaagttgaaggagcaccagctatacgccaagttcagcaagtgtgacttctggtcgacggaagtcaaatttctgggccatgtcattacagctcagggtgtggcagttgatccatcgaacgtggagtcggttaccaaatggaccccgccgaagaccgtgtcgcagattcgaagttttcttggacttgcaggttattaccgccgattcatcgaaaacttctccagaatcgcccgacccatgactcagttgcttaagaaagatgagaagtttaaatggacagctgagtgcgataagagttttgaggagctcaaaaagaaattagtatccgcaccagttttgattctacccgaccagatgaaagacttccaagtctattgtgatgcatcccgtcacggacttggatgtgtcctaatgcaagagggcagagtggttgcgtatgcctcgcggcagttgcgtccacacgaagggaattatccaactcatgacctggaattggcagcagtggttcatgctttgaagatctggaggcactatctgattggcaaccgctgcgaagtatatacggaccataagagtctgaaatacatcttcacccaaccggacctaaacctccgacaacgaagatggttggaactaatcaaagactatgacatgggtattcactaccacccgggtaaagccaatgtggtggcagacgctttaagccggaaaagttactgcactgccctgtgcatcgagggtatgtgtgaggaattgcggcaggagtttgagcatctcaacgtgggaattgttgaacacgggtttgtggccgctctgaaggcatggcctacgcttgtggatcaagtcaaagcagctcaagtaaacgattctgaaatagcagagttgaaaaagaacatgagagtcggaaaagcccgggatttccacgaagatgagcatggcacaatctggttgggagaaagattgtgtgtacctgacgacaaggaactgaaggatctgatactcaccgaggctcatcagacccagtactccattcatccaggcagcactaaaatgtatcaagacctcaaagaaaagttttggtgggtcagcatgaggagagaaatagctgaattcgtcgcactctgcgatgtttgccagcgagtgaaggcagagcaccaaagaccagcaggtttactccaacctcttcaaatcccggaatggaaatgggaggagattggaatggactttataacaggactgccccggacatcatcgggtcacgattcaatctgggtagtcgtggatcgactcactaaggttgctcacttcataccagtacataccacatatacgggcaaaaggttggcggagctttacctttcgagaatcatgtgcctacatggagtacccaaaaagattgtatctgaccgagggagtcagttcacctcaaaattctggcagaagctgcaggaagaattggggacccgtttaaatttcagcacggcctatcacccgcaaactgatggtcagaccgagcgagtcaatcaaatcttggaagatatgttgagagcttgcgctcttgattttggtggagcttgggacaaaagcttaccatatgcggaattctcgtacaacaacagctaccaggccagtctacagatggcaccgtttgaagctttatacggccggaagtgccgcacacctctcttctag

SEQ ID NO: 13881 - DNA, 7581 bp, Oryza sativa
  unsure (1)..(7581): unsure at all n locations
  Clone ID: TFbOSC900164j.C1.o3.fg
atggcagatactcgatcatctgccgaggatgaaaccaagcgccctacggaggaggagactgggcgtgatggagagatgggatccgaaccaaatctggaagagagattgaagaggttgaatatgcatggggaggaggaaactgacctagatttctcggaggaattggaagggctgatcaaggacgtacgctggctcgctctttttagggtttatactacaaaaccctttagccactcagcgctgttgaatgctatgagaaacgcctggtcttcggcacaggatatctcgtttaaggtaatggattcaaatctctttatggtacaatttcaatgccttggtgattggaacagagtsatggaaggaggtccatggatctttagaggagctcctgtagtccttaaagaatatgatggcttcactaatgtgtttgattataagttggataaaattccagtttggacgcgcattcatggggtgcctgatgggttgatgaagaagagagaactagcagagagggttgctaagaaggttggtgaacaaccattcacagttatagtagatgaggggagaatcaatcctgttaaatacctcagagctagggttttcttagatttgagtwaacccctcgttcggtttgtcccaatcacgatcaaggaaagaatattgtatccaagagcgagagcaaattggttgraacatggtgaccgtaacaccagtttctttcaacaatttgctgcmcmgagaagaagaagaaagaawattaagggacttattgatgagaatggatgttttcaaaccgatgaagacagaatgagtamcatagtttatgggtacttccaaantctcttctcggctgaggttacacaaatagatggatcttctttgctggatgtacagagaaaagtaacgggagatatgaattttggattactagcaccgtatacagctgaagaggtgaaaaatgctctgttcagtataggtgatctgaaagctccgggaccagatgggctgcacgctgttttctataaaagattctgggatatgttggagagtgatctggttaaagaagttcttgatgcaataaatacaatgaaaattccagatggatggaatgacacaactgttgtcatgattccaaaggttgataaaccagacagagtaactcaatttagacccattagcttatgtaatgtggtctataaaataatttctaagatgttagcaaaccggctaaagtgtcttctccctgaaataataagtgatcagcagagtgcttttgtcccgggcaggttgatcacggataatgttttggtagcttatgagtgcttacacacaatgaaaaagaagaaaggaagaaaagttcagtacagggtgaatttcaatggtgtattgacagaggttattaagccttctcgaggcttaaggcagggggatcccttatccccatacctttttttgcttgttgctgagggtctatcgagtatgctgcaaggagctgaaaatagaggagacttagtgggaatcagaatggtctacaccaggaatggtagccgcgcaacaggcgagggcagcaacggcgaagaacgcgctgatggtgtgcaccccagcagtgattccggcaatggtccgccaccacttcccgagaatccgacccttgcccaagttatggcacatcagactcagatgatggcagccatgatgcagcagatgcagcagcagcaccagcagatgcaccagaggatgatgcagcacgtcgaacagcagcaccagcagtttggtccccctccccctcagtccaagttgccagagtttctacgcgtcaggccacccaccttctcaagcaccaccaaccccatggaggcgaatgactggctccatgccatagagaagaagctgaatcgcctgcagtgcaatgatcaggagaaggtcgctttcgccacacaccagcttcagggtcccgcgtcagcttggtgggacaatcacatggccacccgcccaccaggtactgaagtcacatgggcagagttctgccgtagcttctggaaggcgcaggtgccagacggggtcgtggcacaaaagaagagggaattccgggcactccatcagggcaacaggactgtgacagagtacctccacgagttcaatcgcctcgcgcgatatgcaccagaggatgtccgcaccgacgccgagaagcaggagaagttcatggcgggtctggatgatgagctgaccaaccaactgatatccggggactacgctgactttgagaggttggttgacaaggcaatccgccaggaggatcaacgcaacaagatggacaggaagaggaaggccgcacagttcagggcacctcagggaagtcaccagaggccgcgcttcgctcctgggcagcagggtggacctaccaccatgatcgttcgtcagcaccgcccgttcaaccctagcaactttccccagggcgccagtggcagtcagaaccaccatggaggtcagtccaaccgcggtgcagcttcacgcccaccaatggcaccggcacagtcaggcccgcccgcgcaagccaagaaggagactggagcaaaaccagggtcctgcttcaactgtggcgagcttggccacttcgctgacaaatgcccgaagcctaggcgtgccgggccaaggtttatccaggctcgtgtcaaccacgcatctgcggaggaggcacaagcagcaccagaggtcgtactgggtacgttccctgttaactcaatccctgcaacagtactttttgattctgacctagatgtcattcttgggatggattggctgaccaagtttaagggggtcatcgattgtgcgaatcgcacagtcaccttgatcaacgagaagggagaaancgtggtgtacaaatctctagtctcgccaaagaaaggggtctctttgaatcagattgaagcggaaatcccagtggacaccgtagagaagaactcgagaaaattggaagatatacccatagtctgcgagtatccagaagtgttccccgaagacctcactaccatgccacccaagagagagattgaattccggattgacttggcaccgggaactgctccaatctataagagaccatacaggatggcggccaacgaactagcagaggtcaagaaacaggttgatgagcagctgcagaaagggtacattcgaccaagtacttcacctttgggtgctccggtcatttttgtggagaaaaaggataagacgaagaggatgtgcgttgattaccacgcactcaacgaggtcacaatcaagaacaaatatcctttgccgcgaatcgatgatttgtttgatcaactgaaaggagctaaagtgttttctaagatagacctgcgatcaggctaccaccagttgagaattcgggaagaggatattccgaagacggccttcaccactcggtacgggctatatgagtgcacggttatgtctttcggactcaccaacgcacccgcattcttcatgaatctgatgaacaaagtgttcatggaatttctggacaagtttgttgtggtgttcatcgacgacattcttatctattcaaagtccgaagaaaaacatgaacaacatttccgtctggtactcgagaagttgagggagcaccagctatatgccaagttcagcaagtgtgacttctggttgacggaagtcaaatttttgggccatgtcattacagctcagggttattaccgtcgattcatcgaaaatttctccagaatcgcccgacccatgactcagttgcttaagaaggatgagaagtttaaatggacagccgagtgcgataagagcttcgaggagctcaagaagaaattagtatccgcacccgttttgattctgcccgacccgatgaaagacttccaagtctattgtgatgcatcccgtcacggacttggatgtgtcctaatgcaagagggcagagtggttgcgtatgcctcacggcagttgcgtccacacgaagggaattatccaactcatgacttggaattggcagcagtggttcatgctttgaagatctggaggcactatctgattggcaaccgctgcgaagtatatacggaccataagagtctgaaatacatcttcacccaaccggacctaaatctccgacaacgaagatggttggaactaatcaaagactatgacatgagtattcactaccacccgggtaaagccaatgtggtggcagacgctttaagccggaaaagttactgcactgccctatgcatcgagggcatccgctctggaggcacggcctacgctcaagcaaatgattctgaaatagcagagctgaaaaagaacatgagtgtcggaaaagcccgggatttccacgaagatgagcatggcacaatctggttgggagaaagattgtgtgtacctgacgacaaggaactgaaggatctgatactcaccgaggctcatcagacccagtactccattcacccaggcagcactaaaatgtatcaagacctcaaagaaaagttttggtgggtcagcatgaggagagaaatagctgaattcgtcgcactctgcgatgtttgccaacgagtgaaggcagagcaccaaagaccagcaggtttacttcaacctcttcaaatcccggaatggaaatgggaggagattggaatggactttataacaggactgccccggacatcatcgggtcacgaatcgatctgggtagttgtggatcgactcactaaggttaatttggagcgtcacgggctagttccggtcgggactagttcggggcgtgacagtagaccacggattcacaagtatcgtgtggtgccttcgacgctacaccaatgcttaaagttcctagatggtagtgggacgcaacagaggatcgtcggcaacctctctccatacactacccaagaatcgcatcatgccgatgcaaagtactattttccagttgacgattctgatcaaactcttggtcgaacaactccggcagcggatctcctaatcgcgcctggacgcacacctaccccagagataagacggctcatcacagcaggaccacttgctggtgcgacagggtcctcaacccgtaatcgcagaaataacgctcgccaccactcattcatgagtgcacagtatgagaataagccgtatacgggagccggaatgtccggtgtcgtggttccagtggagaargatactgctcttacgtcaccgactttcacacctctgttgttgaaagcagggacatcatcacggactccaactacacaaacgtctgtggcgagagttccggttgatttacaggctccctcatcaaaagaaatcttgctaaccagaaatgttgcaatggtccaaggccgcaagttgctagatatcagcaacgatgcgccgacagtaatcacaatcagggctcgcaacaattcaagaagaagtggctaccactatgaaggtagatgccaaattaattcctttattggaaaaggctgggatcaacgttcaacaaaacaggcgaatgccgccgccaccggctatatttacgctagcatgatcacagagcaagagggagaattagaagatcccttcatgcttgatgaactcaaagaggagaagcaacccaccattgacgatcttgtggaaattaatttaggcaccatggatgatccccgccctacatttgttagtgccgcgctttcagccgaagaacaagagagttatcgaagcttcctgatggagtaccgagattgctttgcttggacatataaggagatgccgggtcttgatccccgtgttgcaacacacaaacttgccatcgacccacaatttcggcctgtaaagcagccgccacgtcgcctacgaccagaattccaagatcaagtcattgcggaggtagataggcttatcacagcaggatttatcaaagagtctattgttgccgagcttttcaaaaagtttgcaaaaagggcccaaaatgaatttagttgcactcttgtgaaaattagaagtgacaatggttccgagtataaaaataccaatatcaaggactattgtgatgatcttggtatcaaacatgagctttccgctacctactcacctcaacaaaatggtgtagtggagaggaaaaatcatacattggttgagatggcaagttatgcctcaaatagcaaggcataccgggtctacaataagaacaaaggtattgtggaagaaactgttgatgttcaatttgatgaaactaatggttcccaagaggggcacgagaatttggatgatgtaggtgatgaaggcttgatgagagctatgaagaatatgtctattggagatgtcaagcctattgaagtggaagacaagccatccacctccactcaaggtgagccatctacttccgctgcgccaagtcaagctcaagtggaagtggaagaggagaaggcacaagatccacctatgcccccaaggatacacaccgctctttccaagaatcacccaattgaccaagttttgggtgacattagtaagggtgtccaaacacgatctcatgttgtttcgatttgtgagcattactcgtttgttttttgttttgagccaaaacatatagatgaagctctttatgatccagattggattaatgctatgcatgaagagctcagcaactttgtaagaaacaaggtgtggactttggttgaaagacctagagatcacaatgccatagggacaaagtgggtctttaggagcaaacaagatgagaacgggttggtggtgagaaacaagataagcttggtggcacaaggtttcacacaagttgaggctattcgcatcattcttgcatttgcatcatgctttgatatagaactatttcaaatagatgtgaaaagtgcttttctaaatggtgaaattgccgaacttgtctttgttgaacaacctcccggttttgaagatcctaaaaatcctaaccatgatttcaaaactggaaaagttgacaccacacttttcacaaatatcattggtgatgacttctttgtttgtcaaatttatgttgatgatatcatattcggttctactaatgaggtattttgtaaggaatttggtggtgatatgatgtctagggaatttgagatgtccatgattggaaagttgagcttcttccttgaacttcatatcaagcaactcaaggatgggacgttcatgagccaaaccaagtacatcaagaatcaactcaagaggtttggcttggaggatgcgaagcccatcaagacaccaatggcaaccaacgagcatcgcgaccttgatgagggaggtaaaccgatagatttaaagctttatcgttctatgattggtagcttgctttaccttaccgcatctaggtcggatatcatgtttaatgtttgcaagtgtgcacggtttcaagccgctcccaaggagtgtcacttagtggccgtgaaaagaattctaagatatttaaagtattcctcaattattggcttgcggtacccaaaagagttacttgcttgggcgaaagaaaagagaccgagcataagaaatgcatggatgattgaagaagttgattggggaccaaacaaggacattctctaa

SEQ ID NO: 13882 - DNA, 5449 bp, Oryza sativa
  Clone ID: TFbOSC900176j.C1.o9.np
atggccggtcacccacccaaccaccgcggagaaggcatgatcgatttcgtggcagagttggcacgcatgacactggtggtgggctaccccgacgcgccggagtacacgaccattccaccgctcagtggcgagcttcctcaccgtgtccgcttggaggtccatggttacgtggggacttgcctcgccaacatggcggtcgaggcatctggaggcacagcagatcacgcctgtcaggaggcagcctacttgatgatggccagactacgggagcgccacaactacatcttccacgacacggcgtaccgctaccaccccagtcgagccaacggtgatggcgtcagctccttccgtccgacagctggcgagaacgacaccaccttcggtcacatgtgtgctgtgatgaggggattggacaggatgcactcggacctgcacaaggcgaccaaggccttgaacgatgggaagctcatgaggatcgtcgctttgaaggacgagatagcgcgcctgaagaaggagaacgctcagctaaagggtcttccagcgccaggaggagtccggatccgcaccacgccccgcaagacgacgacggcacccgtgcgcatccagcttgcgcccagaaacccacctccagcagcagctcccgcagcacctccagttctgcccgcagttcctgcagctccagctccagctccagctccagctcccgcgtccgctctctccttcgctccagcgtcagccgccagaggtccagccagtggcaccgggggttggttgtctgctactcccagtggcagcagcgatctcagcagcagcagctccagtggctcgcagtcaggcagcggcgagacgtatctgccaggctccaggagtcgctcagagggacctgatggtctacaccaggactggcaaccgcacgacaggcgagggcagcaacggcgaagaacgcgttgatggcgtgcaccccaacagtgattccggcaatggtccgccaccacttcccgagaatccgacccttgcccaagttatggcgcatcagactcagatgatggcagccatgatgcagcagatgcagcaacaacaccagcaaatgcaccagaggatgatgcagcacgtcgaacagcagcaccagcactttggtccccctccccctcaatccaaattgcctgagttcctaggagtcaggccacccaccttctccagcaccaccaaccctatggaggcaaatgactggctccatgcaatagagaagaagctgaatctcctgcagtgcaatgatcaggagaaggtcgctttcgccacacaccagcttcagggtcctgcgtcagcttggtgggacaaccacatggccacccgcccaccgggtactgaagtcacatgggcagagttctgccgtagcttcaggaaggcacaagtgccagatggggtcgtggcacaaaagaagagggaatttcgtgcactccatcagggtaacaggacggtgacagagtacctccacgagttcaatcgcctcacgcgatatgcaccagaggatgtccgcaccgacgccgagaagcaggagaagttcatggcgggcctggatgatgagctgaccaaccagctgatatccgggtactacgctgactttgagaggctggttgacaaggcaatccgtcaggaggaccaacgcaacaagatggacaggaagaggaaggccgctcagttcagggcacatcagggaagtcaccagaggccgcgcttcactcccggacagcagggtggacctaccaccatgatcgtccgtcagcaccgcccgttcaaccctagcaacttctaccagggcaccagtgacagtcagaaccaccatggaggtcagcccaaccgcggtgcagctccacgcccaccagtggcatcggcacagtcaggccagcccgcgcaagccaagaaggagacggaagcaaaaccagggtcctgcttcaactgtggcgagcttggccacttcgctgacaaatgcccgaagcctaggcgtgccgggccaaggtttatccaggctcgtgtcaaccacgcatctgcggaggaggcacaagcagcaccagaggttgtactgggtacgtttcctgttaactcaatccctgcaacagtactttttgattctggtgcaacgcattctttcatctcaaagaaatttgtcgggatgcatgggttaataagagaggaacttagcacaccgatgcgggttcataccccagggaatagctccacttcggttcaattcagcccttctataacaatagaaattcaaaggtcaccggttctagccaacctcatccttctcgaatccaaagacctagatgtcattcttgggatggattggctgaccaagtttaagggagtcatcgattgtgcgaatcgcacagtcaccctgaccaacgagaagggagaaaccgtggtgtacaaatctctagtctcgccaaagaaaggagtctcgttgaatcagattgagacggaaatcccagtggacaccgtagagaagaacttgagaaaattggatgatatacccatagtctgcgagtatccagaggtgttccccgaagacctcactaccatgccacccaagagagagattgaattccggattgatttggcaccgggaaccgctccaatctataagagaccgtacagaatggcggccaacgaattaacggaggtcaagaagcaagttgatgaacagctgcagaaagggtacatacgaccaagcacttcaccttggggcgctccggtcatttttgtggagaaaaaggataagacgaagaggatgtgcgtcgattatcgcgcacttaacgaggtcacaatcaagaataaatatcctttgccgcgaatcgacgatttatttgatcaactgaaaggggctaaagtgttttctaagatagacctgcgctcaggctaccaccagttgagaatccgggaagaggatatcccgaagacggccttcaccactcggtacgggttatatgagtgcacggttatgtccttcggacttactaacgcgcctgcattcttcatgaatctgatgaacaaagtgttcatagaatttctggacaagtttgttgtggtattcatcgacgacatacttatctactcaaaatccgaagaagaacatgaacaacatctccgtctggtactcgagaagttgaaggagcaccagctatacgccaagttcagcaagtgtgatttctggttgacggaagtcaaatttctgggtcatgtcattacagctcagggtgtggcagtcgacccatcgaacgtggagtcagttaccaagtggaccccaccgaagactgtgtcgcagattcgaagttttctaggactggcaggttattaccgtcgattcatcggaaacttctccagaatcgcccgacccatgactcagttgcttaagaaagatgagaaatttaaatggacagcggagtgcgataagagctttgaggagctcaagaagaaattagtatccgcaccagttttgattctgcccgaccagatgaaagacttccaagtttattgcgatgcatcccgtcacggacttggatgtgtcctaatgcaagagggcagagtggttgcatatgcctcgcggcagttgcgtccacacgaaggaaattatccaactcatgacttggagttggcagcggtggttcatgctttgaagatctggaggcactatctgatcggcaaccgctgcgaagtatatacggaccataaaagtctgaaatacatcttcacccaaccggacctaaactttcgacaacgaagatggttggagctaatcaaagactatgacatgagtattcactaccacccgggtaaggccaatgtggtggcagacgctttaagccggaaaagttactgcactgctctatgcatcgagagcatgtgtgaggaattgcggcaggagtttgaacatctcaacataggaattgttgaacacgggttcgtagccgctctggaggcacggcctacgctcgtggatcaagtcagagccgctcaagtaaatgatccggaaatagcagaactgaaaaagaacatgagagtcggaaaggctcgggatttccttaaggatgagcatggcacaatctggatgggagaaagattgtgtgtacctgacgacaaggaattgaaggatctgatactcaccgaggctcatcagacccagtactccattcacccaggcagcaccaaaatgtatcaagacctcaaagaaaagttttggtgggtcagcatgaggagagaaatagctgaattcgtcgcactctgcgatgtttgccaacgagtgaaggcagagcaccaaagacccacaggtttactccaacctcttcaaatcccggaatggaaatgggaagaaattggaatggactttataacgggactgccccggacatcgtcgggtcacgattcgatctgagtagtcgtggatcgactcactaaggttgctcacttcataccagtacataccacatatacgggcaaaaggttggcggagctttacctttcgagaatcatgtgcctacatggagtactcaaaaagattgtatctgaccgagggagtcagttcacctcaaaattctggcagaagctgcaggaagaattggggacccgtttaaatttcagcacggcctatcacccgcaaactgatggccagaccgagcgggtcaatcaaatcttggaagatatgttgagagcttgcgctcttgattttggtggagcttgggacaaaagcttgccatatgcggaattctcgtacaacaacagctaccaggccagtctacagatggcaccgtttgaagctttatacggccggaagtgccgcacacctctcttctgggatcagacaggcgaacgtcaactattcggaacagaagtattagcggaagcagaagagaaagtcagaatcatcagggaaaggttgaggattgctcagtctcgacagaagagctacgcggataaccgtcgaagggagctcacttttgaggcaggagatcacgtgtaccttcgcgtcactccgctccggggagtacaccgttttcagacgaaaggcaagttggcaccacgcttcgtgggaccatacaaaatcttggaacgaaggggagaagtggcttatcagctagaacttccatccaacatgatcggcatccatgacgtgttccacgtgtcccaactaaagaagtgcttaagggtacctgaagaacaggctgattcggaacacattgatatccaggaagacctaacttatgttgagaagccggttcgtatactggataccagcgaaaggagaaccagaaacaaggtcacccggttttgccgagttcagtggagtcatcattcggaagaggaagcaacctgggaaagggaagatgagttgaaagccgcccatccgcacctcttcaccagctcctccgaatctcggggccgagattccgtt

SEQ ID NO: 13883 - DNA, 5340 bp, Oryza sativa
  Clone ID: TFbOSC900200j.C1.o17.fg
atggccggtcacccacccaaccaccgcggagaaggcatgatcgacttcgtggcagagctggcacgcatgacactggtggtgggctaccccaatgcgccggagtacacgaccatcccaccgctcagtggcgagcttcctcaccgtgtccgcttggaggtccatggctacgtggggacttgcctcgctaacatggcggttgaggcgtcaggaggcacagcagatcatgcctgtcaggaggcagcctacttgatgatggccaggttacgggagcgccacgactacatcttccacgacacggcgtaccgctaccacccccgtcgagcccatggtgatggcgtcagctccttccgtccgacagctggcgagaacgacaccaccttcggtcacatgtgtgctgtgatgaggggattggaccggatgcactcggacctgcacaaggcgaccaaggccttgaatgatgggaagctcatgaggatcgtcgctctgaaggacgagatagcgcgcctgaagaaagagaatgctcagttgaagggtcttccagcaccaggaggagtccggatccgcactacgccccgtaagaggacgactgcacccgtgcgcatccagcttgcgcccaggaacccacctccagcagcagcagctccggcagttcctccagctccagctccagctccagctccagctccagctcccgctcccgcgttcactctctccttcgctccagcatcagccgccagaggaccagccagtggtaccggaggttgcttgtttgggatggtctacaccaggactggtagccgcgcaacaggcgagggcagcaacggtgaagaacgcgctgatggtgtgcaccccaacagtgagtccggcaatggtccgccaccacttcccgagaatccgacgcttgcccaagttatggcacatcaaactcagatgatggcagccatgatgcagcagatgcagcagcagcaccagcagatgcaccagaggatgatgcagcacgccgaacagcagcatcaacagtttggtccccctccccctcagtccaagttgccggagtttctacgtgtcaggctacccaccttctccagcaccaccaaccctatggaggcaaatgactggctccatgcgatagagaagaagctgaatctcctgcagtgcaatgatcaggagaaggtcgctttcgccacacaccagcttcagggtcctgcgtcagcttggtgggacaaccacatggccacccgcccaccgggtactgaagtcacatgggcagagttctgccgtagcttcaggaaggcacaggtgccagatggggtcgtggcacaaaagaagagggaattccgggcgctccatcagggtaacaggactgtgacagagtacctccatgagttcaatcgcctcgcgcgatatgcaccagaggatgtccgcaccgacgccgagaagcaggagaagttcatggcgggtttggatgatgagctgaccaaccaactgatatctggggactacgttgactttgagaggctggtcgacaaggcaatccgccaggaggatcaacgcaacaagatggacaggaagaggaaggccgctcagttcagggcaccccagggaagtcaccagaggccgcgcttcactcccgggcaacagggtggacctaccaccatgatcgtccgtcagcaccgcccgttcaaccctagcaacttccaccagggcactagtggcagtcagaaccaccatggaagtcagcccaaccgcggtacagctccacgcccaccaatggcaccggcacagtcaggccagcccgcacaagccaagaaggagacgggagcaaaaccagggtcctgcttcaactgtggcgagcttggccacttcgctgacaaatgcccgaagcccaggcgtgccgggccaaggtttatccaggctcgtgtcaaccacgcgtctgcggaggaggcacaagcagcaccagaggtcgtactgggtacgtttcctgttaactcaatccctgcaacagtactttttgattctggtgcaacgcattctttcatctcaaagaaatttgtcgggatgcatgggttaataagagaggaacttagcacaccgatgcgggttcataccccagggaatagctccacttcggttcaattcagcccttctataacaatagaaattcaaaggtcaccatttctagccaacctcattcttctcgaatccaaagacctagatgtcattcttgggatggattggctgaccaagttcaagggagtcatcgattgtgcgagtcgcacagtcaccttgaccaacgagaagggagaaaccgtggtgtacaaatctctagtctcgccaaagaaaggggtctcgttgaatcagattgagacggaaatcccagtggacaccgtagagaagaacttgagaaaattggaagatatacccatagtctgcgagtatccggaagtgtttcctgaagacctcactaccatgccacccaagagagagattgaattccggattgacttggcaccgggaaccgctccaatttacaagagaccatacaggatggcggccaacgaattagcagaggtcaagaagcaagttgatgagcagctgcagaaagggtacatacgaccaagcacttcaccttggggcgctccggtcatttttgtggagaaaaaggataagacgaagaggatgtgcgtcgattatcgcgcacttaacgaggtcacaatcaagaataaatatcctttaccgcgaatcgacgatttatttgatcaactaaaaggagctaaagtgttttctaagatagacctgcgatcaggctaccaccagttgagaatccgggaagaggatattccgaagacggccttcaccactcggtacgggctatatgagtgcacggttatgtctttcggacttaccaacgcacccgcattcttcatgaatctgatgaacaaagtgttcatggaatttctggacaagtttgttgtggtgttcatcgacgacattcttatctattcaaagtccggagaagaacatgaacaacatctccgtctagtactcgagaagttgaaggagcaccagctatacgccaagttcagcaagtgtgacttctggttgacggaagtcaaatttctgggccatgtcattacaactcagggtgtggcagttgacccatcgaacgtggagtcagttaccaaatggaccccacctaagaccgtgtcgcagattcggagttttctaggactggcaggttattaccgccgattcatcgaaaatttctccaggatcgcccgacccatgactcagttgcttaagaaagatgagaagtttaaatggacagctgagtgcgataagagttttgaggagctcaagaagaagttagtatccgcaccagtattgattctgcccgacccgacgaaagacttccaagtctattgtgatgcatcccgtcacggacttggatgtgtcctaatgcaagagggcagagtggttgcgtatgcctcgcggcagttgcgtccacacgaaggaaattatccaactcatgacttggaattggcagcagtggttcatgctttgaagatctggaggcactatctgattggaaaccgctgcgaagtatatacggaccataagagtctgaaatacatcttcacccaaccggatctaaaccttcgacaacgaagatggttggaactaatcaaagactatgacatgagtattcactaccacccgggtaaagccaatgtggtggcagacgctttaagccggaaaagttactgcactgccctatgcatcgagggcatgtgtgaggaattgcggcaggagtttgagcatctcaacgtgggaattgttgaacacgggttcgtagccgctctggaggcacggcctacgctcgtggatcaagttagagccgctcaagtaaatgatccggaaatagcagaactgaaaaagaacatgagagtcggaaaggctcgggatttccacgaagatgagcatggcaccatctggatgggagaaagattgtgtgtacctgacgacaaggaactgaaggatctgatactcaccgaggctcatcatacccagtactccattcatccaggcagcactaaaatgtaccaagaccttaaagaaaaattttggtgggtcagcatgaggagagaaatagctgaattcgtcgcactctgcgatgtttgccaacgagtgaaagcagagcaccaaagaccagcaggtttactccaacctcttcaaatcccggaatggaaatgggaggagattggaatggactttataacaggactgccccggacatcatcgggacatgattcaatctgggtagtcgtggatcgactcaccaaggtggctcactttatacccgtacataccacctatacgggaaagagactggcagaattgtacctcgcaaggatcatgtgtttgcatggggtacccaggaaaatagtatccgaccgaggtagtcagttcacctcaaagttttggcagaaactgcaggaagaattggggacccgtttgaatttcagcacggcctatcacccgcaaactgatggtcagaccgagcgagtcaatcaaatcttggaggatatgttgagagcttgcgctcttgattttggtggagcttgggacaaaagcttgccatacgcggaattctcgtacaacaacagctaccaggccagtctacagatggcaccgtttgaagctttgtacggccggaagtgccgcacacctctcttctgggatcagacaggcgaacgtcaactgttcggaacagaagtattagcggaagcagaagagaaagtcagaatcatcagggaaaggttgagaattgctcagtctcgacagaagagctacgcggataaccgtcgaagggagctcatttttgaggcaggagattacgtgtatcttcgtgtcactccgctccggggagtacaccgttttcagacgaaaggcaagttggcaccacgcttcgtgggaccatacaaaatcttggaacgaaggggagaagttgcttatcagctagaacttccatccaatatgatcggcatccatgacgtgttccacgtgtcccaattaaagaagtgtttaagggtacctgaagaacaggctgattcggagcacattgatatccaagaggacctaacatatgtggagaagccggttcgtatacttgataccagcgaaaggagaaccagaaataaggtcaccaggttttgccgagttcagtggagtcatcattcagaagaggaagcaacctgggaaagggaagatgagttgaaagccgcccatccgcacctcttcaccagctcctccgaatctcggggccgagattccgtttaa

SEQ ID NO: 13884 - DNA, 5115 bp, Oryza sativa
  Clone ID: TFbOSC900232j.C1.o8.fg
atgacgctggtggtgggctaccccaacgcgccagagtacacgacggttccaccgctcagtggcgagcttcctcaccgtgttcgcctggaggtccacggctacgtgggtacctgcctagctaatatggtggttgaggcatccggaggcacagtagatcacgcctgtcaggaggcagcatacctgatgatggccagactacgggagcgccacaactacatcttccacgacacggcgtaccgatttcacccttgtcgagccagcggtgatgatgtcagtactttccgtccgacagctgacgagaactacactacctttggtcacatgtgtactgtgatgaggggattggataggatgcactcggacctgcacaaggcgtccaaggccttgaatgatgggaagctcatgaggatcgtcgctctgaaggacgagatagcgcgcctgaagagggagaatgctcagttaaagggacttcccgcgccaggaggagtccggatccgcactacaccccgcaagacgacgactgcacccgtgcgcatccaacttgcgcccaggaacccacctccgcccgcagctcccgcagcacctccagttccgcccgcagttcctgcagctccagcaccagctccagctcccgttcacatgtccgctcccgcgtccgctctctccttcgctccagcatcagccgccaggggtccagccagtggcaacggaggttgcttgtttgggatggtctacaccaggaatggtagccgcgcaacaggcgagggcagcaacggcgaagagcgcactgagggtgtgcatcccaacagcaattccggcaatgttccgccaccacttcccgagaatccgacgctagcccaagtgatggcacatcagactcagatgatggcagccatgatgcaacagatgcagcagcagcaccagcagatgtaccagaggatgttgcagcacgccgaacagcagcaccagcagtttggtccccctccccctcagtccaagttgccagagtttctacgtgtcaggccacccaccttctccagcaccaccaaccctatggaggcgaatgactggctccatgccatagagaagaagctgaatctcctgcagtgcaatgatcaggagaaggttgctttcaccacacaccagcttcaaggtcctgcgtcagcttggtgggataatcacatggccacccgcccaccaggtactgaagtcacttgggcagagttctgccgtagcttcaggaaggcgcaggtgccagacggggtcgtggcacaaaagaagagggaatttcgggcactccatcaaggcaacaggactgtgacggagtatctccatgagttcaatcgcctcgcgcgatatgcacccgaggatgtccgtaccgacgccgagaagcaggaaaggttcatggcaggtctggatgatgagctgaccaaccaactgatatctggggactacgccgactttgagaggctagttgacaaggcaatccgtcaggaggatcaacgcaacaagatggacaggaagaggaaggccgctcagttcagggcacctcagggaagtcaccagaggccgcgcttcgctcccgggcagcagggtggacctaccaccatgatcgttcgccagtaccgcccgttccaccctagcaactttccccagggcgccagtggcagtcagaaccaccatggaggtcagcccaaccgcggtgcagctccacgcccaccaatggcaccggcacagtccggcccgtccgcgcaagccaggaaggagactggagcaaaaccagggtcttgcttcaactgtggcgagcttggccacttcgccgacaaatgcccgaagcctaggcgtgccgggccaaggtttatccaggctcgtgtcaaccacgcatctgcggaggaggcacaagcagcaccagaggttgtactgggtacgtttcctgttaactcaatccctacaacagtactttttgattctggtgcaacgcattcgttcatttcaaagaagtttgtcgggatgcatgggttaataagagaggaacttagcacaccaatgcggctgaccaagtttaagggagtcatcgattgtgtgaatcgcacagtcaccctgaccaacgagaagggagaaacggtagtgtacaaatcaccaaactcaccaaagcaaggggtctccttgaatcagattgaagcggaaatcccagtggtcaccatggagaagaatttgaggaaattggaagatatccccatagtctacgagtatccagaagtgttccccgaagacctcactaccatgccacccaagagagagattgaattccggattaacttggcaccgggaaccgctccaatttacaagagaccgtacagaatggcggccaacgaactagcagaggtcaagaagcaggttgatgagcagctgcagaaagggtacattcgaccaagtacttcaccttggggtgctccagtcatttttgtggagaaaaaggataagacgaagaggatgtgcgttgattatcgcgcactcaacgaggtcacaatcaagaacaaatatcctttgccacgaatcgatgatttgtttgatcaactgaaaggagctaaagtgttttctaagatagacctgcgatcagcctaccaccagttgataatccgggaagaggatattccaaagacggccttcaccactcggtacgggctatatgagtgcacggttatgtctttcggacttactaacgcacctgcattcttcatgaatctgatgaacaaagtgttcatggaatttctggacaagcttgttgtggtattcatcgacgacatacttatctattcaaagtccgaagaagaacatgagcaacatctccgtctgttcagcaagtgtgacttctggttaacggaagtcaaatttctgggccatgtcattacagctcaaggtgtggcagttgatccatcgaacgtggagtcagttaccaaatggaccccaccgaagaccgtgtcgcagattcaaagttttcttggacttgcgggatattaccgccgattcatcgaaaacttctccaggatcgcccgacccatgactcagttgcttaagaaagatgagaagtttaaatggacagctgagtgcgataagagttttgaggagctcaaaaagaaattagtatccgcaccagttttgattctgcccgatcagatgaaagacttccaagtctattgcgatgcatcccgccacggacttggatgtgtcctaatgcaagagggcagggtggttgcgtatgcctcgcggcagttgcgtccacacgaagggaattatccaactcatgacctggaattggcagcagtggttcatgctttgaagatctggaggcactatctgattggcaaccgctgcgaagtatatacggaccataagaatctgaaatacatcttcacccaaccggacctaaatctccgacaacgaagatggttggaactaatcaaagattataacatgagcattcactaccacccgggtaaagccaatgtggtggcagacgcattaagcaggaaaagtcactgcactgccctgtgcatcgagggcatgtgtgaggaattgcggcaggactttgagcatctcaacatgggaattgttgaatacgggttcgtagccgctctggaggcacggcctacgctcgtggataaagtcagagtagctcaagtaaatgattctgaaatagcagagctgaaaaagaacatgagagtcggaaaagcccgggatttccacgaagatgagcatggcacaatctggttgggagaaagattgtgtgtacctgacgacaaggaactgaaggatctgatactcaccgaggctcatcagacccagtactccatccatccaggcagcaccaaaatgtatcaagacctcaaagaaaagttttggtgggtcagcatgaggagagaaatagctgaattcgtcgcactctgcgatgtttgccaacgagtgaaggcagagcaccaaagaccagcaggtttactccaacctcttcaaatcccggaatggaaatgggaggagattggaatggactttataataggactgccctggacatcatcgggtcacgattcaatctggatagtcatggatcgactcactaaggttgctcacttcataccagtacataccacgtatacgggcaaaaggttggcggagctctacctctcgagaatcatgtgtctacatagagtacccaaaaagattgtatctaaccgagggagtcagttcacctcaaaattctggcagaagctgcaggaagaattggggacccgtttaaatttcagcacggcctatcacccgcaaactgatggtcaaaccgagcgagtcaatcaaatcttggaagatatattgagagcttgcgctcttgattttggtggagcttgggacaaaagcttgccatatgcggaattctcgtacaacaacagctaccaggccagtctacagatggcaccgtttgaagctttatacggccggaagtgccgcacacccctcttctgggatcagacaggcgagcgtcaactgttcgggacagaggtattagcggaagcagaagagaaagtcagaatcatcaaggaaaggttgaggattgcccagtctcgacagaagagctacgcggataaccgtcgaagggagctcacttttgaggcaggggattacgtgtatcttcgtgtcactccgctccggggagtacaccgctttcagacgaaaggcaagttggtaccacgcttcgtgggaccatacaaaatcctggaacgaaggggggaagttgcttatcagttagaacttccatccaatatgatcggcatccatgacgtgttccacgtgtcccaattaaagaagtgcttaagggtacctgaagaacaggctgattcggaacacattgatttccaggaggacctaacatacgtggagaagccggttcatatacttgataccagcgaaagaagaaccagaaacaaggtcaccaggttttgccgagttcagtggagtcatcattcagaagaggaagcaacctgggaaagggaggatgagttgaaagccgcccatccgcacctcttcgccagctcctccgaatctcggggccaagattccgtttaa

SEQ ID NO: 13885 - DNA, 2844 bp, Oryza sativa
  Clone ID: TFbOSC900293j.C1.o13.gm
atggtctacaccaggactggcacccgcacgataggcgagggcagcaacggcgaagaacgcactgatggtgtgcaccccagcagtgattccggcaatggtccgccaccacttcccgagaatccgacccttgcccaagttatggcacatcagactcagatgatggcagccatgatgcagcagatgcagcagcagcaccagcagatgcaccagaggatgatgcagcacgccgaacagcagcaccagcagtttggtccccctccccctcagtccaagttgcctgagttcctacgtgtcaggccacccaccttctccagcaccaccaaccctatggaggcaaatgactggctccatgcaatagagaagaagctgaatctcctgcagtgcaatgatcaggagaaggtcgcttttgccacacaccagcttcaaggtcctgcgtcggcttggtgggacaatcacatggccacccgcccaccgggtactgaagtcacatgggcagagttttgtcgtagcttcaggaaggcacaggtgccagatggggtcgtggcacaaaagaagagggaatttcgtgcactccatcagggcaataggactgtgacagagtacctccacgagttcaatcgcctcgcgcgatatgcaccagaggatgttcgcaccgacgccgagaagcaggaaaagttcatggcaggtctggatgacgagctgaccaaccaactgatatctggggactacgccgactttgagaggctagttgacaaggcaattcatcaggaggaccaacgcaacaagatggacaggaagaggaaggccgcacagttcagggcacctcagggaagtcaccagaggccgcgcttcactcccgggcagcagggtggacctaccaccatgatcgtccgccagtaccgcccgttcaatcctagcaactttcctcagggcgccagtggcagtcagaaccaccatggaggtcagcccaaccgcggtgcagctccacgcccaccaatggcaccggcacagtcaggcccgtccgcgcaagccaggaaggagactggagcaaaaccagggtcctgcttcaactgtggcgagcttggccacttcgctgacaaatgcccgaagcccaggcgtgccgggccaaggtttatccaggctcgtgtcaaccacgcatctgcggaggaggcacaagcagcaccagaggttgtactggtcaccctgaccaacgagaagggagaaaccgtggcgtacaaatcactagtctcaccaaagcaaggggtctctttgaatcagattgaagcagaaatcccagtggacaccgtggagaagaacttggggaaaatggaagatatacccatagtctgcgagtatccggaagtgttccccgaagacctcactaccatgccacccaagagagagattgaattccggattgacttggcaccgggaaccgccccaatttacaagagaccgtacagaatggcggccaacgaactagcagaggtcaagaagcaggttgatgagcagctgcagaaagggtacattcgaccaagtacttcaccttggggtgctccggtcatttttgtggagaaaaaggataagacgaagaggatgtgcgttgattatcgcgcactcaacgaggtcacaatcaagaacaaatatcccttgccgcgaatcgacgatttatttgatcaactgaaaggagctaaagtgttttctaagatagacctgcgatcaggctaccaccagttgagaattcgggaagaggatattccgaagacggccttcaccactcggtacgggctatatgagtgcacggttatgtccttcggacttactaacgcacctgcattcttcatgaatctgatgaacaaagtgttcatggaatttctggacaagtttgttgtggtgttcatcgacgacattcttatctattcaaagtccgaagaagaacatgaacaacatctccgtctagtactcgagaagttgaaggagcaccagctatacgccaagttcagcaagtgcgacttctggttgacggaggtcaaatttctgggccatgtcattacagcccagggtgtggcagttgatccgtcgaacgtagagtcagtcaccaagtggaccccaccgaagaccgtgtcgcagattcgaagttttctaggactggcagttggacaaccggacaccccggccgacccaactccatcacgcccaccctcgccaccggcgggccccacacgtcagcgggtcaagggtatcggtccaccgtggaccgggaccacggggtggtccaccgccggtccacgggaaccgacggcccagatcagcccaaagccgatcgggcggctgaggagggcggtggccgggcacgggcacagccggggctggcccgaccgaccacagagggcggcggcgcgcagacggccggacaaccggcggcggcggcggcgcaacgcggcgctggcacgggaggcggccggcaaagaggaaaaggaggagggaggcggctcaccgagaggcgcggcgacggagggaacggccgcggagggaggcggcggcgctccttgggtcgacgacgcggagggacgcacggcggtggatggcgagggcgaggaggcagacgaggtgcaacacacgacgacgaagccgacaaaggtgacggcaagcggcgaccgcggctatggcggtgatgattgccggccggaaacggtgaatggatgtggtggctcggcggtggacgacgtgcggcgtggagtggggatgccgacggcatgggttgcgcggcgcggcggtggcgctagcagcgacgaggtgcggctggaggcgacgaatgggtcggcggcctcgggtgcacggtga

SEQ ID NO: 13886 - DNA, 6678 bp, Oryza sativa
  Clone ID: TFbOSC900327j.C1.o24.fg
atggtcgaggtcctggaggaggaggaggcggtggcgttcacccccactccatctgggagtggggattctagcgagagccgtggccctcgtcaccaccgccgcgactctccaactcctccccgccacgaaccctcgcggagggaggatcccacccgttcaggtggttcggccctctccccgcccctgggcgaagagaggccacgacgcgtcggggcacggcgccgcctcacttacggtgatggcggctcaccccgaggcacgcttcaggcggcgggcgcccttctgcggcatccccccgtgaactcggagccggagacccctgttcagcgctggctagacgacgtggccaacttggtcaccactgcccagcggcaattggccgcgggcggccgacccgccgccaccggtatgtcgcgtacccccgttaccctctcctcgtcagcaaggaggagggcccgtcagtcggccatggcctcaaggcggtccacggctccaacgtcgtcgggagcctcgggaagccggaggcgtcatgacggtctctacggggagcaggacgctcagatcaatatcgagcgacgccgggacgagcgtcgagctgcccgcatgggggaaggttcctcctcatctagagtgccaggttcctcctcacgaggcggccctccccccacgctcacccctggaggaacgggttgtagggccttcgtggcgagtctccagaatgtccggtggcccctaaagtttcgccccaacctcacggagaaagaagctcgcctccaaggagcccaagaccaccgccgagctcttcaagttggcggacaaggtggctcggaaggaggaggcgtggggaactctccagacaccggtgcggcggccgcggctacccccgagtctgccccccgctctaagcggcgagataggagaggcaaaaggaaaccgggccgctccgatgacgagggccatgtccttgcggctgatgggcccgcacgggcaccgcgcaagggaaaggccaccagcgacaagccgagctccactgctccatccggtgagggccggtcggcagacaagtggtgctcggtgcacaacacttatcgacacagtctcgccgactgccgctcggtcaagaatttggccgagcggttccgaaaggctgatcaggagaagcggcagggtcgacgggagggcaaagcccccgcaacctcagccggtgaccagcgggaggaggccaagaacaaggcccccgccgatgatggcggtgatagtgaggatctggatttccaggtacctcagggaaccgtcgccacactcgatgggggggcttacgctcacacctctcgccgaggcttcaaggccatgaggcgagagcttctggccgctgttccaacgcacgaggtggctcgaaaggcacgctggtcggagaaaatggataggaagaggaaggtggcgcagttccggtccaaccaagggagccaccagcgaccgcgcttcactcccggacagcagggtggacctaccaccctaatcgtccgccagcaacgccctttcaatgccaacaacttccatcagggcgccagtggcagccagaaccaccatggcggtcagcccaaccgcagtgcagctccacgcccaccaatggcaccagcacagacagctccgtccgcgcaagccaagaaggagactgggacaaagccagggtcctgcttcaactgtggcgagcttggccacttcgctgacaaatgcccgaagcctaggcgtgccgggccaaggttcgtccaggctcgtgtcaaccacgcgtctgcagaggaggcacaagcagcaccagaggtcgtactgggtacgtttcttgttaactcaatccctgcaacagtactttttgattctggtgcaacgcattcgttcatttcaaagaagtttgtcgggatgcatgggttaataagaggggaacttagcacaccaatgcgggttcataccccagggaatagctccacttcggtacaattcagcccttctataacaatagaaatccaaagatcaccatttctagccaacctcattcttctggaatccaaagacctagatgtcattcttgggatggattggctgaccaagttcaagggagtcattgactgtgcgaatcgcacagtcaccttgaccaacgagaagggagaaacagtagtgtacaaatcaccaatctcaccaaagcaaggggtctctttgaatcagattgaggtggaaatcccagtggtcaccgaggagaagaattcgaggaaattggaagagattcccatagtctgcgagtacccagaagtgtttcccgaagacctcactaccatgccacccaagagagagattgaattccggattgacttggcactgggaaccgctccaatttacaagagaccgtacagaatggcagccaacgagctagcagaggttaagaagcagggtgcaccggtcatttttgtggagaaaaaggataagacgaagaggatgtgcatcgactatcgcgcactcaacgaggtcacaatcaagaacaaatatcctttaccgcggatcgatgatttgtttgatcaactgaaaggagctaaagtgttttctaagatagacctactatcaggctaccaccagttgagaattcgggaagaggatattccaaagacagccttcaccactcggtacgggctatatgagtgcacggttatgtctttcggacttaccaacgcacctgcattcttcatgaatctgatgaacaatgtgttcatggaatttctcgacaagtttgttgtggtgttcatcgacgacatacttatctattcaaagttcgaagaagaacatgagctacatctccgtctgttactcgagaagttgaaggagcaccagttatacgccaagttcagcaagtgtgacttctggttgtctgaagtcaaatttctaggtcacgttattgcagctcaaggtgtggcagttgatccatcgaatgtggagtcagttaccaagtggaccccacctaagaccgtgtcgcaaattcgtagttttcttggacttgtgggttattaccgccgattcatcgaaaacttctccaggatcgcccgacccatgactcagttgcttaagaaagatgagaagattaaatggacagctgagtgtgacaagagttttgaggagctcaagaagaaattagtatccaccccagttctgattctgcccgaccagatgaaagacttccaagtctattgcgacgcatcccaccacgggcttagatgtgttctaatgcaagagggcagagtggtcgcatatgcctcgtggcagttgcgtccacatgaagggaattatccaactcatgacctggaattggcagtagtggcacgacctacgctcgtggatcaagtcagagccgctcaagcaaatgatcctgaaatagcaaagctgaaaaagaacatgagagtcggaaaagcccgggatttccacgaagatgaacacggcacaatctggttgggagaaagattgtgtgtacctgacgacaaggaactgaaggatctgatactcatcgaggctcatcagactcagtactccattcatccaggcagcaccaaaatgtatcaagacctcaaagaaaagttttggtgggttagcatgagaagggaaatagctgaattcgtcgcactctgcgacgtttgccaacgagtgaaggcagagcaccaaaggccagcaagtttactccaacctcttcaaatcccggaatggaaatgggaggagattggaatggactttataacaggactgccccgaacatcatcgggtcacgattcaatctgggtagtcgtggatcgactcactaaggttgctcacttcataccagtacataccacatatacgggcaaaaggttggcagagctctacttctcgagaatcatgtgtctacatggagtacccaaaaagatagtatctgatcgagggagccaattcacttcaaagttctggcagaaattgcaagaggaattgggaacccggttgaatttcagcacagcctaccatccgcagaccgatggtcagaccgaacgagtcaatcaaatattggaggacatgttaagggcctgcgcacttgattttggtggagcttgggacaaaagcttgccccgccttcgatgcgctcaaggccccggggatgaagctccagtcgtcgctgctgatcattggcgtgactccgagacacacgtcgagctcccggtaacattcggtgactccaccaacttccgcaccgagcgaatcgacttcgatgtggcggacctcaatctgccctacaacgcggtcctgggcagacctacgttagtgaagttcatggccaccaaccactacgcctacctccagatgaagatgccaggccctgctgttcccatcaccgtctttggcgatgtcaaagtcgccctcgcctgcgcggagcaacgcgccgacaacctggcagtggccacggagccgcaggccccggaggccaccgcgtcccgtgcctccaagaagcgcctcacctcggctaatgaggaaagcgcactcgtctccttcctgcgggcaaattctaacgtcttcacatggaagccatcggacatgcccggggtccccagggaggtgatcgagcactgcctcgccgtgcggccggatgcgcgacccatccggcaaaaagtgcgacatcaagccccagagcgacaggccttcatccgagaggaagtggtgcggctcttggaggctgacttcatctgcgaggttatccatccggagtggctggcgaacccggtggtcgtcccgaaggccaacggcaagctccggatgtgcatcgactacacggacctcaacaaggcatgccctaaagatcccttccctctaccatgcatagatcagatagtcgactccactgtggggtgcgaccttttgtgttttctagatgcctactctgggtatcaccagatccgcatggctagggaagatgaggaaaaacctaccttcattactcctgtgggcaccttttgttatacaactatgccttttgggttaaagaatgcaggtcctacttttcagcgcatgactcgtattactttgagtaatcagatagggcgcaatgtagaggcgtatgtcgatgacctggtggtgcagcggcccgtctactttgtcagcgaggcactccgagatgcgaagacccgatacccacaggcccagaaaatgctttatgcagttttaatggcctcaaggaaattacgccactatttccaagcgcatcgggtttccgtagtgacatcctaccctctcggccaaatcctgcacaaccaagagggcactggtcgggttgtaaagtgggccatcgagctggctgagttcgacctgcacttcaaaccacgacacgcgatcaaaagccaggtcctagctaacttcatcgcggagtggaccccagtggacgaacctgttccacccaacgtctccttcctccccagagatgtaaaggacccaaacgccgacattcatggcgggcactgggttatgcatttcgacggctccctcaaccttcaaggtgcaggcgccagagtcacgctgacatcgccaagcggggacgtcctcaagtatgtcatttggctcgacttccgagccacgaacaacatggcggaatacgaaggactcctcgcgggattgagggcggtggccagaatgggcatccaccgtctcctggtcctaggtgactcccagctggtcgtgaatcaagtatccaaagagtaccagtgcaccgacccacaaatggacgcatatgtccgcgaagtgcggcgcatggaacatcacatcgacagactcgagctccggcacgtgccccgacgcgacaacacagtcgctgatgagttgtcgcgtgttgcatcggcacgagccccactccccccggggaccttcgaggaaagactcgcgcagccatcggcgcgaccgaacccctcgagggaccccgacgacacgccctctgccccgacccttggcgactcgcggccctcggggcccgagggggtcgaccccgacccccctcatcaggtcgtttggatgactgacatccgggcgtatctcgacggcaatactcttcctgaggatcgcgcagaagctgagaagctcgcgcgcatctccaagcggtacgtcctcatagaagggaccctctaccggcgtgccgccaacgggatactcttgaagtgtgtttctcgagagcaaggcatcgagctcatagccgacacccatcaggacatccttggaccattcaagacggctcgaggcgggtatcagcacctatacgttgccatcgacaagttcaccaagtggcccgaagcttacccggtcgtcaagatcgacaagcattccgccctcaagttcatcaggggcatcacatcccgattcggagtgcccaaccgcatcattacagataacggcacccagttcaccagtgagctatttgacaactattgcgacgacatgggcatcaaattgtgctttgcctcgcccgcccaccccaggagcaacggccaagtcgagcgagccaacgccgaaatcctcaaaggcctcaagaccaagacgtacaatgtcctgaagaaacacggggattcgtggctcgaggaattgcccgccgtgttgtgggcaaatcgcaccactccaagccgcgcaacggggtaa

SEQ ID NO: 13887 - DNA, 3000 bp, Oryza sativa
  Clone ID: TFbOSC900370j.C1.o19.fg
atggtctacaccaggaatggcacccgcacgacaagcgagggcagcaacggcgaagaacgcgctgatggtgtgcaccccaacagtgattccggcaatggtccgccaccatttcccgagaatctgacgctggcccaagtaatggcacatcagactcagatgatggcagccatgatgcagcagatgcagcagcagcaccagcagatgcaccagaggatgctgcagcacgccgaacagcagcaccagcagtttggtccccctcctcctcagtccaagctgcccgagtttctacgcgtcaggccacccaccttctccagcaccaccaaccccatggaggcgaatgactggctccatgccatagagaagaagctgaatctcctgcagtgcaatgatcaggagaaggtcgctttcgccacacaccagcttcaaggtcctgcgtcagcttggtgggacaatcacgtggccacccgcccgccaggcactgaagtcacttgggcggagttctgtcgtagcttcaggaaggcgcaggtgccagacggggtcgtggcacaaaagaagaggggattccgggcactccatcagggcaacaggacagtgacagagtacctccatgagttcaatcgcctcgcgcgatatgcaccggaggatgtctgcaccgacgccgagaagcaggagaaattcctagcaggcctggatgatgagctaaccaaccagctgatatctggagactatgccgactttgaaaggttggttgacaaggcaatccgtcaggaggatcagcgcaacaaaatggacaggaagagaaaggcggcacagttccggtccaaccaaggaaaccatcagcgaccgcgcttcactctcggacagcagggtggacctaccaccatgatcgtccgccagcaccgcacgttcaagtctagcaacttccaccagggcgccagtggcagtcagaaccaccatggaggtcagcctaaccacggtgcagctccacacccaccagtggcaccagcacagtcaggcccgtccgcgcaagccaaggagactggagcaaagccagggtcctgcttcaactgtggtgagcttggccacttcgccgacaaatgcccgaagcctaggcgtgccgggtcaaagtttgtccaggctcgtgtcaaccacgcgtctgcaaaggaggcgcaagcagcaccagaggtcgtactgggtacgtttcctgttaactcaatccctgcaacagtactttttgattctggtgcaacgcattcgttcatttcaaagaagtttgtcaggatgcatgggttaataagagaggaacttagcacaccaatgcgggttcataccccagggaatagctccacttcggtacaattcagcccttctataacaatagaaattcaaagatcaccatttctagccaacatcattcttcttgattccaaagacctagatgtcattcttgggatggattggctgaccaagtttaagggagtcattgattgtgcgaatcgcacagtcaccttgactaacgagaagggagaaacaatagtgtataaatcactagtctcaccaaagcaaggggtctccttgaatcagattgaggcggaaaccccagtggtcaccgaggggatgaattcgaggaaattggaagaaattcccatagtctgcgagtacccagaagtgtttcccaaagacctcaccaccatgccacccaagagagagattgaattccggattgatttggccccgggaaccgccccaatctacaagagaccgtataggatggcagccaatgaactagccgaggtcaagaaacaggttgatgagcagctgcagaaagggtacatacgaccaagtacctcaccttggggtgctccggtcatttttgtggagaaaaaggataagacgaagaggatgtgcgtcgattatcgcgcactcaacgaggtcacaatcaagaataaataccctttaccacgaatcgatgacttgtttgaccaactgaagggagctaaggtgttctctaagatagacctgcgatcaggctatcaccagttaagaattcgggaagaagatattccaaagacggctttcaccacccggtacgggctgcatgagtgcacggttatgtctttcggacttaccaacgcacccgcattcttcatgaatctgatgaacaaagtgttcatggaatttctcgacaagtttgtggtggttttcatcgacgacatacttatctattcaaagtctgaagaagaacatgagcagcatctccgtctggtactcgagaagttgaaggagcaccaattatacgccaagttcagcaagtgtgacttctggttgacggaagtcaaatttctgggccatgttagacttctgggcatggcagttgatccatcgaacgtggagtcagttaccaaatggaccccaccgaagaccgtgtcgcagattcgaagttttcttagactggcgggttattaccgccaattcatcgaaaacttctccaggatcgctcgacccatgactcagttgcttaagaaagatgaaaagtttaaatggacagctgagtgcgataagagctttgaggagctcaaaaagaaattagtatccgccccagttctgattctgcccgaccagatgaaagatttccagatctggaggcactatctgattggcaaccgctgtgaagtatatacggatcataagagtctgaaatacatcttcacccaaccggatctaaatctccgacaacgaagatggttggaactaatcaaagactatgacatgagcattcactaccacccggggaaagccaatgtggtggcagacgcattaagcaggaaaagttactgcactgctctatgcatcgagggcatgtgtgaggaattgcagcaagagtttaagcggctcaacgtgggaattgttgaacacgggttcatagctgttggcggatggcatgagtcccttcgaccgaatctgccgaaacccatggcgaagaccacgagccaaggatga

SEQ ID NO: 13888 - DNA, 4818 bp, Oryza sativa
  Clone ID: TFbOSC900376j.C1.o14.fg
atggccggtcacccacccaaccaccgcggagaaggcatgatcgactttgtggcagagctggcacgcatgacactggtggtgggctaccccaacgcgccggagtacacgaccattccgccgctcagtggcgagcttcctcaccgtgtccgcttggaggtccatggctacgtggggacttgccttgctaacatggcggttgaggcgtcagggggcacagcagatcacgcttgtcaggaggcagcctacttgatgatggccagactacgggagcgccacgactacatcttccacgacacggcgtaccgctaccacccccgtcgagcccatggtgatggcgtcagctccttccgtccgacagctggcgagaacgacaccacctttggtcacatgtgtgctgtgatgaggggattggacaggatgcactcggacctgcacaaggcgaccaaggccttgaacgatgggaagctcatgaggatcgtcgctctgaaggacgagatagcgcgcctgaagaaggagaacgctcagctaaagggtcttccagcgccaggaggagtccggatccgcaccacgccccgcaagacgacgactgcacctgtgcgcatccagcttgcgcccaggaacccacctccaccagcagctcccgcagcaccttcagttccgcccgcagttcctgcagctccagttccagctcccgcgttcactctctccttcgctccagcatcagccgccagaggttcagccagtggtaccggaggctgcttgtttgggatggtctacaccaggactggcaaccgcacgacaggcgagggcagcaacggcgaagaacgcgtggatggtgtgcaccccaacagtgattctggcaatggtccgccaccacttcccgagaatccgacgcttgcccaagttatggcacatcagactcagatgatggcagccatgatgcagcagatgcagcagcagcaccagcagatgcaccaaaggatgatgcagcacgccgaacagcagcaccagcagtttggtccccctccccctcagtccaagttgccagagtttctacgcgtcaggccacccaccttctccagcaccaccaaccccatggaggcgaacgactggctccatgccatagagaagaagctgaatctcctgcagtgcaatgatcaggagaaggtcgctttcgccacacaccagcttcagggtcccgcgtcagcttggtgggacaaccacatggccacccgcccaccgggtactgaagtcacatgggcagagttctgccgtagcttcaggaaggcacaggtgccagatggggtcgtggcacaaaagaagagggaattccgggcgctccatcagggcaaccggactgtgacagagtacctccacgagttcaatcgcctcgcgcgatatgcaccagaggatgtccgcaccgacgccgagaagcaggagaagttcatggcgggtttggatgatgagctgaccaaccaactgatatctggggactacgctgactttgagaggctggtcgacaaggcaatccgccaggaggatcaacgcaacaagatggacaggaagaggaaggccgctcagttcagggcacctcagggaagtcaccagaggccgcgcttcactcccgggcagcagggtggacctaccaccatgatcgtccgtcagcaccgcccgttcaaccctagcaacttccaccagggcactagtggcagtcagaaccaccatggaagtcagcccaaccgcggtacagctccacgcccaccaatggcaccggcacagtcaggccagcccgcgcaagccaagaaggagactggagcaaaaccagggtcctgcttcaactgtggcgagcttggtcacttcgctgacaaatgcccgaagcccaggcgtgccgggccaaggtttatccaggctcgtgtcaaccacgcgtctgcagaggaggcacaaacagcaccggaggtcgtactgggtacgttccctgttaacttaatccctgcaacagtacttttcgattctggtgcaacgcattctttcatttcaaagaaatttgtggggaggtatgggttaaggaaagaagagcttagcacaccaatgagggttcataccccgggaaatagttcaacctcagtcagttttagcccctcagtgctaatagaaatccaaagatcaccatttctagccaacctcattcttcttgaatccaaagacctagatgtcattcttgggatggattggctgactaagttcaagggagtcattgattgtgcgaatcgcacagtcaccttgaccaacgagaagggagaaacagtggtgtacaaatctctagtctcaccaaagcaaggggtctccttgaaccaggtcgagatggaagttccagtggacaccgtagagaagaacttgaggaaattggaagatatacccatagtctgcgagtatccagaagtgttccccgaagacctcactaccatgccacccaagagagagattgaattccggattgacttggcaccgggaaccgctccaatctataagagaccatacagaatggcggccaacgaattagcagaggtcaagaagcaagttgatgagcagctgcagaaagggtacatacgaccaagcacttcaccttggggcgctccggtcatttttgtggagaaaaaggataagacgaagaggatgtgcgttgattatcgcgcactcaacgaggtcacaatcaagaataaatatcctttgccgcgaatcgacgatttatttgatcaactgaaaggagctaaagtattttctaagatagacctgcgatcaggctaccaccagctgagaatccgggaagaggatattccgaagacggccttcaccactcggtacgggctatatgagtgcacggttatgtctttcggacttaccaacgcacccgcattcttcatgaatctgatgaacaaagtgttcatggaatttctggacaagtttgttgtggtattcatcgacgacatacttatctactcaaaatccgaggaagaacatgagcaacatctccgtctggtactcgaaaagttgaaggagcaccagctatacgccaagttcagcaagtgtgacttctggttgacggaagtcaaatttctgggtcatgtcattacagctcagggtgtggcagtcgacccatcgaacgtggagtcagttaccaaatggaccccacctaagaccgtgtcgcagattcggagttttcttggacttgcgggttattaccgccgattcatcgaaaatttctccaggatcgcccgacccatgactcagttgcttaagaaggatgagaagtttaaatggacagctgagtgcgataagagctttgaggagctcaagaagaaattagtatccgcaccggttttgatcctgcccgaccagatgaaagacttccaagtctattgtgatgcatcccgtcacggacttggatgtgtcctaatgcaagagggcagagtggttgcatatgcctcgcggcagttgcgtccacacgaaggaaattatccaactcatgacttggaattggcagcagtggttcatgctttgaagatctggaggcactatctgattggcaaccgctgcgaagtatatacggaccataagagtctgaaatacatcttcacccaaccggacctaaatctccgacaacgaagatggttggaactaatcaaagactatgacatgagtattcactaccacccgggtaaagccaatgtggtggcagacgctttaagccggaaaagttactgcactgccctatgcatcgagggcatgtgtgaggaattgcggcaggagtttgaacatctcaacatgggaattgttgaacacgggtttgtagccgctctggaggcacggcccactctcgtggatcaagtcagagcagctcaagtaaatgattctgagatagcagagctgaaaaagaatatgagagtcggaaaagcccgggatttccacgaagatgagcatggcacaatctggatgggagaaagattgtgtgtacctgacgacaaggaactgaaggatctgatactcaccgaggctcatcagacccagtactccattcatccaggcagcactaaaatgtatcaagacctcaaagaaaaattttggtgggtcagcatgaggagagaaatagctgaattcgtcgcactctgcgatgtttgccaacgagtgaaggcagagcaccaaagaccagcaggtttactccaacctcttcaaatcccggaatggaaatgggaggagattggaatggactttataacaggactgccccggacatcatcgggtcacgattcaatctgggtagtcgtggatcgactcaccaaggtggctcactttataccagtacataccacctatacgggaaagagattggcagaattgtacctcgcaaagatcatgtgtttgcatggggtacccaggaagatagtatccgaccgaggtagtcagttcacctcaaagttttggcagaaactgcaggaagaattggggacccgtttaaacttcagcacggcttatcacccgcaaactgatggtcagaccgagcgagtcaatcaaatcttggaagatatgttgagagcttgcgctcttgattttggtggagcttgggacaaaagcttgccatatgcggaattctcgtacaacaacagctaccaggccagtctacagatggcaccgtttgaagctttatacggccggaagtgccgcacacctctcttctgggatcagacaggcgaacgtcaactgttcggaacagaagtattagcggaagcagaagagaaagtcaaatcatcagggaaaggttga

SEQ ID NO: 13889 - DNA, 5283 bp, Oryza sativa
  Clone ID: TFbOSC900391j.C1.o17.fg
atgggttgcaagatggccggccacccacccaaccaccgcggagaaggcatgattgactttgtggcagagttggcacgtatgacgctggtggtgggctaccccaacgcgccagagtacacgactgttccaccactcagtggcaagcttcctcaccgtgttcgcctggaggtccacggctacgtgggtacctgcctagctaatatggtggttgaggcatccggaggcacagcagatcacgcctgtcaggaggcagcatacctgatgatggccagactacgggagcgccacaactttatcttccacgacacggcgtaccgatttcacccttgtcgagccagcggtgatgatgtcagtactttccgttcgacagccggcgagaacgacaccacctttggtcacatgtgtgctatgatgaggggattggataggatgcactcggacctgcacaaggcgtccaaggccttgaatgatgggaagctcatgaggatcgtcgctctgaaggacgagatagcgcgcctgaagaaggagaatgctcagttaaagggtcttcccgcgccaggaggagtccggatccgcactacgccccgcaagacgacgactgcacccgtgcgcatccagcttgcgcccaggaacccacctccatcagcagctcccgcagcacctccagttccgcccgcagctccggtagttcctgcagctccagtaccagctccagctcccgttcacgtgtcagctcccgcgtccgctctctccttcgctccagcatcagccgccaggggtccagccagtggcaacggaggttgcttgcttgggatggtttacaccaagaatggtagccgcgcaacaggcgagggcagcaacggcgaagagcgcactaatggggtgcatccccacagcgattccggcaatggtccgccaccacttcccgagaatccgacgctaccccaagtgatggcacatcagactcagatgatggcatccatgatgcagcagatgcagcagcagcaccagcagatgcaccagcggatgctgcagcacgccgaacagcagcatcagcagtttggtccccctccccctcagtccaagttgccagagtttctacgtgtcaggccacccaccttctccaacaccaccaaccctatggaggcgaatgactggctccatgccatagagaaaaagctgaatctcctgcagtgcaatgatcaggagaaggttgctttcgccacacaccagcttcaaggtcctgcgtcagcttggtgggacaatcacatggccacccgcccaccaggtactgaagtcacttgggcagagttctgccgtagcttcaggaaggcgcaggtgccagacggggtcgtggcacaaaagaagagggaatttcgggcactccatcagggcaacaggactgtgacggagtatctccatgagttcaatcgcctcacgcgatatgcaccagaggatgtccgcaccgacgccgagaagcaggaaaagttcatggcaggtctggatgacgagctgaccaaccaactaatatctggggactacgtcgactttgagaggctggttgacaaggcaatccgtcaggaggatcaacgcaacaagatggacaggaagaggaaggccgctcagttcagggcacatcagggaagtcaccagaggccgcacttcactcctggacagcagggtggacctaccaccatgatcgtccgccagtaccgcccgttcaaccctagcaattttcccagggcgccagtggcagtcagaaccaccatggagtcaggcccgtccgcgcaagccaaggagactggagcaaaaccagggtcctgcttcaactgtggcgagcttggccatttcgctgacaaatgcccgaagcctaggcgtgccgggccaaggtttatccaagctcgtgtcaaccacgtatctgcggaggaggcacaaacagcaccagaggttgtactgggtacgtttcctgttaactcaatccctgcaacagtactttttgattctggtgcaacgcattcgttcatttcaaagaagtttgtcgggatgcatgggttaataagagaggaacttagcacactgatgcgggttcataccccagggaatagctccacttcggttcaattcagcccttctataacaatagaaattcaaagatcaccatttctagccaaccttattcttctcgaatccaaagacctagatgtcattcttgggatggattggctgaccaagtttaagggagtcatcgattgtgcgaatcgcacagtcaccttgaccaacgagaagggagaaacagtagtgtacaaatcaccagactcaccaaagcaaggggtctctttgaatcagattgaggcggaaatcccagtggacaccgtggagaagaagttgaggaaattggaagatatacccatagtctgcgagtatccagaagtgttccccgaagaccttactaccatgccacccaagagagagattgaattccggattgacttggcaccgggaatcgctccaatttacaagagaccatacagaatggcggccaacgaactagcagaggtcaagaagcaggttgatgagcagctgcagaaagggtacattcgaccaagtacttcaccttggggtgctccggtcatttttgtggagaaaaaggataagacgaagaggatgtgcgttgattaccgcgcactcaacgaggtcacaatcaagaacaaatatcctttgccgcgaatcgatgatttgtttgatcaactgaaaggagctaaagtgttttctaagatagacctgcgatcaggctaccaccagttgagaattcgggaagaggatattccaaagacggccttcaccactcggtacgggctatatgagtgcacggttatgtctttcagacttaccaacgcacccgcattcttcatgaatctgatgaataaagtgttcatggaatttctggacaagtttgttgtggtattcatcgacgacattcttatctattcaaagaccgaagaagaacatgagcaacatctccgtctggtactcgagaagttgaaggagcaccagctatacgccaagttcagcaagtgtgacttctggttgacggaagtcaaatttctaggacatgtcattacagctcagggtgtggcagttgacccatcgaacgtagagtcagttaccaaatggaccccaccgaagaccgtgtcacagattcgaagttttcttggacttgcgggatattaccgccgattcatcgaaaacttctccaggatcgcccgacccatgactcggttgcttaagaaagatgagaagtttaaatggacagctgagtgcgataagagttttgaggagctcaaaaagaagttagtatccgcaccagttttgattctgcccgaccagatgaaagacttccaagtctattgcgatgcatcccgccacggacttgggtgtgtcctaatgcaagagggcagagtggttgcgtatgcctcgcggcagttgcgtccacacgaagggaattatccgactcatgacctggaattggcagcagtggttcatgctttgaagatctggaggcactatctgattggcaaccgctgcgaagtatatacggaccataagagtctgaaatacatcttcacccaaccggacctaaatctccgacaacgaagatggttggaactaatcaaagactatgacatgagcattcactaccacccgggtaaagccaatgtggtggcagacgcattaagcaggaaaagttactgcactgccctatgcatcgagggcatgtgtgaggaattgcggttcgtagctgctctggaggcacggcctacgctcgtggatcaagtcagagcagctcaagtaaatgattctgaaatagcagagctgaaaaagaacatgagagtcggaaaagcccgggatttccatgaagatgaacacggcacaatctggttgggagaaagattgtgtgtacctgacgacaaggaactgaaggatctgatactcaccgaggctcatcagacccagtactccattcatccaggcagcaccaaaatgtatcaagacctcaaagaaaagttttggtgggtcagcatgaggagagaaatagctgaattcgtcgcactctgcgatgtttgccaacgagtgaaggcagagcaccaaagaccagcaggtctactccaacctcttcaaatcccggaatggaaatgggaggagattggaatggactttataacaggactgccccggacatcatcgggtcatgattccatctgggtagtcgtggatcgactcactaaggttgctcacttcataccagtacataccacgtatacgggcaaaaggttggcggagctttacctctcgagaatcatatgtctacatggagtacccaaaaagattgtatctgatcgagggagtcagttcacctcaaaattctggcagaagctgcaggaagaattggggacccgtttaaattttagcacggcctatcacccgcaaactgatggtcagaccgagcgagtcaatcaaatcctggaagatatgttgagagcttgcgctcttgattttggtggagcttgggacaaaaacttgccatatgcggaattctcgtacaacaacagctaccaggccagtctacagatggcaccgtttgaagctttatacggccggaagtgccgcacacctctcttctgggatcagacaggcgagcgtcaactgttcgggacagaggtattaacagaagcggaagagaaagtcagaatcatcagggaaaggttgaggattgcccagtctcgacagaagagctacgcggataaccgccgaagggagctcacttttgaggcaggagattacgtgtatcttcgtgtcactccgctctggggagtacaccgttttcagacgaaaggcaagttggcaccacgcttcgtgggaccctacaaaatcttggaacgaaggggagaagttgcttatcagttagaacttccatccaatatgatcggcatccatgacgtgttccacgtgtcccaattaaagaagtgcttaagggtacctgaagaacaagctgattcggaacacattgatatccaggaggacctaacctatgtggagaagccggttcgtatacttgataccagcgaaagaggaaccagaaacaaggtcaccaggttttgccgagttcagtggagtcatcattcagaagaggaagcaacctgggaaagggaggatgagttgaaagccgcccatccgcacctcttcgccagctcctccgaatctcggggccgagattccgtttaa

SEQ ID NO: 13890 - DNA, 2376 bp, Oryza sativa
  Clone ID: TFbOSC900406j.C1.o13.fg
atggaaagacctaagagccctctgaatccttttcattgcatatgttctttgcaattggattttgttccgggaaaatggggatctgttcttgtggttcaagggaaaaatcttggtcgctcgtttaaaatggccggtcacccacccaaccaccgcggagaaggcatgattgatttcgtggcagagttggcacgcatgaccctggtggtgggctaccccgacgcgccggagtacacgacgattccgccgctcagtggcgagcttcctcaccgtgtccgcttggaggtccatggttacgtggggacttgcctcgctaacatggcggtcgaggcatctggaggcacagcagatcacgcctgtcaggaggcagcctacttgatgatggccagactacgggagcgccacgactacatcttccacgacacggcgtaccgctaccacccccgtcgagcccatggtgatggcgtcagctccttccgtccgacagctggcgagaacgacaccaccttcggtcacatgtgtgctgtgatgaggggattggaccagatgcactcggacctgcacaaggcgaccaaggccttgaatgatgggaagctcatgaggatcgtcgctctgaaggacgagatagcgcgcctgaagaaggagaatgctcagttgaagggtcttccagcaccaggaggagtccggatccgcactacgccccgtaagaggacgactgcacccgtgcgcatccagcttgcgcccaggaacccacctccaccagcagctcccgcagcacctccagttccgcccgcagctccggcagttcccgcagttcctccagctccagctcccgcgttcactctctccttcgctccagcatcagccgccagaggtccagccagtggtaccggaggttgcttgtttgggatggtctacaccaggactggcaaccgcacgacaggcgagggcagcaacggtgaagaacgcgctgatggtgtgcaccccaacagtgattctggcaatggtccgccaccacttcccgagaatccgacccttgcccaagttatggcacatcagactcagatgatggcagccatgatgcagcagatgcagcagcagcaccagcagatgcaccagaggatgatgcagcacgccgaacagcagcaccagcagtttggtccccctccccctcagtccaagttgccggagtttctacgtgtcaggccacccaccttctccagcaccaccaacactatggaggcaaatgactggctccatgcgatagagaagaagctgaatctcctgcagtgcaatgatcaggagaaggtcgctttcgccacacaccagcttcagggtcctgcgtcagcttggtgggacaaccacatggccacccgcccaccgggtactgaagtcacatgggcagagttctgccgtagcttcaggaaggcacaggtgccagacggggtcgtggcacaaaagaagagggaattccgggcgctccatcagggcagcaggactgtgacagagtacctccatgagttcaatcgcctcgcgcgatatgcaccagaggatgtccgcaccgacgccgagaagcaggagaagttcatggcgggtctggatgacgagctgaccaaccaactgatatctggggactacgccgactttgagaggctggttgacaaggcaatccgccaggaggatcaacgcaacaagatggataggaagaggaaggccgcgcagttcagggcacatcagggaagtcaccagaggccgcgcttcactcccgggcagcagggtggacctaccaccatgattgttcgtcaacaccgcccattcaaccccagcaacttccaccagggctccagtggcagccagaatcaccatggaagtcagcccaaccgcggtacagctccacgcccaccgatggcaccggcacagtcaggccagcccgcacaagccaagaaggagacgggagcaaaaccagggtcctgcttcaactgtggcgagcttggccacttcgctgacaaatgcccgaagcccaggcgtgccggaccaaggtttatccaggctcgtgtcaaccacgcatctgcggaggaggcacaagcagcaccagaggtcgtactgggtacgtttcctgttaactcaatccctgcaacagtactttttgattctggtgcaacgcattctttcatctccaagaaatttgtcgggatgcatgggttaataagagaggaacttagcacaccgatgcgggttcataccccagggaatagctccacttcggttcaattcagcccttctataacaatagaaattcaaaggtcacccggttttgccgagttcagtggagtcatcattcggaagaggaagcgacctgggaaagggaagatgagttga

SEQ ID NO: 13891 - DNA, 4887 bp, Oryza sativa
  Clone ID: TFbOSC9142j.C1.o1.fg
atgggttgcaagatggccggacacccacccaaccactgtggagaaggcatgatcgactttgtggcagagttggcacgtatgacgctggtggtgggctaccccaatgcgccagagtacacgacggttccaccgctcagtggcgagcttcctcaccgtgttcgcctggaggtccacggctacgtgggtacctgcctagctaacatggtggttgaggcatctggaggcacagcagatcacgcctgtcaggaggcagcatacctgatgatggccagactacgggagcgccacaactacatcttccatgacacggcgtaccgatttcaccctcgtcgagccagtggtgatgatgtcagtaccttccgtccgacagctggcgagaacgacaccacctttggtcacatgtgtgctgtgatgaggggattggataggatgcactcggatctgcacaaggcgaccaaggccttgaatgatgggaagctcatgaggatcgtcgctttgaaggatgagatagcgcgcctgaagagggagaatgctcagttaaagggtcttcccgcgccaggaggagtccggatccgcactacaccccgcaagacgacgacgaaacccgtgcgcatccagcttgcgcccaggaacccacctccgcccgcagctccggcagttcctgcagctccagctccagctcccgttcacgtgttagctcccgcgtccgctctctccttcgctccagcatcagccgccaggggtccagccagtggcaacggaggttgcttgtttgggatggtttacaccaggaatggtagccgcgcaacgggtgagggcagcaacggcgaagagcgcactgagggtgtgcatcccaacagcaattccggcaatggtccgccaccacttcccgagaatccgacgctagcccaagtgatggcacatcagacacagatgatagcagccatgatgcagcagatgcagcagcagcaccagcagatgcaccagaggatgctgcagcacgccgaacagcagcatcagcagtttggtccccctccccctcagtccaagttgccagagtttctacgtgtcaggccacccaccttctccagcaccaccaaccctatggaggcgaatgactggctccatgccatagagaagaagctgaatctcctgcagtgcaatgatcaggagaaggttgctttcgccacacaccagcttcaaggccctgcgtcggcttggtgggacaatcacatggccacccgcccaccaggtactgaagtcacttgggaagagttctgccgtagcttcaggaaggcgcaggtgccagatggggtcgtggcacaaaagaagagggaattccgagcactccatcagggcaacaggacggtgacggagtatctccatgagttcaatggcctagcgcgatatgcaccagaggatgtccgtaccgacgccgagaagcaggaaaagttcatggcaggtctggatgacgagctaaccaaccagttgatatctggagattacgccgatttcgaaaggctgatggacaggaagaggaaggccgctctgttcagggcacctcagggaagtcaccagaggccgcgcttcacccccgggcagcagggtggacctaccaccatgatcgtccgccagtaccgcccgttcaaccctagcaactttccccagggcgccagtggcagtcagaaccatcatggaggtcagcccagccgcggtgcagctccacgcccaccagtggcaccagcacagtcaggcccgcccgcgcaagccaagaaggagactggagcaaaaccagggtcctgcttcaactgtggcgagcttggccacttcgccgacaaatgcccaaagcctaggcgtgccgggccaaggtttatccaggctcgtgtcaaccacgcatctgcggaggaggcacaagcaacaccagaggttgtactgggtacgtttcctgttaactcaatccctgcaacaatactttttgattctggtgcaacgcattcgttcatttcaaagaagtttgtcgggatgcatgggttaaggaaagaagagcttagcacaccaatgagggttcataccccgggaaatagttcaacctcagtcagttttagcccttcagtgctaatagaaattcaaagatcaccatttctagctaacctcattcttctcgaatctaaagacctagatgtcattcttgggatggattggctgaccaagtttaagggagtcatcgattgtgcgaatcgtaccgtcaccttgaccaacgagaagggagaaacggtagtgtacaaatcaccagactcaccaaagcgaggggtctctttgaatcagattgagacgaaaatcccagaggacaccgtggagaagaacttgcggaaattggaagatatccccatagtctgcgagtatccagaagtgttccccgaagaccttactaccatgccacccaagagagagattgaattccggattgacttggcaccgggaaccgctccaatttacaagagaccgtacagaatggcggccaatgaattagccgaggtcaagaagcaggtggatgagcagctgcagaaagggtacattcgaccaagtacttcaccttggggtgctccgatcatttttgtggagaaaaaggataagacgaagaggatgtgcgttgattatcgcgcactcaacgaggtcacaatcaagaacaaatatcctttgccgcgaatcgatgatttgttcgaatttgatcaactgaaaggagctaaagtgttttctaagatagacctgcgatcaggctaccaccagttgagaattcgggaagaggatattccaaagacggccttcaccactcggtacgggctatatgagtgcacggttatgtctttcggacttaccaacgcacccgcattcttcatgaatctgatgaacaaagtgttcatggaatttctggacaaatttgttgtggtgttcatcgacgacattcttatctattcaaagtccgaagaagaacatgagcaacatctccgtctagtactcaagaagttgaaggagcaccagctaacgccatgttcagcaactcagggtgtggtagttgatctgtcgaacgtagagtcagttaccaaatggaccccaccgaagaccgtgtcgcagattcgaagttttcttggacttgcgggatattaccgccgattcatcgaaaacttctccaggatcgcccgacccatgactcagttgcttaagaaagatgagaagtttaaatggacagctgagtgcgataagagttttgaggagctcaaaaagaaattagtatccgcaccagttttgattctgcccgaccagatgaaagacttccaagtctattgcgatgcatcccgccatggacttggatgtgtcctaatgcaagagggcagggtggttgcgtatgcctcgcggcagttgcgtccacacgaaggaaattatccaactcatgacctggaattggcagcagtggttcatgttttgaagatctggaggcactatctgattggcaaccgctgcgaagtatatacggaccataagagtctgaaatacatcttcacccaaccggacctaaatctccgacaacgaagatggttggaactaatcaaagactatgacatgagcattcactaccacccgggtaaagccaatgtggtggcagacgcattaagcaggaaaagttactgcactgccctatgcatcgagggcatccgctctggaggcacggcctacgctcgtggatcaagtcagagcagagtaaatgattctgaaatagcagagctgaaaaagaacatgagagtcggaaaagcccgggatttccatgaagatgagcatggcacaatctggttgggagaaagattgtgtgtacctgacgacaaggaactgaaggatctgatactcaccgaggctcatcagacccagtactccattcatccaggcagcaccaaaatgtatcaagacctcaaagaaaagttttggtgggtcagcatgaggagagaaatagctgaattcgtcgcactctgcgatgtttgccaacgagtgaaggcagagcaccaaagaccagcaggtttactccaacctcttcaaatcccggaatggaaatgggaggagattggaatggactttataacaggactgccccggacatcatcgggtcatgattccatctgggtagtcgtggatcgactcactaaggttgctcacttcataccagtacataccacgtatacgggcaaaagcacggcctatcacccgcaaactgatggtcagaccgagcgagtcaatcaaatcttggaagatatgttgagagcttgcgctctcgattttggtggagcttgggacaaaagcttgccatatgcggaattctcgtacaacaacagctaccaggctagtctacagatggcaccgtttgaagctttatacggccggaagtgccgcacacctctcttctgggatcagacaggcgagcgtcaactgttcgggacagaggtattagcggaagcagaagagaaagtcagaatcatcagggaaaggttgaggattgcacagtctcgacagaagagctacgcggataaccgccgaagggagctcacttttgaggcgggagattacgtgtatcttcgtgtcactccgctccgaggagtgcaccgttttcaaaacaaaggcaagttggcaccacgcttcgtgggaccatacaaaatcttggaacgaaggggagaagttgcttatcagttagaacttccatccaatatgatcggcatccatgacgtgttccacgtgtcccaattaaagaagtgcttaagggtacccgaagaacaggctgattcggaacacattgatatccaggaaggacctaacctacgtggagaagccggttcgtatacttga

SEQ ID NO: 13892 - DNA, 5823 bp, Oryza sativa
  Clone ID: TFbOSC400653j.C1.o7.fg
atggcggcggagctagtgggtgaaggagacggtggacgacgccggcggtcaggggtagaggccgccggatccaacggttggcggtgcggtggaggaggctgccgctggatcgggcaagcggcggtggggtggcggaggaggaggcgactggtggtcgggggagaggcgccagatctgcgtcccccaaacgtgttgaggctggcggtcgttaggcaggagaggcggcggcggctggcgatcgggacacggaggaggaagtggccgacggtgaggggagaggccgcggtggccggatccgtgccctgtaagaatgaaaggcagcagctgcaggcgggagcagcagcagcagcagctgcaggcgggatcagcatcgagtacccgttctgcgtggagcctggctgctaccacccaggcttcaacctcacctgcaaccactcctacagcccgcccaggctattcctcggcgacggcacggtgcaggtgctcgagatcgccatcccccaagccaccgtgcgcatcaacagcggccgcatggtgttcaattctactggcaatcatgccgtcaacagatcattattggatcaggtgggaaggccgtacttcgtggcagcttcaaacaggatagctttgctaagctgcaacgcccgggttgacgtccgcgcggctgggagaaacaacaacaaaactagtactaagttgctcagttcctgcactgccatctgcccaacagacgatggaggtggtgctaccactatcctcgatattggtccagagggtccatgctcagggattggctgctgtgaaacaagcatgctactagcaggaagctcgactgctgcctacagcatccaggtccagaacttgcaggagcaggccgtcgtgctaaatcgaacggatgatctggtgtacttggtagatgagagatttaactataccttggacatgtctttcggctacagcagtcctgaagagctcccagcacggctagactggtacataaatagttcatcagcgtgtccgttgcccgcgtccgcccccgaatgtcgcagcgcgcacagctattgcgacagtacttacgacaacaaggcgtacatctgccgctgctccgaaggttacgaaggaaatccctacgttcctgatggatgccatgatacggatgaatgcagttctggatactgcagttacggcgagtgcaggaacacaccaggatcgttcatttgcaactgccctcgtggctacgagggcaatccatcgccaaaagatggatgcaaagcacgagatttaggtctacgcatcgggcttggggttggtggtggcacaattcttttgctcctcgcactaagtgctccctttatatcaagcaaaatgaagctgcgcaagatgaaaagaatgaaagagacttttttcaggcaaaaccatggcttgctattaggacgattggtatcacaaaacgcagatattggtcaaaggatgatcatgactttacaagagctagagaaggccacagacaattttgataaatctcgtgaaattggtggtggaggacatggcgtcgtgtataagggaattttagacctgcaagttgttgccattaagaaatcaaggattgtcgtaaaaagagaaatcgatgactttataaatgaagttgcaattctttctcaagtcaatcatagaaacgtggtgaagcttctaggatgttgtcttgagacagaagttccattgttggtttatgagttcatttcaaatggatctctagatcaccatcttcatgttgatggaccaatttcgctaccatgggatgatcgaataaggattgctcttgaagttgctagagccttgacttatctacattcagctactacaataccaatattccatagggatattaaggcatgcaacatacttctcgatgaaaatttaatatcaaagaattgctcactcgaaaaaggcccatgtataggactgatcacggtgaaagtcttgtgttatattttgcctcgcttcatagacaagatgagctacaaagctactagaaatcgaatgccaaagcctgaaggtgagatcaaagcaaccaacctcagagcattcaacagctcatcagtagaaatcccctctggagtagacttcgaattagggaacacaaccaccggcacggtgtcatcatcattaccttgggatgatcgattaaggatagcttttgaagttgttagagctctttcatatctacattcagctgcatcaatgccaatatttcacagagatattaaatattcgaatatacttcttgatgacagcctaacagcaaagttacttactcggaagaaaccaattggtggtacatttgataatggcgatggtcttgtttcacatttcgtctcacttgtctcaaaaggtaacctttatgacataatagattctcaagttagggaagaggaagatggagaagtccaggaagtagcaacactagccgcaacatgtactaaatttaaaggagaagagcggcctacgatgagggaagtagagatggagaacgacttgcaagaaaaccggtcggccatgaagaaatgccccgaccttaagattgagagaaggtttttggggagcgcaaggcgcgactactcactgttcgtcaacatctacttcacattcaccaatatgtcgaacactggagacaacggcaacactggatacaaggagacggaggctcccgtcaataccaacggaggcaatactgcctcaaactccagcggaggaccattcttggggtataaccttcttacattatttcaattagaagttttactgttaatgttcatcgcaatgtcaacattgtgttattatgtgattgttgatgcttattctatattaagcatgctcatgttgattacattcaccactatcactggatcaaatcccattgtaaatatcatgtttattatcttgttattttggattaaaatatgccgaattatgaccaaatttccaacaatccaaaaacctgataggtcattttcagtagttggctttgctgcaacactgaaaccacatgcttttgatggttctaattataagagatggaaagcacgtgcactactatggttgacagcgatgcaatgcttctatgtttcacggggcaaacgaagtgaaccgcctctctctcctgaggaggaggctaagttcgaggcttcggattgcctgttccgtggagcattgatcagtgtactcgctgacaatatagtggacgtgtacattcacatgcctttagggaaggacatgtgggatgcacttgaggccaagttcagagtttccgacgccggcagcgagctgtatgtcatggagcagttctatgactacaagatggtcgatgaccgttctgtagtggaacaggctcatgagattcagatgctggcaaaggaacttgagaacaacaactgtgagttgccggacaagtttgtggcgggtggcattattgccaaattgccaccttcttggtcggactttactatttctctaaaacacaagaggcaagagtttaatgttactgatctcattggctctttgggtgttgaggagaaggcgagagcaaaggacaactggggcaaaaatatcgagggaaattctagcgccaatttggctacaaccaattttaagaagaaagacaagggaaagggcaagggcgactgctttgtgtgcgataagcctgggcattgggcgaagaattgtcctgatcgcaaggacaagaagtctgccaacatggttattagcgagggcggaggaacatcggggtacggtaattttttacctacagttctctctgtttttcattcacctgattggtgggttgatactggtgctaatattcatgtcgggagaggttcctccttgttgatgggaaacgagtcgcttgcggctgttcatggtgttggtacggtcgatctgaagtttacttcgggaaagactgtgcagctgaagaatgtgcagcatgtcccttcaataaagaagaatctagttagcggctctctactatgtagagatggttttagacttgtgtttgaatccaataaatgtgtcgtatctaaatatggaacttttattggaaaaggttatgacagcgaaggttccaagtgccatacttgtgttcaatcgaaacaacctcgcaagcctcacaaggcatctgaggcgagaaatttggcaccactagaactagttcattccgatctgtgcgaaatgaacggcgtgttgactaaagggggaaagaaatatttcatgacactgatagatgattgcactagatattgctatgtgtacctattgaaaacaaaggatgaggcattgcattactttaagatctataaagctgaggaatggtggggtgaggcaatttttactgcttgtcatgtcctaaataaaattccagtgaagcataaggaagtaacactattcaaagaatgggaaaggaagaaattaaatctctcatacctacgcacatggggctgcttggccaagaatgaatttcccatgaaaaatacacctagcacatctagtcaagaacctgttttaccccatgagcaccttgcaccgataaaacacaatgatcaaacgcctgaggaaaatcctgaggaggttaacattgtagcaactcgaaagagtaagagacaaaggactgcaaagtcttttggagatgactacattgtatacctcgtggatgacactccaagaaccatagaagaggcatattcatctcctgacgctgactattggaaggaagcggtacgcagtgagatggactcaattatgtctaatggtacttgggaagtcgttgagcgtccatatgggtgcaaacctgtaggatgcaaatgggttttcaagaaaaaacttaggcctgatggtacaattgaaaacctcaatgtgattgaggaggttaaggactttttgtccaaaagctttgaaataaaggatttggaagtggctgatgttattcttaacattaagctactgagaggagatgagggtgggattacactcgtgcaatctcactatgtggacaaggttttgagtcgctttggttatagtgactgcaagccagctccaactccttatgactccaatgtgctattaaggaaaaatggaagaatagcaagggatcaattgagatactcccaaatcattggttcattgatgtacttggctagtgcaacgaggcctgacatctcatttgctgtgagcaagctgagccggtttgtttcaaatccgggagatgatcattgtcaagctctggaaagggtcatgcgctatctaaagggtacaataagctatggaattcactatactggttacccaaaaatattggaagggtatagtgactcaaactggatatctgatgctgatgagataaaggccacaagtggatatgtgttcacacttggaggtggcgctgtttcctggaagtcttgcaagcagaccatcttaacgaggtcaacaatggaagcagaactgacagcactagatactgccacagtaaaggccgagtggcttcgtgaactcctaatggatttgccggtggttgaaaaaccagtgccagctatactaatgaactgtgataatcaaacagtgattattaaggtgaacagttcgaaggacaacatgaagtcatctaggcatgtaaagagaagactgaaatctgtcagaaagcagaaaaactccggagtgatagcactggactatgtccagacagctaaaaatctggcagatcagtttaccaaggggctaccacgtaatgtgatagacagtgcatcgagggaaatgggcttgagacccacttag

SEQ ID NO: 13893 - DNA, 5430 bp, Oryza sativa
  Clone ID: TFbOSC900283j.C1.o5.fg
atggcagtgaacgccagcttcagttcccacggtcttggtgagggtcaccacgtcgctcagcttcgtgacctcacccgtttccttggcttctcgtgtcccgagtacacggggtactccgtggaccgcgtcccccctcactgtgagctctctgtgtacctttacccccgtggaggtatacacggagctggccttcgcccccaccacttcactgtggccaggcccaccctccagatcgcgtaccaggacctctcctggactgcgcttcgtcgcctggcccacgactacagccaccgtctcggaggctccgccttccggcagcttccacgccttccttctggccactcagacgccaggtacccttgtccgtacagcgagtctcagccagtgctgactcgcatggttgagctttcggaggctcaggccactcagcacgacctactccttgaggcttaccgctcccttgcccgtcgctacgccgccttggaggcccgtctggccgaggagggtgtcacctcagttgacactatctcctgggactcaggacgcctctgccacgccagccacctgtcctcccacagctcccgcggctctgcccgcactcccagtggcccgcgctcccccagctcgcgtgcgccgtactctccagtgtactccccctacccacacccagttagcccttcctacactccaggacacaccccagttgcttcctcccgccgtggcccacgctttatccgcactgcgtggaagcgtgttgttggttcttccaccgtgttccgtttccaccacccagctcccccaccgccagcagcccgtgctgctgccggccctcgacagatggctagccgcccccgccgtgcagctcgtgcaccagcccgctttggttttgaagatggtagagtcgaagcagaagcaaatcatgaacccgctaatgagcagtctcaccacagcaaccgttcgcaccgtacctctccccgcaacgcagaagttgagcaaccccgccgcagcaaccgctcgcatcgcacagtttcccgtgatgcagaaatggagcagtctctccgctctcaccgcactgccagtcacaattctggagaagaacgcatcccttccccacctcatgtggaaaacaacatacaacacataatggcagtacagacacaaatcttgcaaggactaaccacagccatagccagttttcagcataatgcgtatggaaatggccaccctcacgtgggcaataatagatccaagctgacagactttctgaggtcacgtccgccagagttctctcagaccgtcgagcccgtcgaggctgacgattggttgaaagatgttgatagaaaactcaacttagtgcagtgtactcctgttgagaagacgctctacgcctctcaccagctaagaggacctgccgcagattggtgggagaattactgcaatgcacaccctgaacccactaacattgcttgggatgagttcgctacggctttccgtgcagctcatgtgcccgaaagcactattgacatgaagaaagaagaatttaacagacttaggcaaggcaacagcaatgtcaatgagtacctaagtcagttcaacaagttggctcggtacgcccctgaggaagtaaacaccgataagaaaaagatcaggagattcttgaaaggagtcgcagttggaatgagactccagttgcttgctcatgacttccccacttttcaacatatgatcaacaaagcacttctacttgaagatgccagaaaagaggccaccgaagaatacaagaaacgcaagtctaaccaccaaggaaattcttcccgaggcgcacctcgccctcgctacggtcaacccatgcaataccaccagtcggtcactcaggctaaccgccagccaggttacgcccctcgccctcagatgaaccgtccggcaccccagccacagcagcgtgcccctagtggcaatacggcgccaaacagtgttacctccttcaagtcaccgcagggaccgtcagcagttcagtgtttccggtgcaaccagatgagtcactatgccagacagtgccctcagaatcctaccaacaccaactccgggcatgctaatggcagcaccgccagaactcctactccagcggcagctcagtctcgtcctagctctcaggcaagtggacaaggatctcgtgcgtccaacaacttcggtcgaggacgtgtgaatcacattcaagctgaaaccgctcaggatgctccagacgttgtgatgggtatgttctctgtcaactccgtacccgcaatagttctatttgattcaggagcttcccattccttcatatcacaagcttttgtgaaaagaaatggttggaaaacccaaaatttgcgtgtaccaatgatagtacattcccctgggaggaatataagggcaactcaaatatgcccagaagttaaccttagaattgaggaagttgacttcctagccaaaccgatagtcctagactcgcaaagcttggacatcatcctaggaatggattggttggctaagcacaaaggacagatagattgtgccgaaaagtccatcactttgcaaggacctggaggaaagcaagtccgctttacccctaacacccctaccgcaagtcggtctgtcctaacctgtttacaagtcacctccttggagtcggtgcccatagtctgtgaatatcccgacgtatttccggaagaattaacaagaatgccaccagaccgagagatcgagttcgccatagaactggcaccaggcacagctccaattgcaaaaagaccctaccgaatggcagctaatgagttagcagaagtcaaaagacaaatcgaagagttggagagtaaaggttatgtgcgacctagctcatccccttggggagccccagtgcttctggttaagaaaaaggatggctctgagagaatggtaatcgactatagagccctgaatgaagtaactataaagaacaagtacccgttgccacggattgacgatttattcaatcaacttaaaggagcaagagttttctcaaaaattgacttgaggtcaggttaccaccaattgaaaatcaggtctgaagatatcccgaagaccgctttctcaacgcgttatggtctatatgagttcacagtaatgtccttcggactcaccaatgctccagcattcttcataaacttaatgaacaaaatctttatggaatacctggaccggtttgtcgtggtattcatcgatgacatactgatatactctaagaacgaggaggaacatgctgaacacctgaggctgataatggaaaagctcagagatcatcaactattcgctaaattctcgaaatgcgaattctggttagaccgagtagcatttcttggacacgtaatctcctccaacggtgtcgaagtagatcccagcaaggttgaagctgtacttgcttggaacccgcccaagaatgtgtcagagattcgcagcttccttggcttagctggatattatcgaagattcattgaagggttctctaagctagccagacctatgaccgagctgttaaagaaggaaaagaaatttcaatggtctgcagcctgtgaagacagctttcaagaaatgaagaaaaggttgaccactgccccagtacttaccttgccagatatccgaaaagatttcgagatcttctgtgacgcatcaagacaaggcttaggatgtgtcctaatgcaagaacgaaaggttgtggcctatgcatccaggcagctcaggcctcatgaagtcaattatcccacccatgatctcgagttggcagccgtgattcatgctcttaagatctggaggcattacttgatagggaacagatgtgaagtgtacaccgatcacaaaagtcttaaatatatcttcacacagaccgagttaaatatgaggcagagaaggtggttggaactaatcaaggattacgatcttggaatccactaccatcctggagtcccagccagcttgacagtacagcctaccctagagtcgcaaatccgggaggctcagaaagatgacgaagggataaaagagttaataaaaagaatacaggagaaggaagacaccaatttctccatagacgatcaaggcacagtttggtgcggtccacgcatctgtgtaccggccaagaaggagttaagagatctcatcctaaaagaagctcatgagtccgcttactccattcatccaggaagtacgaagatgtaccaagatatcaaggcatacttctggtgggctggaatgaagcgagatgtcgcagaatacgtagccttgtgtgacatttgccaaagagtcaaggcagagcatcagaggccagcaggtctgctgcaacccctaccgattcccgagtggaaatgggaagagatcggaatggatttcatcaccggtttaccaagaacccccagcgggtacgactccatttgggtaatcgtggaccgactcacgaaatcagctcatttcgtgccagtaaaaaccacctatgatggaaagaaactagcagaactctacatgacccatgtcgtatgtagatttggttgccccaagaaaattgtgtcagaccgaggcacccagttcacctcaaggttctggaagcagttgcatgaagccctcgggactgatctaaattttagtacagcctaccatccgcagaccgatggtcagacagaaagggtaaaccaaatcctagaggacatgctgcgtgcgtgtgccttggatttcgaaggcacttgggatcgttgtttgccgtatgccgagttctcttacaacaacagttatcaggccagcattcagatgtcgccgaatgaggcactattcggaagaaagtgccgcacccccttatgctggaatgaggtgggcgaagcactggtattcggtcctgacatactccagtcagtagaagaacaagttaagctgatacgagaacgtttgaagacagcacagaaccgtcagaagaattacgctgacaatcggaggcgtgaccttgagttcgaaaaaggagatcatgtatacctgcgggtatcacccctccgtggtatgaagaggtttgggatgtccggcaagttagcaccccgctacatcggcccctacctcataaccgccagacgtggcgaagtggcttatcagcttgagctacctgaaggtctcgcagatgtgcacaacgtgttccacgtgtcccagttaaagaaatgtcttcgagtcccagaagagcaagttcccctgggtaatatcgagctggaaaagaatctgacctacaaggaaagaccgatcaaggttcttgaagaagcagaacgtcagactcgaaggaagaccatcaagttctacaaagtccaatggagcaatcattctgaagatgaggcaacatgggaacgagaagatcttctccgcgccgagtttccggagctgctcccttag

SEQ ID NO: 13894 - DNA, 1522 bp, Oryza sativa
  Clone ID: TFbOSC28236j.C1.o1.np
atgtcggatttagggggaaagaacggggaaaatggaaatgaagatggaacgagcagcaaggaaactccatcacccaagggagctactataccttttgattacagcaaacttaccattccccctcacaactttgtctccgtgccttctaggcgtgctcctcaatttgatgggacacattacgccgcttggaagcacaagatgaagttgcatctaatctttttgcatccaagtatttggaaagttgtttgtataggtattgatgtaccccatgatgacatggagctcacttcggagcaagagcaactcatccaccgcaatgcttaagcttccaatccaattctctccgccttgagtccggaggagttcaacaaggttgatgggcttgaggaggccaaggagatatgggatactttgcaattggctcatgagggatcacccgccgttcgtgaggccaagattgaattattggaagaaaggcttggaagatttgtgatggatgacaaggagacaccacaagagatgtatgataggatgatgatccttgtcaacaagattaaaggacttgggagtgaggacatgacaaatcactttgtggtcaaaagacttctccatgcttttggtccaagaaatcccactcttgtatcaatgatatgggaaaggaaagctttcaagaggctcaccccaagtgacattcttggaagaattgtgtcttatgagatgcaagaagagacagctcgtgaagtgaggcaaatggtgaagaatcccaccatgatcaaaaatcaagaagtagctttgaaggcaaaacatgaagaaatgacttttattgtcaagagattcaagcactttcttcgcaagagtggctatggcaaagggaggaaggatgatgacaagggaaagaggcaatcaaagagagcttgcttcaattgtggcgaatatggccacttcattgccgattgtctcaagtcaaatgaagcgaaggctaagggaggcaagaagaagccggagcgtgctcatgtggcggaggcacacatggcagaggtgtggtactccggagatgaagaagatctcgaggtcaagcccaagcccaagccaaaagacaaggttgaaggagaaggtggtgttgctactgtcgccttcaagtcatcctcttcaagcaaggagcgtctcttcaacaacttgagtgatgacgacgacgactcctaccactactcttgtttcatggcccaaggccacaaggtgatgactcaaaagccctctcatacctctcttgatgttgattctagtgatgaggaaagtgataatgaattagatgatgtgcttaagagttttagcaaacccgctatgcaacatttggctaagttaatgagagctttggatagtaaagaacaatctctcgaaaggcaagaagaattacttattcttgagaaggaaagaaaccttgccttagtggagagcctagctaaagaatgtgctaaaaatgaacaactagctaatgagcttaatttggctaatggttctctag

SEQ ID NO: 13895 - DNA, 2250 bp, Oryza sativa
  Clone ID: TFbOSC402966j.C1.o1.fg
atggccgagaagaccattcgcgagttcgctgccccctcagctgaaaacgtgctcattgggccacaaatcaacttgggagacacagatttcgatctgaagtcgagcctcatcacgatggcgcaggctagctcgttctgcggcaagcctaatgaaaatgccagtgtgcacctgcaacagttcctggagatatgtagcacgtacaccgtgaaaggtgtcagtccggatgccgtcaggatccggctatttcccttctcccttctagggaaggtgaagcagtggtcctatgccaaccgtgctactatcaatacttgggacatgtgctctacgacatttttgtccaaattcttcccgatgggcaaaaccaacgcccttcgcgggaaaatttcggtattccagcagacaagggacgagttaatccccaaagcatgggaacgactccaggagtacgtggctgcctgcccgcatcatgggatggacgaatggctgatactccagagcttttacaacgggctcactcccacgtcccgcgaccacctagacgtggcagctggaagagccttcttctctaagacgtgtgaggtctgcggcagcacgggtcattttgggaacgactgcccagaaacccgtgaggaaacgatgtacatgggcaacgacaacaacgggttccgtccacaaggaggtcaagggtggaacagccccgctcatatttccaaggaagcaacaataatggtttcaactgttaataagtctagcaatttcaagcgccctacaactggttcttcaaagggtccgatttccaatgctgagtccttgaatgttgttcctgttaaatcagtctttgatcgtcttcgatttccggagatcgccgccggcaaagctccggcccgtgatcagggggtcagatgtgcttcctgtcacaaattggatcaccgggctttagcctgttggaacaaaaagaaggcccaagtctggaggcccaaaaaggattctatgcctgcggctaagaagtctattgtggaaagggcagttttagggaaagaaataatttgcttcaaaaatcaaggaagcccttcctcttcctctcaacagttgcagtctgtccctcttttgctctcgacctcttcgccgagtgctccaatggcggtgctccttgagccctgggatcatcagcttgagcgtgctgatctttgcctccaggaagatccccctaagcgcaatgaaggtatggctgtcgcttgcattgaacctccaccaactcctgagcaatatgagggtttcagacatctggtgattaactatgttcagaatgtgctgggctatcatgtgttagaagctagccgtcaccctattgagttcatgtatgttcgtgtagcttctgctctgcttagagacactctaatagctgggggtccttatgaagtggataatcagtttatgcttcgctttgttcctcatgaccttacttccagttgtcgcaactcccctttcacttcagagggatggataatgtttttggatttcccattggatttcaaaactcctgctattattgacaaagctgtctctctgtttgggaaagtgatcaaagttcagttagatgataatgtaaggggaagattaatggtaaaagctttgtactcttccactctggaggtccctagaagaattgttgttaaaagggccattgctttcggaggtgttggaagatcttggacggtctcagtctttctatgccatgaagaactacctgatgttatgcctggggatgaggatttacctccagtgaatcatattcccatccctgatccggtgcagctgctggcaccacaagtggatgcttttggtgataatatggaagaggatgctccagctgttgagcaaaattctcagcctcttagtgctgtctctgtggtggctggaaatcaaaattttgccctcttagcagctgttctgctggtggttgggaatgaaactgaggttgaacaggctgagggagatttgggacatgagtatatgaatgaggcccatattgaagatgctgaaatggttgagcccatttcctgtgtgctccctgaacaacaagttttacctcaggatccattccagcaaagtgcctcttcctgcctgccatctttgaagaaatccagaaagactaaagctaaaattgtggcaattgtggacactgatcgtaggagaaactccagaatcaataagctcacagggggttacatgtctcctgatcccaagtag

SEQ ID NO: 13896 - DNA, 2529 bp, Oryza sativa
  Clone ID: TFbOSC408676j.C1.o4.fg
atgtcgacaaccggcgacaacaacaacactggagacaaggagaaggagcctctcgtcaacaccaacagaggcgatactgtctcaaactccagcggagggccattctcaggtgtgctcgccgacaatattgtggacgtgtatatgcacatgccttcagggaaggacatgtgggatgctcttgaggccaagttcgaggtttccgatgccggcagcaagctgtatgtcatggagcagttttatgactacaagatggtcgatgatcgttctgtagtggaacaggctcatgagattcagatgttggcaaaggaacttgagaacaacaactgtgagttgccggacaagtttgtggcaggtggcattattgccaaattgccaccttcttggacagactttgctacttctctaaaacacaagaggcaagagttcagtgttactgatcttattggctctttgggtgttgaggagaagtcgggggcaaaggacaaccgggccaaaaagatcaagggaggttctagcgccaatttggtgcagaagaagaaccttcacgcatcccactacaacaagaaagtcaaacctaacgtcaaacccaaggctacaaccaattttaaaaagaaaggcaagggaaagacaaaaggaggttgctttgtgtgtggcaagtctgggcattgggccaagcattgtcctgagcgcaaggacaagaagtatgcaaacacggttattagtgagggcggaggaacatcgaggtatggtaaatatttacctacagttctctctgtctgtcactcacctgattggtcggttgatactggtgctaatattcatgtgtgtgccgacatttccctgttttcttcttatcaggtcgggagaggttcctccttgttgatgggaaacggatcgcttgcggctgttcatggtgttggtatggtcgatctgaagtttacttcgggaaagatcgtgcagctgaagaacgtgcagcatgtcccttcaataaagaagaatctagttagcggctttctattgtgtagagatggttttagacttgtgtttgaatccaataaatgtgtcgtacctaaatatggaacctttattggaaaagagtatggaattattcatgagaggacgcctccctattcaccccagtcaaacggggtagccgaaagaaagaaccgcactctaactgagatggtaaataccatgttagatactgcaggacattccaaggaatggtggggtgaggcaatattgactgtgtgtcatgtcctgaatagaattcctactaagtataagaaagtaacaccattcgaggaatgggaaaggaagaaattaaatctctctcacctgcgcacatggggctgtttggccaaggtaaatgtacctatagccaaaaagcataaacttggaccaaagaccgtagattgtgtgttccttggttatgctatccacagtgtgggatataggttcttaatagtaaattctggagtacccgacatgcgtgttggtacaattactgagtccagagatgccacattttttgggaatgaatttcttatgaaaaatgcacctagcacttctagtcaagaacctattttatcccctgagcactttgtgccgatagaacatattgatcaaacgcttgaggaaaatcttgaggaggataacattgtagcaactcgaaaaagcaagagacaaaggactgcaaagtattttggagatgactacattgtatatcttgtggatgatactccaagaaccattgaagaggcacattcatctcctgacgctgactattggaaggaagcggtacgtagtgagatggactcacttatgtctaatggtacttgggaagtcgtcgagcatccatatgggtgcaagcctgtaggatgcacatgggttttcaagaaaaagcttaggcctgatggtacaattgaaaagtacaaggcaaggcttgtggccaagggttatacccaaaaagaaggcgaggactttttcgacacttattcactggttgctcgcttgaccacgattcgagtactactcgctctggcgacctctcatggtctactcatccatcagatggatgttaagacagctttccttaatggagagttggaggaggagatctatatggatcaaccagatgggtatgtactagaaggtcaggaggaaatggtgtacaagctattgaagtccttgtatggtcccaaacaagcgcctaagcaatggcatgagaagtttgacaatacacttacatctgttggctttgttgtgaacgaagctgacaaatgtgtgtactatcgctatggtgggggagagggagtgatcttatgtttatatgtcgatgacatattgatctttgggaccagcctcaatgtgattgaggaggtcaaggactttctgtccaaaagctttgaaatgaaggatttgggagtggctgatattattcttaacattaaactactgagaggagggtgggattacacttgtgcaatctcactatgtcgacaaggtcttgagtcgctttggttatag

SEQ ID NO: 13897 - DNA, 4049 bp, Oryza sativa
  Clone ID: TFbOSC417436j.C1.o8.np
atggtcgccggcggcggccataggcacggcggagcggcggccgagagaggggaagggaagggggaaaagaggtggcggtccacggctcaccccgggtcgacgctcgggtggagcggaggaaggcggcggcgcggctcgggtggacgggggacgacggcgctccggcggtcggcgagctcggcgaggtggtggacggggtcggcggcggtgcggcgaagccggaggaggcgacccccgaggcgggagacggtcccgcgagcggagagggccggccggaggtcgttggcgacggatgatagagaggcgacggcgcgagctcgatttctggtggggagaaggtgcggcaaggggtggaaacgggcgagggaggtgcggggagggtttaaatagggttggaagggagagagggcggccggcagggaaggaaaccggcgcgggaggttttttttgccagcaatggcgccggcgagagttgcgggatcaaatccggccgtttgaaggcgagagagaggggaaaatagggggaaagggggaggagatcacggggagtaattgtttgaccatttggcttatcctacagtcgagatggctctgataccaacttgtcacacccacgccgatccgcaagcccagtacttgctcggagttgaaggttttatccgggagctatgtacgatggcctttgccataggattcaagactgcccctctttatgaccagatcccccatgatcgtgatgaggagaaatgccgtgtcaaggtcaccataacaagtgatcatgaagatatcccatcggtgatgtttgaagctggtggaagaaggtatcacatgcttgtcaggaggtggcaagggtcgccattggagaactccgcaacctctacaacgatcagctggtcaacacggagtatcgctaccatccttgccaaacccatgatcgtacccaagccagctacgtggatcctgagggacttgaagacgatgctaccttgtgccatgtggtcgagctactttgggcccatggatggacatcgcacggaggaggccctagctgctcaagagcgtgaagacaagaacaatggcatgatcaacaagcttcttgacaaggttgatcgtctggagaaggaactagctgaactcaagggagaagcaccgccgcatagggccagagcttgtctgaccacctggaagagagccctcgttgctccccgcttccagctggctcctaaggttcgcgtggtggaggaagctgccccacctgtggattcccctgtcatccaactgtgtgatgatgaggaagaagactcggaggaagaccctgaacgcacccattcagtggttgagtggggtgccactcaagaaaatgatgatgagggagagcctttagtccgctccgatgccaggaagccctagataacactcgcaacactggaagtgggtctgccaacaatgggaaaacccatctcttgcccaagtcctagcccagcagactcaactcatgaatctgatgatgcaacagctccagaaccaacagaaccaggggaacaatcatgctcctccccagaacaagttagcagaatttctgcgtgtgaggccacccactttctccagcactaccaatccggtcgaggctgacgattggctgcatgccatagagaagaaaccggacatgcttcagtgcactgaccaggaaaaagtctcttttgcttcgcatcagctgcatggctctgcctctgagtggtgggatcacttccgtctcaacagggctactgctgagctaatcatttggctcgagttcactgctgctttcaagaagactcataaaccatcgggagtagtagctctcaagaagaaggagttcagggcactcactcaaggttctcgttctgtcaccgagtaccttcatgagttcaatcgactggctcgttacgctctagaggatgttcacactgacaaggaacgtcaggagaagttgacggaagggttgaatgatgaactgtcttacccactgatgactggggattatgctgatttccagaagttggtggacaagatcatttgtcaggaggacaagtataaccgcatggaatagaagaagcgcaggattactcacttcaaggcacagcaagggaacagtcagaggccgcgccttactttaggacctcaggcagcacttcagggaggatcttcttctgctgttcacccgcaacgccagttctacaacaacaacactggcagtggcaatggcaaccgcaacctagctccgcgtcctgctgcagctccagcccagcaccagcctgtcaagaaggagtaaggaaacaagccaggggtatgtttcaagtgcggtgatccgggccattatgctgacaagtgcccgaagcttcgtggtgtgaggactgctcatgtctagaacaactccaatgcacccacatcgaaggcccgtgtcaatcatgttgctgccgcagaagctcaaagtgcaccagatgtgattttgggtacgtaccccgttaactcagttcctgcaacagtgctttttgattctggtgctactcattcctttttgtctaagagttttgcgggaagtcatgggatggaaatagaagagcttaggtgtcctttgatgtttagcacccccagtaaccaagcactctcatcataccgtagcccttctgtcagaatagagattcaaggtgttccatttctggccaaccttattttgctagaatccaaagactttgatgtcatccttgggatggactgattaaccaagaatagaggtatgatagattgtgccaatagaaaggtaaaactcaccaacagctatggacaagttgtaaccgttcatgcattgcctcctgcatcctctcaagtgtctcttaatcaagtcaccgtggaagagatcctcattgtgtgtgaatatccggatctattccctgatgacctacccggcatgccgcctaagagagatatagaattcaggatagacctagtaccaggaacagctccaattcacaagagaccttacagaatggcagctaatgaattagtagaagtgaagaagcaggtagatgatttgctgcagaaaggatacatcagaccaagttcatcgccctggggagctccagttatttttgtggagaagaaggatcatactcagagaatgtgtgtggattatcgtgcattgaatgatgtgaccatcaagaataagtaccctctgcctagaattgatgatttgtttgaccagcttaaaggtgccactgttttctctaagatcgatcttcgatcgggatatcaccagttgagctttagggagtatgggttgtttgaatgtactgtcatgtcttttggacttaccaacgcccccgctttcttcatgaacttgatgaataaagtgtttatggaatatctggacaagttcgtagtggtctttattgatgacattcttaactactcctgaaccaaagaagagcatgaagtacatcttcgcctcgcactggagaagttacgagaacatcagatgtatgcaaagtttagcaaatgtgacttttggttgtctgaagttaagtttcttggacatgtcatctcagccggaggagttgctgtcaaccccagtaatgtggaatccgtaactaattggaagcaaccaaagacaatttctgagattcgtattttctaggtcttgcaggttactatcggtggtttatagagaatttctccaagattgctaaaccaatgacttgtctgcttcagaaagatgtgaagtacaagtggtcagcagaatgtgagcagagttttcaagaattgaagaagcgcctagtatcggcacctattttgatcttgcctaatccaaagaagggactccaagtgtactgcgatgcatctcagcttgggttaggttgtgtgttgatgcaagatgggaaggtggtagcctatgcatctcgtcagttgcgccctcacgagaagaattaccttacccaagatcttgagttagcggctgtggtccatgccttgaagatttggcgtcactatctctttggcactcgtccggaagt

SEQ ID NO: 13898 - DNA, 4476 bp, Oryza sativa
  Clone ID: TFbOSC900336j.C1.o19.gm
atggatgacaaggagacaccacaagagatgtatgataggatgatgatccttgtcaacaagattaaaggacttgggagtgaggacatgacaaatcactttgtggtcaaaagacttctccatgcttttggtccaagaaatcccactcttgtatcaatgatatgggaaaggaaagatttcaagaggctcaccccaagtgacattcttggaagaattgtgtctcatgagatgcaagaagaggaagctcgtgaagtgaggcaaatggtgaagaatgccaccatgatcaaaaatcaagaagtagctttgaaggcaaaacaagaagaagagtcaagttgtgaagaaagtgaagatgaagaaatgacttttattgtcaagagattcaagcactttcttcgcaagagtggctatggcaaagggaggaaggatgatgacaagggaaagaggcaatcaaagagagcttgcttcaattgtggcgaatatggccacttcattgccgattgtctcaagtcaaatgaagcgaaggctaagggaggcaagaagaagccggagcgtgctcatgtggcggaggcacacatggcagaggtgtggtactccggagatgaagaagatctcgaggtcaagcccaagcccaagccaaaagacaaggttgaaggagaaggtggtgttgctactgtcgccttcaagtcatcctcttcaagcaaggagcgtctcttcaacaacttgagtgatgacgacgacgactcctaccactactcttgtttcatggcccaaggccacaaggtgatgactcaaaagccctctcatacctctcttgatgttgattctagtgatgaggaaagtgataatgaattagatgatgtgcttaagagttttagcaaacccgctatgcaacatttggctaagttaatgagagctttggatagtaaagaacaatctctcgaaaggcaagaagaattacttattcttgagaaggaaagaaaccttgccttagtggagagcctagctaaagaatgtgctaaaaatgaacaactagctaatgagcttaatttggctaatggttctctagctagccttagggatgtcaatgaaactcttcaagagaagtttgctagtttagacaaaagtcataaagatcttgaagttcaatttgacactctttggaatagcacttctcaaccaaatgtggtttctaattcttccaacccatctactagcaatggttgtgctaggtattacaatattgatttgaactctcatgctactaatgttgatgctatgcaagctcttaagaaagaaaatgaaaggttgggcacattggtgaaatatggatgtatgaagacataccattcaaaagatgccctttacaagaccatcaccgctcatcctaacaaggatggacacgggctcaggaagtttcgggcttctgataggccgaaggggctggccggaagttccggttataatgccaggaagttctggccagagggtctttactatgattcatatgcatactcctccgatggctcaagttgggttgtggacagtggctgcaccaatcatatgacgggagagaggagtatgtttacaagtcttgatgaggagggtggaagtcgtgaaaatattgtctttggagatgatggtaaaggaaagagggtgcgaagcaacaatggaggagaattcaagaacactcaagtggaggaatttcttgatgaagaaggaatcaagcacgagttctccgccccctatgatcctccccaaaacggcattgttgagaggaagaaccgaaccctcattgaagtcgcaagggcaatgcttgatgagtacaagacttcggatgtattttgggcggaggccgtgagtaccgcatgtcttgccatcaatcgcttgtacctccacaagatcctaaagaaaacctcatatgagctcttgagtggtaagaagcctaatgtttcatattttcatgtctttgggagcaaatgttttattttaagtaagaggtctcgctcatctaagttctcacctaaggtggatgagggattcttacttggctatgaatcaaatgcacatgcctatcgtgtcttctacaaaacctccggtattgttgaagtcactagggatgtgacatttgatgaatctaatggctcccaaggagagcaagttgttgtacatgttgtaggggatgtggatccaaatcaagctataggtactaacgctattggagacatacgaccagtcgagacgcaggatgaccaagaagatagggatcaacctccgtcatcgacatccaatagccctacaagtgctgtgtctgctgagccggaagttccgggtcccattgaccggaacctccggacatctccagacccggaagttccgggttctacagttcggaacctccggatcagtggcagtgaagacgtgccaacggcacaagtggatgggatcgatgctgagggcactttagagcattctgatcaggctcaggtccccccagtgcaccatccaaggatacatcacactgtccaaagagatcatcccgttgacaacatacttgggttcgaggatccaaagttgccaaaccatgtgtacaagctccacaaggcgctctacgggctcaaacaagcccctagagcttggttcgagatgtctatgatgggcgagttgaccttcttcctcgggctacaagtgaagcaagcactagagggcaccttcatctctcaaaccaagtacgtaaaagacatactcaagaagtttgggatggaggatgccaaacctatcaagacgcccatgcctactaatggatacctagacctcgacgataatggccggaagttccggtgttcttggcctggaacttccgtggtcattatgcctcgtgagaagagacagaagctttctcaagatgttcctgctgactcgagccccccggttcgtggtcctagggggagattgggcaaagaaaaagttggagttttttacagtgggagtcagattccgatccattccaggagggctggtagcattgtcattcgtgatgcaccccgctctccctctccagctgcatctgagtcagatgatggtggcaatgaggatgagcctggttctaaaagcaatcctttgaggctgtacaagacaagggctgttgatccagatcctaaacgcacaagagtgaactatctgaagaatctactccagtgtggaaaggacagaatggttagtcctgatactctgccagctgactctcaggatgacagattcaggaccttggtgcaggttgattggtataactctatgatcatgggaagatctcatctagtggtagagatgaagtggctagactggcagtacatgtcctcaaagaacaatatagtcttcaatgaggtacgcaaggtgtgtgagcgcaagcacgtggtagatttgttggccttgcagtattcctggaatgaggaagtgattggacagttctactttactgctttctttggcatcaccaagaaggggcttgattttgtgaagtggaccattcaggggcagcagtatagggtttctatggcacagtttgctgcagctttggggttagatgatgatgacctgagtcgtccacatatctttgtagaggatgctctgtcaccaaccagcactacctttatgtatgagaaggatgctcctaaggattgtttggggactattcgagggttgcgtccatattatagagtgctgtactctatcttcaggtggtctttgctccccaaagtgggagatgctacagctcttccaggtaggcatgcgctcctcctcagtcgcatgcgctacaacaagccagatttcagcatcatgaagcttatttggagtgagatctataagacaatgtgtgagccaaagaggggctgcatctatgctccttatatcatgaagatgattgaggccaagactgggatttgttatttcaaggacaatcaacacaagcttttccgtcctcatgctcccactacttcagctactcctaccaccagagtgactcgtgcttccacctcagctgctccttcttcctctgctgcacctcagcgttctgagtcttcttctcccataaagaaggctcttagggctatcttttgcatgtgtgccaagacagctaagaaggtaaagaagatagagaggcgtcaaaaggaagattggattgcagcaggcaaggatgtctctgacatttctgatgatgaggagtttgttgatccttttgctgcttatgagactgctcgagacattgctagtggtgagggtccctctggcacttctcgtttcttcaatgaggagtcctctcactccgaggagagcagtgatgatgaggagtcaaatgcccctaccgagaatgttcttacagatcccgatgaggcagtggacgccgccgggcaagacatcgactctcctcactccggcgacaccgagatcattccttctgatggcgatgatgatgaggcttga

SEQ ID NO: 13899 - DNA, 771 bp, Oryza sativa
  Clone ID: TFbOSC29212j.C1.o2.fg
atggcatccaaacgaggggaaaagaaaccgcaggccagaatgtctcgccggcggcagcagccgggctccgactccgacggcgaggacgacagcttcctctaccgctacccgctcccctccgccgccgctcccggcgcctcggggccctcctcgcacggcggcaagcccggcggcggcggcggctcgggcggcctcgcgccgtccaagtcgacggtgtacgtgtccaacctcgacttcgcgctcaccaactccgacctccacaccctcttctcccgcttcggccgcgtcgcccgcgtcaccgtcctcaaggaccgggactccccgcggagccggggcgtggcttccgtcctcttcgtccgccgcgaggacgccgccgcagccgccgcccgagatgcacggcaagccgagttcatccgccgccgcgtctaccgcgacaagtcccgctgctacgagtgcggcgaggagggccacctctcctacgagtgccctcgcaaccagctcggcccccgcgagaggccgccgccgtctaagaaatcgcggcgcggcggcggcagcggcggtggtggaggaggcggcggaggcggtcgcggggcttcctggcagtcggatgatgaggatagcgccgcggcgttcgaggacgacaggtgggcgtcagtggtggatacgagaggggaggaggagaaggcagctgggaagggcgaggggaaggcgatgaagaaggagaagaggaaaggctacttcagcgacgagagcgatgaggatgaggactga

SEQ ID NO: 13900 - DNA, 4152 bp, Oryza sativa
  Clone ID: TFbOSC401338j.C1.o7.np
actattgctcaaaaagctgattttgaaaataattgcaaagcacgcaacattattcttaatgccatttctcgctccgattttgatcgtgtttcacatcttgcaactgctaatgagatttggaaagctttcaacgattttcacactggatcttcaaacattaaggagttgcaaaaagatgttttcaaaaaggaatacatcaagtttgagatgaattctggtgaatcattggatgattatttggggcgtttcaataaaatcttgagtgatcttggatctgttgatgcttcttacaatgtcaactattctcaatctaaggttgcttgttactttatgaatggtcttgacatgaaaatctgggatgttaaagtgacttctattcaggaatctgttggcatgaacaccctgactttggatattctctacaccaaattgaaaacatatgagatgaatattctttctaaaagaactgattctaaatctactgctttggtgtcttcatctagttcttctattgattccactcccatgtctattttttccgcttttaatgccttgtccgaggatcaactagagggagttagtgaggaggacttggttttgattgctaatagagcttctaaagctttgagtaatactagatccaggagaagaggaggaccacaacgttgctttgaatgtggacaacttggccatattcgttctcaatgtcccaagctcagaagaggaacaaaggcggtagatcaagatgaagtcaagaatgccaagaacaccaaggacgacaaacaaagcaagaagcaattcaagaacatgaagatgaagaagttctatcaaaaggcgatagatgaagcatatgcggcaattcaagaatcaagtgatgttgattttgatagtgatggagatgatgacaaggggaagaacatcgttggagtttgtctcatggctagaagcattgatgaggattcaggagatgacaatgaggtaattcctccttctagtgttgaatattatcaagatattattgctagacttggttttaaaatttctaagtttgagaaaagattagtccatatgaagctaccattgaatctcttaaggctgaaaatagtagtataaaatctcttgttcctgataatgatgaatgtcaatcttgtgaggttttatgtgctgaaattaagtctaatagagatgtttgtatcaaaaagcttgatgttgaatctaggaaaactaagaaatttgaatcttgtgttgctcttagctttgccatgaacactagattggttgatgaattgtttttaactaagagagctttgaataaatgtcaagttgctttgtttgctagctcgatatttaacttgattagctctaagaggattaagcaatctagtaccaaacttttttcgacaacatgtgttgctaatgagatgaaactaaaatatgctttgggtcgtgttaagcacatggaggaaattgttaaacaagatgaagtgatgtcttgctcaacgtgtagaaaataaaagagtgttttggatgcttgcaaaaattgtgctactctttctcaagaggttttttacttgaaaagttctttgcaaagattttctaaaggaaaaaagaacctcaacatgattcttgatcaatctaaggttaacacaaacaatcgtgatttagtggtgaggatggagaacgtgtggattgtggactccggttgtatgcagcacatgaccagtgattctccttcctcaagaaggcgtcaaggagggactcgatcatcttcggtgatgcttctactagttcgataacaactactggttctgtcaaggtaagtgacaagtttacattgaatgatgtcactttggttgagaatttgaaatataatttgctctccgtctctcaaatcgtggatgaggattttgatgtgttgttcaagaaaactagaagcaaggtctttaattcttctggagatgttgtgcttaatgtttcgcgttatggaagagtttttaaggctgattttgagaatagtgtttcttctgaggttacatgtcttgttgcaaaattctcgaaagatgtgatgttttagcatcgtaggctaggacatgttggttttgatcatctcactagaattagtggttcggatcttgttcgtggtttgcctaaacttaagaaaaatcttgatttggtttgttcaccatatcgttatgctaagatggttgcttcttcacatgctcctattatctctgtgatgacggatgcaccgggacatctcttacatatggacactgttggtccaactagagtgcaatttgttggaggaaagtggtatgtgttggttgttgttgacgatttttctcgatattcttgggttttctttatggctactaaggatgagccttttgaacactttaaaagtttatatcttcgtttgtctcttgaatttgctggatctttgaggactattcgaagtgataatggtatttcacatttgcgtgtttttggatgtaaatgctttgtcttaaaatctagaaatttagacaaatttgagtcacattcaactaatggacttatgcttggatattctacacattctcgtggttatcgtgtacttgttttggaaactaacaaaattgttgagacttgcgaagtcacttttgatgaggctagtcctggtactagacccgatgtttccggtacactatcataggttcagggggaggatatttttgtggacgaaagcaatgacgaggaagaggacgaaatggcggccgttcagaccggggccacggccggtcagaccgctggcagaggatcggtcagaccggcctgggggatcttcctcgggtgcgtcgggtgatgatggtagaggacctccagagacttctacttcaataggacagggtgcagaacacgaaatttcatcatatgctactactccgcttcatattcaatgacgacatcctccacaacaaatgataggtaatattggtgaacatactacaaggtccaaggtaacaactcgtgatcatcatgtgaattctgcttttgttgctaattttgaacccaaagatgttactcatgcactaactgatgaatcatggatcaacgccatgcatgaagaacttgagaattttgaaagaaataaagtttggtctttagttgaacctcctgttggtcataatatcattggaactaaatggattttaaaatgaggatggtttaattgtgagaaacaaggctaggcttgttgctcagggttttacacaaatgtaggggttggattatgatgaaacttttgctcctgttgctagaattgaggcaattagacttttgttgacttttacagcttcaaaaggttttaaattgtatctaatggatgtgaaaagtgcttttcttaatggttatatacaggaggaagtttatgtaaaacaaccacccggttttgaaaactctgaatttcccaatcatgtttttcgcttgtctaaagctttgtatggtttaaaacaatctccaagggcatggcatgatagattggaaaactttttgcttgccaaaggttttataatgggaaaagtggataaaacactctttgttcttaagcatggtgatgatcaactttttgttcagatttatgtggatgatatcatctttggttgttcatctcaccctttggttgtggagtttgctgagactatgcgcatggaatttgagaagagcatgatgggcgaattgacttactttttggggcttcaaatcaagcaaacaaagcaaggcacatttgtgcatcaaacgaagtacaccaaggatcttctacggcgtttcaagatggaggattgcaagcctatgtctacacccattggatctactcctgtgttggatccggatgaagatggtgaagttgtggatcaaaaggagtataggagtatgattggatcattactctatctcactgcttcaagaccggacatacaatttgttgtatgtttgtgtgcttgttttcaagcttctccacgtgcttcacatcgtcaagctgtcaaacgcatcatgaggtatttgcaatagactcttgaatttggaatatggtattctacatattcttctatatgcttgagtggttatttggataacaagcaccgaggtacacaaactgacaatttaatatac

SEQ ID NO: 13901 - DNA, 804 bp, Oryza sativa
  unsure (1)..(804): unsure at all n locations
  Clone ID: TFbOSC900093j.C1.o1.fg
atggcatccaaacgaggggaaaagaaaccgcaggccagaatgtctcgccggcggcagcagccgggctccgactccgacggcgaggacgacagcttcctctaccgctacccgctcccctccgccgccgctcccggcgcctcggggccctcctcgcacggcggcaagcccggcggcggcggcggctcgggcggcctcgcgccgtccaagtcgacggtgtacgtgtccaacctcgacttcgcgctcaccaactccgaccttcacaccctcttcttccgcttcggccggggaccggacctcccccgcaggccggggggtggccttcgtcctcttcgtccgccgggaggagggccncccgccccccccgccgagatgcacggcaaggtcctcaacggccgcaccctctccgcctccatcgcggaggacaacggccgcgcagccgagttcatccgccgccgcgtctaccgcgacaagtcccgctgctacgagtgcggcgaggagggccacctctcctacgagtgccctcgcaaccagctcggcccccgcgagaggccgccgccgtctaagaaatcgcggcgcggcggcggcagcggcggtggtggaggaggcggcggaggcggtcgcggggcttcctggcagtcggatgatgaggatagcgccgcggcgttcgaggacgacaggtgggcgtcagtggtggatacgagaggggaggaggagaaggcagctgggaagggcgaggggaaggcgatgaagaaggagaagaggaaaggctacttcagcgacgagagcgatgaggatgaggactga

SEQ ID NO: 13902 - DNA, 768 bp, Oryza sativa
  Clone ID: TFbOSC900155j.C1.o15.fg
atggcatccaaacgaggggaaaagaaaccgcaggccagaatgtctcgccggcggcagcagccgggctccgactccgacggcgaggacgacagcttcctctaccgctacccgctcccctccgccgccgaccccggcctcgcgccgtccaagtcgacggtgtacgtgtccaacctcgacttcgcgctcaccaactccgacctccacaccctcttctcccgcttcggccgcgtcgcccgcgtcaccgtcctcaaggaccgggactcccgccgcagccggggcgtggccttcgtcctcttcgtccgccgcgaggacgccgccgccgccgccgccgagatgcacggcaaggtcctcaacggccgcaccctctccgcctccatcgcggaggacaacggccgcgcagccgagttcatccgccgccgcgtctaccgcgacaagtcccgctgctacgagtgcggcgaggagggccacctctcctacgagtgccctcgcaaccagctcggcccccgcgagaggccgccgccgtctaagaaatcgcggcgcggcggcggcagcggcggtggtggaggaggcggcggaggcggtcgcggggcttcctggcagtcggatgatgaggatagcgccgcggcgttcgaggacgacaggtgggcgtcagtggtggatacgagaggggaggaggagaaggcagctgggaagggcgaggggaaggcgatgaagaaggagaagaggaaaggctacttcagcgacgagagcgatgaggatgaggactga

SEQ ID NO: 13903 - DNA, 3219 bp, Oryza sativa
  Clone ID: TFbOSC11309j.C1.o1.fg
atgcagtgcttctatgtttcacggggcaaacgaagtgaaccacctctttctcctgaggaagaggctaagttcgaggcttcggattgcctgttccgtggagcattgatcagtgtactcgctgacaacatagtggacgtgtacatgcacatgccttctgggaaggacatgtgggatgcacttgaggccaagttcggagtttctgatgccggcagtgagctgtatgttatggagcagttctatgactacaagatggtcgatgaccgttctgtagttgaacaagctcatgagattcagatgctggctaaggaacttgagaacaacaactgtgagttgccggacaagtttgtggcaggtggcattattgccaaactaccaccttcttggtcggactttgccacttctctaaagcacaagagacaagagttcagtgttcctgatctcattggctctttgggtgttgaggagaaggcgagggcaaaggacgtccggggcaaaaaggttgagggaggttctagtgccaatatggtacagaagaagaaccctcatgcatcccacaacaacaagaaagtcaagcctgatgtcaaacccaaggctgcaaccaattttaagaagaaaagcaagggaaaggcaaagggagactgctttgtgtgtggcaagtctaggcattgggccaaggactgtcctgagcgcaaagacaggaagtctgccaacatgatcattagcgagggcggaggaacatcggggtacggtaaaatattacctacagttctctctgtttttcattcacttgattggtgggtggacactggtgctaatattcatgtcgggagaggttcctccttgttgatgggaaacgggtcgcttgcggctgttcatggtgttggtacggtcgatctgaagtttacttcgggaaagaccgtgcagctgaagaacgtgcagcatgtcccttcaataaagaagaatctagttagcggctctctattgtgtagagaaggttttagacttgtgtttgagtccaataaatgtgtcgtatctaaatatgggacttttgttggaaaagattatgacagcggaggcttgttccgcttttctttgaatgacatgtgtaataatcataatgctgtgaaccatattagcgagaatgatgagtctaatgtgtggcattcgcgactctgtcatgtgaatttcggttgtatgacgcgcttagctaacatgagtttaattccaaaattcactttggtaaaaggttccaagtgccatacttgtgttcaatcgaaacaacctcgcaagcctcacaaggcatctgaggcgaggaatttggcacctctagaacttgttcattccgatttgtgcgaaatgaacggcgtgttgactaaagggggaaagaaatatttcatgacactgatagatgattgcactagattttgctatgtgtatctattgaaaacaaaggatgaggcattgcatttctttaaaatctataaagctgaggtagaaaaccaacttgaaaggaaaatcaaacggttgaggtctgatagaggtggggagtatttttccaatgagtttgcatccttttgcgaagagtttggaattattcatgagatgacgcctccctattcaccccaatcaaatggggtggccgaaagaaagaaccgtactctaactgagatggtgaatgccatgttagacactgcggggctttccaaggaatggtggggtgaggcagttttgactgcgtgtcatgtcctgaataaaattccaatgaagcataaggaaataacaccattcgaggaatgggaaaggaagaaattaaatctctcatacctacgaacatggggctgtttggccaaggtaaatgtacctatagccaaaaagcggaaacttggaccaaaaactgttgattgtgtgtttcttggttatgctatccacagtgtgggttatagattcttaatagtaaactctggagtacccgacatgcatgttggtacaattcttgagtccagagatgctacattctttgagaatgaatttcctatgaaatatacacctagcacttctagtaaagaaactgtcatgccccatgagcactttgcaccgatagaacacaatgatcaaacgcctgaggaaaatcctgaggaggacaacattgtagatactcgcaagagtaagagacaaagggttgcaaaatcctttggagatgactacattgtatacctcgtggatgacaccccaagaaccatagaagaggcatattcatctcctaacgctgactactggaaggaagcagtacgcagtgaaatggactcgattatgtctaatggtacttgggaagtcgttgagcgtccatatgggtgcaagcccgtaggatgcaaatgggttttcaagaaaaagcttaggcttgatggtacaatcgaaaagtacaaggcaaggcttgtggccaagggttatacccaaaaggaaggcgaggacttcttcgacacatactcactagttgctcgcttgaccacgattcgagtactactcgctctggcagcctctcatggtcttctcgtccatcagatggacgttaagacagctttcctaaacggagagctggaggaggagatctatatggatcaaccagacgggtatgtactagaaggtcaggagggaatggtgtgtaaactattgaaatccttgtatggcctcaagcaagcacctaagcaatgtcatgagaagtttgacaccacgcttacatctgcaggctttgttgtgaacgaagctgacaaatgtgtatgctatcgctatggtgggggagaaggggtgatcttgtgcttatatgtcgatgacatactgatctttgggaccagccttaatgtgattgaggaggtcaaagactatctgtccaagagttttgaaatgaaagatttgggagaggctgatgttattcttaacatcaaactacaaagaggagatgagggtgggattacacttgtgcaatcccactatgtggacaaggttttgagtcgctttggatatagtgactgcaagccagctcctactccttatgatcccagcgtgctattaaggaaaaaccgaagaatagcaagggatcagctgagatactctcaaatcattggttcattgatgtacttggctagcgcaacgaggcctgacatctcatttgctgtaagcaagctgagccggtttgtctcaaatccgggagatgatcattggtag

SEQ ID NO: 13904 - DNA, 991 bp, Oryza sativa
  Clone ID: TFbOSC16291j.C1.o1.np
taaggcatgctctcgttgtggagaaatcggtcatgttgccagctcgtgtgccactacatgcgttcattgtgaggaagaccatccacccgataggtgtccaacgagcaggatcacttgtttcttttgtgaaggaactgatcatgtaccaaaagattgtcgattcagttttctgctgacgaagaagatggccaaccaacccgtcagttccaacggagagaagcatcaaggaaacacaaatcctcgccaagattacagtttcagcctaactccagtgccaggacagaggaaacaaaatgagaaaagaaaatgccgagtccgggaagatatctgttgcttcaattgtcaaggaatgggtcatttcgccgacaagtgcccaaaaccgagaaacgtagctgccagcacgtcagtccacgcaaacccccgcaatcagaagcttgctcctcaacgaattgtcatccatgcatcccgaagcagtcctatagcccgcgttgcaacagctccaattccaatgagtgcactaccacaaggtgtcaatgctcaatttcagccccagccaccagctgacaagacagaggccagtatctgcgttgtacctttggaagttccaatacagcagctgagaaatcaagtacaagatgaagaacccgagtgtacaaccattctctgcatcgacagcctcagcaaagaattgtcgtagatggaagaagttgtgtctctccccgacctactccaggccgagccaagagcaatcaacctccggagggcgataccaagcagaagaccgtcatccgcttcaaccagcaatcagaaggaagcttctcctgtgaatgatagcattatgtagtcctgtcacatcatcacagaaccaatcaaggatgcagtcactagaacaatgccagctatatctctccagaatcaaaatgagcagccatgtttgtggttttcagttcgctacttatcatggtgtaatcgaaagtttgcagcaaccatg

SEQ ID NO: 13905 - DNA, 2388 bp, Oryza sativa
  Clone ID: TFbOSC16541j.C1.o2.fg
atgcaatgcttctatatttcacggaaaaaacgaagtgaactgcctctctctcctgaggaggaggctaggttcgaggattcggattgcctgttccgtggaacattgatcagtatacttgctgacaatatagtggacgtgtacatgcacatgccttcggggaaggtcatgtggaatgcatttgaggccaagttcggagtttccgacaccagcagcgagctgtatgtcatggagcagttctatgactatgagatggtcgattaccgagaaggcgagagcaaaggacaacagggcaaaaatatcgagggaggttctagcgccaatttggtgcaaaagaagaaccctcacgcatcccacaacaacaacaacaagaaagtcaagcctgatgtcaaaccaaaggctactaccaattttaaggataaaggcaagggaaaggccaagggcgactgctttgtgtgcggtaagcctaggcattgggccaagaattgtcctaatcgcaaggacaagaagtctgccaacatggttattagcgagggcggaggaacatcggggtatggtaaatttttacctacaattctctctgtttttcattcacctgattggtgggttgatactggtgctaatattcatgtgtgtgctgatatttccatgttttcttcttatcaagtcgggagagattcctccttgttgatgggaaacgggtcgcttgcggttgttcatggtgttggtatggtcgatttgaagtttacttcgggaaagaccgtgcagctaaagaacgtgcagcatgtccctttaataaagaagaatctagttagcagctctctactgtgtagagatgcttttagacttgtgtttgaatccaataaatgtgccgtatctaaatatggaacttttattggaaaaggttatgtcagcggagttctgttccgtttttctttggatgacatgcgtaataataataatgatgtgaaccatattagcgagaatgatgagttcaatgtgtggcattcgcgactttgtcatatgaatttcggttgtatgacacgcttggctaatatgagtttaattgcaaaattcactttagtaaaaggttctaagtgccatacttgtgttcaatcgaaacaacctcgcaaacctcacaatgcatctgaggcgaggaatttggcacccctagaacttgttcatttcgatctgtgtgaaatgaacggcgtgttgagtaaagagggaaagaaatatttcatgacactgatagatgattgcactagattttgctatgtgtacctattgaaaccaaaggatgaagcattgtattactttaagatctataaagctgaggaatggtggggtgaggcaattttgactacttttcatgtcctgaataaaattccagtgaagcataagaaagtagcaccgttcaaggaatgggaaaggaagaaactaaatctctcatacctacgcacatggggctgtttggccaagaacacagtaatcaaacgcctgaggaaaatcctgaggaggataacattgtatactcgaaagagtaagagacaaagggttgcaaaatcctttggagatgactacattgtatacctcgtggatgacactccaagaactatagaagaggcatattcatctcctgacgctgactattggaaggaagcggtacgcagtgaaatggactcaattatatctaatagtacttgggaagtcgttgagcgtccatatgggtgcaagcctgtaggatgcaaattggttttcaagaaaaagcttaggccagatggtacaattaaaaagtacaaggtaaggcttgtggccaagggttataaaaaaagaagcctcaatgtgattgaggaggttaaggactttttgtcccaaagctttgaaatgaaggatttgggagtagctaatgttgttcttaacattaagctactgagaggagatgagggtgggattacactcgtgcaatctcactatgtggacaatgttttgagtcgctttggttatagtgactgcaagccatctcctactccttatgactctagtgtgcttttaaggaaaaaccgaagaatagcaagggatcaattgagatactcccatatcattggttcattgatatacttggctagtgcaacgagtcctgacatctcatttgctgtgagcaagctgagcagatttgtttcaaatccgggagatgatcattggcaagctctggaaagggtcatacgctatctaaagggcacagtgagctatggaattcactatactgtgtacccaaaagtactggaagggtatagtgactcaaacttgatatctgatgctgatgagataaaggccacaagtggatatgtgttcacacttggaggtggcgctgtttcagaccatcttaacgag

SEQ ID NO: 13906 - DNA, 1777 bp, Oryza sativa
  Clone ID: TFbOSC19063j.C1.o1.fg
atgcaatgcttctatatttcacggaaaaaacgaagtgaactgcctctctctcctgaggaggaggctaggttcgaggattcggattgcctgttccgtggaacattgatcagtatacttgctgacaatatagtggacgtgtacatgcacatgccttcggggaaggtcatgtggaatgcatttgaggccaagttcggagtttccgacaccagcagcgagctgtatgtcatggagcagttctatgactatgagatggtcgattaccgagaaggcgagagcaaaggacaacagggcaaaaatatcgagggaggttctagcgccaatttggtgcaaaagaagaaccctcacgcatcccacaacaacaacaacaagaaagtcaagcctgatgtcaaaccaaaggctactaccaattttaaggataaaggcaagggaaaggccaagggcgactgctttgtgtgcggtaagcctaggcattgggccaagaattgtcctaatcgcaaggacaagaagtctgccaacatggttattagcgagggcggaggaacatcggggtatggtaaatttttacctacaattctctctgtttttcattcacctgattggtgggttgatactggtgctaatattcatgtgtgtgctgatatttccatgttttcttcttatcaagtcgggagagattcctccttgttgatgggaaacgggtcgcttgcggttgttcatggtgttggtatggtcgatttgaagtttacttcgggaaagaccgtgcagctaaagaacgtgcagcatgtccctttaataaagaagaatctagttagcagctctctactgtgtagagatgcttttagacttgtgtttgaatccaataaatgtgccgtatctaaatatggaacttttattggaaaaggttatgtcagcggagttctgttccgtttttctttggatgacatgcgtaataataataatgatgtgaaccatattagcgagaatgatgagttcaatgtgtggcattcgcgactttgtcatatgaatttcggttgtatgacacgcttggctaatatgagtttaattgcaaaattcactttagtaaaaggttctaagtgccatacttgtgttcaatggaaacaacctcgcaaacctcacaatgcatctgaggcgaggaatttggcacccctagaacttgttcatttcgatctgtgtgaaatgaacggcgtgttgagtaaagagggaaagaaatatttcatgacactgatagatgattgcactagattttgctatgtgtacctattgaaaacaaaggatgaagcattgtattactttaagatctataaagctgaggaatggtggggtgaggcaattttgactacttttcatgtcctgaataaaattccagtgaagcataagaaagtagcaccgttcaaggaatgggaaaggaagaaactaaatctctcatacctacgcacatggggctgtttggccaagaacacagtaatcaaacgcctgaggaaaatcctgaggaggataacattgtatactcgaaagagtaagagacaaagggttgcaaaatcctttggagatgactacattgtatacctcgtggatgacactccaagaactatagaagaggcatattcatctcctgacgctgactattggaaggaagcggtacgcagtgaaatggactcaattatatctaatagtacttgggaagtcgttgagcgtccatatgggtgcaagcctgtaggatgcaaattggttttcaagaaaaagcttaggccagatg

SEQ ID NO: 13907 - DNA, 3492 bp, Oryza sativa
  Clone ID: TFbOSC413690j.C1.o2.fg
atggcggctccagaccggcgtggcagcagggagatcgggaagggcggtggacgacgtcggggacggcggccgtcggatctgctgcggccggtcggagaagacgggcgggcgatcaggtttttggggagcgcaaggcgcgactactcactgttcgtcaacatctacttcatcttcaccaacatgtcgaacactggagacaaggagaaggagactcccgtcaacaccaacggaggcaatactgcctcaaactccagcggaggaccattcttggggtataaccttattacattatttcaattagaagttttactgttaatgttcatcgcaatgtcaacattgtgtcattatgtgattgttgatgctaattcaacgttaagcatgctcatgttgattacattcaccactatcactggatcaaatcctattgtaaatatcatgtttattatcttgttattttggattaaaatatgccgaattatgaccaaatttccaacaatccaaaaacctgataggtcattttcggtagttggctttgctgctacactgaaaccacatgcctttgatggttcaaactataagagatggaaagcacgtgcactattgtggttgacagcgatgcagtgcttctatgtttcacggggcaaacgaagtgaaccacctctttctcctgaggaagaggctaagttcgaggcttcggattgcctgttccgtggagcattgatcagtgtactcgctgacaacatagtggacgtgtacatgcacatgccttctgggaaggacatgtgggatgcacttgaggccaagttcggagtttctgacgccggcagtgagctgtatgttatggagcagttctatgactacaagatggtcgatgaccgttctgtagttgaacaagctcatgagattcagatgctggctaaggaacttgagaacaacaactgtgagttgccggacaagtttgtggcaggtgacattattgccaaactaccaccttcttggtcggactttgccacttctctaaagcacaagagacaagagttcagtgttcctgatctcattggctctttgggtgttgaggagaaggcgagggcaaaggacgtccggggcaaaaaggttgagggaggttctagtgccaatatggtacagaagaagaacccttttgcatcccacaacaacaagaaagtcaagcctaatgtcaaacccaaggctgcaaccaattttaagaagaaaagcaagggaaaggcaaagggagactgctttgtgtgtggcaagtctaggcattgggccaaggactgtcctgagcgcaaagacaggaagtctgccaacatgatcattagcgagggcggaggaacatcggggtccggtaaaatattacctatagttctctctgtttttcattcacctgattggtgggtggacactggtgctaatattcatgtcgggagaggttcctccttgttgatgggaaatgggtcgcttgcggctgttcatggtgttggtacggtcgatctgaagtttacttcgggaaagaccgtgcagctgaagaacgtgcagcatgtcccttcaataaagaagaatctagttagcggctctctattgtgtagagaaggttttagacttgtgtttgagtccaataaatgtgtcgtatctaaatatgggacttttgttggaaaagacactgcggggctttccaaggaatggtggggtgaggcagttttgactgcgtgtcatgtcctgaataaaattccaatgaagcataaggaaataacaccattcgaggaatgggaaaggaagaaattaaatctctcatacctacgaacatggggctgtttggccaagataaatgtacctatagccaaaaagcggaaacttggaccaaaaactgttgattgtgtgtttcttggttatgctatccacagtgtgggttatagattcttaatagtaaactctggagtacccgacatgcatgttggtacaattcatgagtccagagatgctacattctttgagaatgaatttcctatgaaatatacacctagcacttctagtaaagaaactgtcatgccccatgagcactttgcaccgatagaacacaatgatcaaacgcctgaggaaaatcctgaggaggacaacattgtagatactcgcaagagtaagagacaaagggttgcaaaatcctttggagatgactatattgtatacctcgtggatgacaccccaagaaccatagaagaggcatattcatctcctaacgctgactactggaaggaagcagtacgcagtgaaatggactcgattatgtctaatggtacttgggaagtcgttgagcgtccatatgggtgcaagcccgtaggatgcaaatgggttttcaagaaaaagcttaggcctgatggtacaatcgaaaagtacaaggcaaggcttgtggccaagggttatacccaaaaggaaggcgaggacttcttcgacacatactcaccagttgctcgcttgaccacgattcgagtactacttgctctggcagcctctcatggtcttctcgtccatcagatggacgttaagacagctttcctaaacggagagctggaggaggagatctatatggatcaaccagaaggtcaggagggaatggtgtgtaaactattgaaatccttgtatggcctcaagcaagcacctaagcaatggcatgagaagtttgacaccacgcttacatctgcaggctttgttgtgaacgaagctgacaaatgtgtatactatcgctatggtgggggagaaggggtgatcttgtgcttatatgtcgatgacatactctcaaatcagctgagatactctcaaatcattggttcattgatgtacttggctagcgcaacgaggcctgacatctcatttgctgtaagcaagctgagccggtttgtctcaaatccgggagatgatcattggcaggctctggaaagagtaatgtgctatctaaagggtactatgagctatggaattcactataccgggtatccaaaagtactagaagggtatagtgactcaaactggatatctgatgctgatgagataaaagccacaagtggatatgtgttcacacttggaggtggcgctgtttcctggaagtcttgcaagcagaccatcttaacgaggtcaacaatggaagcagaacttacagcactagatactgcgacagttgaggccgagtggcttcgtgaactcctgatggatttgccggtggttgaaaaaccagtgccagctattctaatgaactgcgataatcaaacagtgattattaaagtgaacagttcaaaggacaacatgaagtcatctagacacatcaagagaagactgaaatctgtcagaaagcagaaaaactccggagtgatagcattggactatgtccaaacggctagaaatctggcagatcagtttaccaaggggctaccacgtaatgtgatagacagtgcatcgagggaaatgggcttgatacccacctaa

SEQ ID NO: 13908 - DNA, 4902 bp, Oryza sativa
  Clone ID: TFbOSC414105j.C1.o11.fg
atggcagtgaacgccagcttcagttcccacggttttggtgagggtcaccacgtcgctcagcttcgtgacctcgcccgcttccttggcttctcgtgtctcgagtacacggggtactccgtggaccgtgttccccctcgctgtgagctctctgtgtacctttaccctcgtggaggtatacacggagttggccttcgcccacaccacttcactgtggccaggcccactctccagatcgcgtaccaggacctctcctggactgcgcttcgtcgcttggcccacgactacagccaccgtctcgggggctctgccttctggcagcttccacgccttccttctggccacgcagacgccaggtacccttgtccgtacagcgagtctcagccagtgctgactcgcatggttgagctttcggaggctcaggccactcagcacgacctactccttgaggcttaccgctcccttgcccaccgctacgccgctttggaggcccgtctggccgaggagggtgtcacctcagttgacactgtctcctgggactcaggccgcctctgccacgccagctacctgtcctcccacagcttccgcggctctgctcgcactcccagtggcccgcactcccccagctcgcgtgcgccgtactcaccagtgtactccccctacccacacccagttagcccctcctacacccccggacacaccccagttgcttcctcccgccgtggcccacgctttatccgcactgcgcggaagcgtgttgttggttcttccaccgtgttccgtttcgactacccagctcccccaccgccagtggcccgtgctgctgtcggccctcgacagatggctagccgcccccgccgtgcagctcgtgcaccagcccgcttcggttttgagggaggtagagttgagcccgaagcaaatcatgagtcagctaatgagcagtctcaccacagcaaccgttcgcactgtaccgcttcccgcaacgcagaagttgagcaaccccaccgcagcaaccgcttgcatcacacagcttcccgtaatgcagaagtggaacagtcccaccactctcaccgcactgccagtcacaattctggagaagaacgcctcccttccccacctcatgtggaaaacaacatgcagcacttaatggcagttcagacacaaatcttgcaaggattagccgcagccgtagccggttttcagcataatgcgcatggaaatggccaccctcacatgagcaacaatagattcaagctgacagattttctgaggtctcgtccgccagagttctctcagaccgtcgagcccgtcgaggctgacgattggctgaaagatgttgatagaaaactcaacttagtgcagtctcatgtgcctgaaagcactattgacatgaagaaagaggaattcaacaaacttaagcaaggcaacagcagtgtcaatgagtacctaagtatgtttaacaagttggctcggtacactcctgaggaagtggacacagacaagaagaagatcaggaaattcttgaaagggatcgcagttggaatgagacttcagttgcttgctcatgacttccccacttttcaacatatgatcaacaaggcacttctacttgaggatgccagaaaagaggctactgaagaatacaagaaacgcaagtctaaccatcagggaaattcttccccaggcgcacctcgccctcgctacggtcaacccatgcaataccaccagtcggtcactcaggctaaccgccagccaggctacgcccctcgtcctcagatgaaccgtccggcacctcagccacagcagcgtgcccctagtggcaatactgcgccaaacagtgttacctctttcaagtcaccgccaggaccgtcatcagttcagtgtttctggtgcaaccagatgggtcactatgccagacagtgccctcagaatcctaccaacaccaactcagggcatgctaatggcagcactgctagaactcctactccagcggcagctcagtctctacattcccctgggaagaatataagggcaactcaaatatgcccggaagttaaccttagaattgaggaagttgacttcgtagccaaaccgatagtcctagactcgcaaagcttggacatcatcctagggatggattggttggctaagcacaaaggacagatagattgtgccgaaaagtccatcaccttgcaaggacctggaggaaagcaagtccgctttacctctaacacccctaccgcaagtcggtctatcctaacctgtttacaagtcacctccttggagtcgatgcccatagtctgtgaatatcccgacgtgtttccggaagaattaacgagtatgccaccagaccgagagattgagttcgccatagaactggcgccaggcaccgcaccaattgcaaaaagaccctaccgattggcagctaatgagttagcagaagttaaaagacaaattgaagaattggagagtaaaggttatgtgcgacctagctcatccccttggggagccccagtgcttctggttaagaaaaaggatggctctgagagaatggtaatcgactatagagccctgaatgaagtaactataaagaacaagtacccgttgccacggattgacgatttattcgatcaacttaaaggagcaagagttttctcaaaaattgacttgaggtcaggttaccaccaattgaaaatcagatctgaagatatcccgaagaccgctttctcaacgcgttatggtctatatgagttcacagtgatgtccttcggactcaccaatgctccagcattcttcatgaacttaatgaacaaaatcttcatggaatacctggaccagtttgtcgtggtgttcatcgatgacatcctgatatactccaagaatgaggaagaacatgctgaacacctgaggctgataatggaaaagctcagggatcatcaactattcgctaaattctcgaaatgcgaattctggttggatcgagtagcatttcttggacacgtgatctcctccaacagtgtcgaagtagatcccagcaaggttgaggctgtacttgcttggaacccgcccaagaatgtgtcagagattcgcagcttccttggcttagctggatattatcgaagattcattgaaggattctctaagctagccagacctatgaccgagctgttaaagaaggaaaagaaatttcaatggtctgcagcctgtgaagacagctttcaagaaatgaagaaaaggttgaccactgccccagttctcaccttgccagatatccgaaaggatttcgagatcttctgtgatgcatcaagacaaggcttaggatgtgtcctaatgcaagaacgaaaggttgtggcctatgcatccaggcagttcaggcctcatgaagtcaattatcccacccatgatctcgagttggcagccgtggttcatgctcttaagatctggaggcactatttaatcgggaacagatgtgaagtatacaccgatcacaaaagtcttaagtacatcttcactcagaccgagttaaatatgaggcagagaagatggctggaactaatcaaggattacgatcttggaattcattaccaccccggtaaagctaacgtggtcgctgatgcgctaagtcgcaaggcctattgcaatatagctcaaatacggcctgaccaagatcgcctgtgcagagaattggagaagttaaggctgaccgtggtacagtcaggtgtccctgccagcttgacagtgcagccaaccctagaatcgcaaatccgggaggctcagaaagatgacgaagggataaaagaattaataaaaagaatacaagagaagaaagacaccgatttctccatagacgaccaaggcacagtttggtgcggtccacgcatctgtgtaccggccaaaaaggagttaagagatctcatcctaaaagaagctcatgagtccgcctactccattcatccaggaagtacgaagatgtaccaagatatcaaggcatacttctggtgggctggaatgaagcgagatgtcacagaatactggaaatgggaagagatcggaatggatttcatcaccggtttgccaagaacccctagcgggtacgactccacctgggtaatcgtggaccgactcacgaaatcagctcatttcgtgccagtgaaaaccacctttgatggaaagaaactagcagaactctacatgacccatgtcgtgtgtagatttggctgtcccaagaagattgtgtcagaccgaagcactcagttcacctcaagttatcaggccagcattcagatgttgccgaatgaggcaatgttcggaagaaagtgccgcactcccttgtgctggaatgaggtgggcgaagcgctggtattcggtcccgacatacttaaggcagcaaaagaacaagttaagctgatccgagaacgtttaaagacagcgcagaaccgtcagaaggattacgctgacaatcggagacgtgaccttgagttcgaaaaaggagatcatgtgtacctgcgggtatcgcctctccgtggtatgaggaggtttgggatgtccggcaagttagcaccccgctgcatcggcccctacctcataactgccagacgtggcgaagtggcttatcagcttgagttacctgaaggtctcgcagatgtgcacaacgtgttccacgtatcccagttaaagaaatgtctccgtgttccagaagaacaagttcccctgggtaatatcgtgctggaaaagaatctgacctacaaggaaagaccgatcaaggttcttgaagaggcagaacgtcagactagaaggaagaccgtcaagttctacaaggtgcaatggagcaatcattctgaagatgaggcaacctgggagcgagaagatcttctccgcgccgagttcccggagctgctcccttag

SEQ ID NO: 13909 - DNA, 4026 bp, Oryza sativa
  Clone ID: TFbOSC900076j.C1.o3.np
atgccggtgaacttgtaggcacaaggcctatggtctgccgtggagccaggagacaacgaccgcgtcgaccgtcaagcgctcgcggcgatactccgcgcggtgccgcctgagatgctgtccaccctcgctatcaaggagacggtgcaggaagcatggcaggccatcaagatccggaggattggcgtgcggcgcgtgcgcgaggcgaatgagcagcagctgcggcgcgagttcgccgacatgtgtttcaaggacggggagtccgtggacgacttctcgctgcgactctgcggccccgccaacaatctccacacactcggtgacgaaatcactgaagcagaggtcgtcaagaagctgctgcatgtcgtgccggagaacttgcagcagatcgccatctcaatcgagacactgctcgaattgacgagatgtcccttgaagaggtgactggccgtctgcgttccgtcgagcagcgcaagctgcggaagggcaacggcgaccacgtcgatgccaacggccggctactctacacggaggaaaaatggctggctaagttccgtaagtctgcttctttgctggatggcggacaaagcgggagctcctcctctggcggcaatggcggccgccagggttgaggacgtgggaagaagaaaacaatggcgcttccaaagagacccagcccaagtcaaacgacgcgggccgcaatcctggaaattgcacctattgtggaaagcggggtcactgggccaaggactgccgcagcaagcccaagcctcaacaggcccatgtggcccaagaggacgatgaagggcccaccttgcttcttgctcgtgcagttcctgttccgccactgcctcgcgctacgccggcgaccccgccgcagtctaagccgctggaggttgtgcaagcaaaggtcttcgcgtcactcgacgacgcagcagagcgaagccagcggagatggatcctggacaccggcgccaccaaccacatgacggggtccagatctctcttcgccgagctggacacggcaatcactggcaccgtcaagttcggcgacggcttggtggtctccatcgagggacgcgacaccattctcttcgcttgcaagacaggcgagcaccgggcgctgaccggcgtctacttcatccctcgcctcacggccaacatcgttagtctcagacagatcgacgaagctgggagcaaggtgttgatttaccacgaggtgctgcggatttgggatccacaaggccgcctcctcgtcagggtagatcggggcgttacacgcctctacaccatcgacctcgatgttgatcgcccggtttgcctcgccgcacggagctcggaaccggcatggcgctggcatgcaaggtacggccacctcaacttccaggcgctgcgcaagctatcccagaagtcgatcgtgcgcggccttcccatgctggaccaggtgaacaaggtctgcgatgggtgcctcgtcgggaagcagtgacgcgcaagctttccgtcctgctccaagtaccgcgcgaccacgcacctcaacctcgtacatggtgatttgtgtggcccagttgaacctgcgacgcccgccggcaatcggtattttctccttttggttgatgatatgagccgctacatgtggttaacactgatcaggagcaaggacgaggcagcctctaccatcaagcacttccaggcacgcgccgaggtggaaagtggtcgtaagctgcatgtcctgcgcaccgaccgcggcggcgagttcaattctatcgagttcggcgaatactgcgttgatcgtggcgtccatcgacaacttacggcgccctactccccgcagtagaatggagcggtggagcaccgcaaccagaccatcatcgccaccgcaaggagcatgatgaaggccaaagggatgccgggcctcttctggggggaggccgtctccacagccgtcttcctcctcaaccgctcgccgacaaaatttctcgctaacaagacgccttaccgggcgtggtatggcgagcgccccgccgtccactttcttcgcacgttcggctgcatcggccacgtcaataatgacaagccggggctgaaaaagctcgacgaccggagcgccccgatagtcctgcttggctacgagcaggggtcaaaggcctacaggctctatgatccggttggtgaccgggtacatgtgtctcgtgacatcgtctttgacgaggacgctgcctggagctgggatgccgcgagcatgggctcgccgaataggagccgttcaccgtcgaacacgcggtgagcacgaccaaggaagaagtagtgacgcccgcaagctctcccccgcgatcgcaatcgccaccaacgccggtttcaccgactccagaacaaggtatgcaagcaacggaggcggaagtggagcacgcctcgcctccatcgcacgactccatcctcgacaccgacgccgaccccgagaaacgcgagccgcgctaccgcacgctcgacaacatcctcgggccagcttcaccgtccggcatggcgacgcgcctgctcgaacaactcgagctccatgccgtgagcgccgaggagccatcgtcgctggctgaggctgaggctgaggttgacccaaactggaagggggcgatggaagacgagatgaaatcgatcgaggagaacaatacttggagcctcactgatttacctgcagggcacagggcgatcggtctcaagtgggtttacaagttgaagcgagatgaacagggggctgtggtgtgccacaaggcgaggctcgttgcaaagggctacgtccagcgacagggggtggactttgatgaagtgttcactcctgttgctcgcctggagtcggtgcacttactcctcgccgttgctgcacatcaagcttgggaggtgcaccacatggacgtcaagtcagcgttcctcaacagtgagctccaggagatggtatttgtttagcaaccacccggcttcatcaacgccaacgatcaaggcaaagtgtacaagctccataaggtgttgtacggtctccggcaagctccttgagcgtggaacgccaagctagatagctccttgttgtcgctgggtttctgttgcagcagctcagaacatggagtctacacacgtgccaccgccggcaagcgactgatcgtcggtgttgatctcggaacactcaaatactacctcggcatctaagtgactcaacgcagtggctgcatcacgcttggccaatctgcgtacgccaccaagatattggagaaagctgggctccaagactgcaatccaagtcagactccgatggaggtatgtctcaaattgagtaagaactccgattctcctttgatggattcgactttctactgcatcctcgtcgggagtcttcgttacctcgtcaacacccgccccgacctggcatatgcaatcgggtatgtcagcagattcatggagactcctagagaagagcatctctctgctgtacggcgtatacagcgctatgtggccgggacgaggaactggggactcacttacctcggtgggaaggaagaaaagcctagtctgctgggttatagtgacagtgacctagcaggcgacactgacgatcgccggagcacctctggacaaatcttcttcaccggtggaagcccagtcacctggcaatcctccaagcaacgagtggtggtggctctgtcttcttgcgaagcagagtacattgctgctgcggtagcagcatgccagggagtgttgttggcgcgactcctgactgatgtgctggaggctgatgcgcctgctccaaaactgatggtggacaatcagtccacaatttctcttgtcaagaatcctgtgcatcacgaccggacgaagcatgttgacatcaaatttcattatctccgggagtgcgcagaacaaaagctaatcgaggttgcgttcgttggcaccgctgatcagcttggggatatcttcaccaagtcactcggcagaaccaggttccacgagctgtgttccaagattggtgtttctgatcttcgtcaaagg

SEQ ID NO: 13910 - DNA, 841 bp, Oryza sativa
  Clone ID: TFbOSC33028j.C1.o2.np
gtaggcgctctcgcggacccaccgcgccaccgcgtccgcggccgtccgccgccgcccggcgctgccccggtagatgttctccccatacggcccacgggagtgcttgagcgtgcagtcgtgggacctcttctcgccgtacctccgcgcgtacgcggcgagggtgccgtcccaggagagcttgccgacaccgacctccgcgcgcgcggcgttgtggggttgcaggaagtcgtgcggcgagttcgagaggaggtggctgcgacgccgaggatggcgacggcacggcctaccgacgcacgacagaggagggagaggcggctggaggcggccggcggcacgagagagagcggacgacggcggggaggggtggtgtggccacggggagacgcgggaggaggctaaaacgagagaacggaaggagggggttccattttataggcgcggggagggagctggccacgggagagggcggaacggaggcgggaatggcggccggcggccatggaaggtggccggggatggcgcggctgttccgggcgatcggattggagggaggaacggcgctagggttcacaggagagagaggaaggaggccggcggctggaggtcggggacgcctgacgggcgggacccacgtgggaggtgcgcggtcaacgcgcgtgcggcgcgcgtgcgcgggagggctgcggctcggcttgggccggggcaggcccaggcgggaggaggagaggagggagctgggccgaggggaggggagaggggtggcccgagagaaggaagggagggggacggaatcttgcacccaagattcgagaaggctagcaagaagataggtgggcagtct

SEQ ID NO: 13911 - DNA, 2179 bp, Oryza sativa
  Clone ID: TFbOSC4448j.C1.o1.fg
agagaagttggatttgcttcagtgcactgatcaggagaaagtctcatttgcatcacaccagttgcatggccctgcctctgaatggtgggatcacttccgcttgaataggactactgctgaacctatcacttggcttgaattcaccgctgctttccggacgacgcatataccatcgggagtggtgtctctcaagaagaaggaattcaggtcgctcactcagggttctcgctctgtcactgagtatctgcacaagttcaatcgtttggctcgttatgctccggaaaatgtgcgcaatgatgaagagcgccaggagaagtttttggaaggacttaatgatgagctttcttacccactcatgacgggggaatatcatgatttccagaagttggtggataaggctattcgccaggaagacaagtacaaccgcatggagcaaaagaaacgccggattgctcaattcaaggcacaacaggggaatagtcaaaggccgcgtcttactttgggaccccagtccatgccacagggaggttcttcgtctgttgttcgtccgcagcgtcagatcttcaacaacaatactggcaacaacatccgcaatcaagctccacgccctgttgcggttttgacacagcaacaacctgctaagagggagcaaggcagcaagcccgtggtgtgtttcaactgtggagacctaggacattacgctgataagtgtccgaagccccgacgcgtgaaggttgtccctacccagagcaactctaccgtaccagcatcaaaggctcgtgtcaatcatgttgctgctgcagaagctcaagatgctccagatgtgattttgggtacgttccttgttaacttagttcctgcaacagtgcttttcgattctggtgctacacattcattcttatctatgagttttgcgggaaatcatgggatggaagtagaagatcttagacgtcctttgatggttagtaccccaagtaatcaagcactctctttgcaacgtagcccctctgtcagaatagaaattcaaggagtaccatttctggccaatcttatcctgttagaatccaaagaccttgatgtcatcctagggatggactggttagccagacataaaggtgtgatagactgtgccaacagaaaagtaactctcaccagcaatgatggtcgcgttgtaacagttcatgcattgttttttgagtctttaaggtcaagattgaaccaaatatactttggaaaagattcctatagtccgggagtatcccaatgtgttcccagacgatttacctgggtatccgccttaaaaggatatagagttcagaatagatttggtaccagaaccactccgatccataagagaccttatagaatggcagccaatgagttggcagaagtcaagaggcaagtagacgatttgcttcagaaaggatacatcagaccgagttcatctccatggggagctccagttatttttgtggaaaagaaagaccatacccagaggatgtgtgtggactatcgtgcactaaatgatgtgactatcaagaataagtatccgctacctagaattgatgatttgtttgatcagcttaaaggtgccaccgttttctccaagatagatcttcggtcagggtatcaccagttgaggattaaagaggaagatatacctaagccagcttttaccactagtaaggtgtttatggaatacctagacaagtttgtggtggtctttattgatgacattcttatctactcccgaaccaaagaagagcatgaagaacatcttcgccttgcactagagaagctacaagaacatcaattgtatgctaagtttagtaagtgtgaattttggttgtctgaagtgaagttcctgggtcacgtcttctcagcagagagtgccgtcgatcctagtaatgtggaatccgtaaccaactggaaacaaccgaagatagtttcagagattcgcagtttcctaggcctcgcaggatattatcggagatttatagagaatttctccaagattgataagcccatgacacggctgcttcagaaagaggtggagtacaagtggtcagaagaatgtgtcacgaccggaaataacccaacgggctttcctgacgtgcgtgcattaatccttgtcccaggaggcaaggtacaccaaaagttgatacaattcagagtttaa

SEQ ID NO: 13912 - DNA, 4155 bp, Oryza sativa
  Clone ID: TFbOSC900056j.C1.o5.gm
atggaccaataccgaccactggtcgaagatctcaaactgctgtggaagaaagaaggcgtcctccccgtgtgggatgaggacaaacaggggatgctggtagcggcgagcgtcagcctcgtggacatcgagcaacctctgagtttcgatggcgtggggacgacgcgcatcgagggcttggtggaggcggcgggctcggcgagggaggttgatggtggcgaaagaggagttggcggtggaagcgggctcggtggagagtgtcgccggtcggtggagacgccggtcgggcaggtggcgtcgggcgtcggagaggaggaagcgacgacaacgaggaaggacgttaccgggctcgcggcgccgggctcggtggaggcggcggcctcgggctcagcgaggaaggcggcggcgccgggctcggtggagggcgtcgccggggacccccggtgtctcctctacccgccgccaccctcgctttcgcctctcgtcgtcggaaacgccctagcgccgtgtgccctagcgccgccgtcgccgccgtcgctccagccgtccttcgccgccgttccggtcgtcgccgtcgctcgggaagaccgtcgtcgtggtcgccaagtcgtcgccgtcctcgtccgccccttcgccgtcgctgtagaccgccggagcaccgtcgccgtcgtcaagccgaagagcgccgccgcttcttcttcgttgccgtcgccgtccgttcctcttccgccgctcttttggtcaccgcgctgccgttcgccggcgagcgtgcgccgtccgagccgccgagccgccgccgccggtggtgacgtcaccgctgacgtcatcgtcgccctctcccggggtgattatgatccaggaaaggtgcgctgcagtggattgtgttatgcaaggggtattgtcacaactcctttccgaggtaccgtggtgatgccgcgctacaagcctgagtacttgtttggtgttgagggttttgtccaggagttgagtacgatgtcctttgtcattggatttgggactgcccctttttatgctcagattcctcatgatcgtcatgaagagaagtgccgagtcaaagtcactttgaacagtaatagtgaagatatcccctcagtgatgttcgaagctggaggaagaaactacatccatgcatgtcaggaggtggcaaggatcgccataggagagctccgtgatcgctacagtgatcagttggccgacactgagtatcgctaccatcctcgccaaccacagggaagtgaccgtggcagctaccttgagactgaaggaattgagaatgatgctaccacaaggcatttggtcgagatgctgtgggctatggatgaaagtcgtgcggagactgtgttagcggctcaagatcgtgaagaccggaatcgtggtaagatttgcaagttagaagacaaggtggatcgtttggagagggaactagctgcattgaagggagaagcaccgccgcagaaggctaggattcgtctcaccgcaaggaagagagctctatttgtccctcgctatcaattggcgccaaaggttcgtgtggtggagaaagaagttgccccaaccctagcagatcctccggtcatcatcataagtgatgatgaagaagaagaatccaagcgcaaccattccaagattgagtgggaagctactcaagatgatgaagacgagccgaacgagccttcaatcgacctccgatgctcggaagaactagacaacgggaatggccccaacaacaacaataacaataacaatgaagggaacccaacccttgctcaagttcttgctcaacagactcagttaatgaacatgatgatgcagcaacttcagaatcagcagaaccaaggaaataaccatgcacctccccagaacaagttagcagaatttcttcgtgtgaggccgcctattttctctagtacctctaatcctgttgaagctggtgattggttgcatgccatagagaagaagttggatttgcttcagtgcactgatcaggagaaggtctcatttgcatcacatcagctgcatggccctgcttctgaatggtgggatcacttccgcctgaaccggactactgctgaacctatcacttggcttgaattcaccgctgctttccggaagacgcatataccatcgggagtggtgtctctcaagaagaaggagttcaggtcgctcacccagggatctcgctctgttacggagtatttgcacgagttcaatcgtctggctcgttatgctccggaagatgtgcgcaatgatgaagagcgtcaagagaagttcttggaaggacttaatgatgagctttcttacccactcatgactggagattattctgatttccagaagttggtggataaggctattcgtcaggaggacaaaaacaaccgcatggagcagaagaaacgccggattgctcaattcaagacacaacaggggaataatcagaagccgcgtcttactttaggaccccagaccatgccacatggaggttcttcatctgttgtacgtccgcagcgtcagttcttcaacaacaatgctggcaacaacatctgcaatcaagctccacgtcctgttgcagctccaacacagcaacaaccttccaagagggagcaaggcagcaaacccgtggtgtgtttcaactgtggagacctaggacattacgctgacaagtgtccgaagccccgacgtgtgaaggttgtccctacccagagcaactctaccgtaccagcgtcaaaggctcgtgtcaatcatgtcgctgctgcagaagctcaagatgctccagatgtgattttggtccgggagtatcccgatgtgttcccagatgatttacctgccaatgaattggcagaagtcaagaggcaagtagatgatttgcttcagaaaggatacatcagaccaagtttgtcaccatggggagctccggttatttttgtggaaaagaaagaccatacccagagaatgtgtgtggactatcgtgcactaaatgatgtgactatcaagaataagtatccactacccagaattgatgatttgtttgatcagcttaaaggtgccactgttttctccaagatagatcttcgatcaggatatcaccaattgagaatcaaagaggaagatatacctaagacagcttttaccactaggtatgggttgttcgaatgtactgttatgtcttttggacttaccaatgcccctgctttcttcatgaacttgatgaataaggtgtttatggaatacctagacaagttcgtggtggtctttattgatgatattcttatctactctcgaaccaaagaagagcatgaagaacatcttcgccttgcattggagaagttacgagaacatcaactatatgctaagtttagcaagtgtgaattctggttgtctgaagtgaagttccttggtcacgtcatctcagccggtggagttgccgttgatcctagtaatgtggaatccgtaaccaactggaaacaaccaaagacagtttcagagattcgcagtttcctaggcctcgcaggatattaccggaggtttatagagaatttttccaagattgctaagcccatgacacggctgcttcagaaagatgtgaagtacaagtggtcggaagaatgtgagcagagttttcaagagttgaagaatcgcttgatatcagctcctattttgattttgcctgatccaaagaagggtttccaggtgtattgtgatgcatccaaacttgggttaagttgtgttctgatgcaagatgggaagccgtccttcgccgccgttccggtcgtcgccgtcgctcgggaagaccgtcgtcgtggtcgccaagtcgtcgccgtcctcgtccgccccttcgccgtcactgtagaccgccggagcaccgtcgccgtcgtcaagccgaagagcgccgccgcttcttcttcgttgccgtcgccgtccgttcctcttccgccgctcttttggtcaccgcgctgccgttcgccggcgagcgtgcaccgtccgagccgccgagccgccgccgccggtggtgacgtcaccgctgacgtcatcgtcgccctctcccgtgagccggcgggcccgcccgccgccctcgctgacgggtgggtcccacctgtcatctccctcctcgcgccgcgccgccgcccgcccgtgccctag

SEQ ID NO: 13913 - DNA, 3237 bp, Oryza sativa
  Clone ID: TFbOSC900175j.C1.o11.fg
atggatgaagtcgggggtcgatggacattctccagggcaaatgaaggctacacgagctgcggcccgatgccgcgctacaagcctgagtacttgtttggtgttgaggggtttgtccaggagttgcgtacgatgtcctttgtcataggatttgggactgcccctttttatgcccagattcctcatgatcgtcacgaagaaaagtgccgagtcaaagtcaccctaaacagtaatagtgaagatatcccctcagtgatgttcgaagctggaggaagaaactacattcatgcatgtcaggaggtggcaaggatcgccataggagagctccgtgatcgctacagtgatcagttggccgacactgagtatcgctaccatccttgccaaccccagggaagtgaccgtggcagttaccttgagactgagggaattgagaatgatgctaccacaaggcatttggttgagatgctgtgggctatggatgaaacccgtgcggagattgtgttagcagctcaagatcgtgaagaccggaatcgtggtaagatttgcaagctagaggacaaagtggattgtttggagaaggaactagccgcattgaagggagaagcaccaccgcagaaggccaggattcgtcttaccgcaaggaagagagctctatttgtccctcgctaccaattggcgccaaaagtccgtgtggtggagaaagaagttaccccagccctagcggatcctccgatggtgctcactcgcagcaacgggaatggccccaataacaacaacaataacaacaacaatggagagaatcccacacttgcccaagtcctggctcaacaggcacagcttatgaacatgatgatgcagcaacttcagaaccagcagaaccagctcaaccaagggaacaacaatgctccaccgccgcagaacaagttagcagaatttcttcgttgcactgatcaggagaaagtctcatttgcatcacaccagttgcatggccctgcctctgaatggtgggatcacttccgcttgaataggactactgctgaacctatcacttggcttgaattcaccgctgctttccggaagacgcatataccatcgggagtggtgtctctcaagaagaaggaattcaggtcgctcactcagggttctcgctctgtcactgagtatctgcacgagttcaatcgtctggctcgttatgctccggaagatgtgcgcaatgatgaagagcgccaggagaagttcttggaaggacttaatgatgagctttcttacccactcatgacgggggaatatcatgatttccagaagttggtggataaggctattcgccaggaagacaagtacaaccgcatggagcaaaagaaacgccggattgctcaattcaaggcacaacaggggaatagtcaaaggccgcgtcttactttgggaccccagtccatgccacagggaggttcttcgtctgttgttcgtccgcagcgtcagatcttcaacaacaatactggcaacaacatccgcaatcaagctccacgccctgttgcggttttgacacagcaacaacctgctaagagggagcaaggcagcaagcccgtggtgtgtttcaactgtggagacctaggacattacgctgataagtgtccgaagccccgacgcgtgaaggttgtccctacccagagcaactctaccgtaccagcatcaaaggctcgtgtcaatcatgttgctgctgcagaagctcaagatgctccagatgtgattttgggtacgttccttgttaacttagttcctgcaacagtgcttttcgattctggtgctacacattcattcttatctatgagttttgcgggaaatcatgggatggaagtagaagatcttagacgtcctttgatggttagtaccccaagtaatcaagcactctctttgcaacgtagcccctctgtcagaatagaaattcaaggagtaccatttctggccaatcttatcctgttagaatccaaagaccttgatgtcatcctagggatggactggttagccagacataaaggtgtgatagactgtgccaacagaaaagtaactctcaccagcaatgatggtcgcgttgtaactgttcatgcattgtcttctgagtctttaaggtcaagactgaaccaaataactttggaagagattcctatagtccgggagtatcccgatgtgttcccagacgatttacctggtatgccgcctaaaagggatatagagttcagaatagatttggtaccaggaacaactccgatccataagagaccttatagaatggcagccaatgagttggcagaagtcaagaggcaagtagacgatttgcttcagaaaggatacatcagaccgagttcatctccatggggagctccagttatttttgtggaaaagaaagaccatacccagaggatgtgtgtggactatcgtgcactaaatgatgtgactatcaagaataagtatccgctacctagaattgatgatttgtttgatcagcttaaaggtgccaccgttttctccaagatagatcttcggtcagggtatcaccagttgaggattaaagaggaagatatacctaagacagcttttaccactaggtatgggttgtttgaatgtactgttatgtcttttggacttaccaatgcccccgctttcttcatgaacttgatgaataaggtgtttatggaatacctagacaagtttgtggtggtctttattgatgacattcttatctactcccgaaccaaagaagagcatgaagaacatcttcgccttgcactagagaagctacaagaacatcaattgtatgctaagtttagaggagttgccgtcgatcctagtaatgtggaatccgtaaccaactggaaacaaccgaagatagtttcagagattcgcagtttcctaggcctcgcaggatattatcggagatttatagagaatttctccaagattgataagcccatgacacggctgcttcagaaagaggtggagtacaagtggtcagaagaatgtgtcacgaccggaaataacccaacgggctttcctgacgtgcgtgcattaatccttgtcccaggaggcaagactgagccacaaactaagccttacccactagacatgtggaagtacggtagtgctttgcaacagaggcccgaagaccggtccttatatggccgaggtgctaccatcaaaaccatgcaccccgagcccagcctaaaaccattttggggattttga

SEQ ID NO: 13914 - DNA, 379 bp, Oryza sativa
  Clone ID: TFbOSC1516j.C1.o2.np
atgaagagaatagtgggaagtaaactgaatgtaaagaaagtgaatccgagctgtctgttcgtgggagctattcccagttatgaaccaagtgatatgttcgaagatagtcttgaagtgggtaacttgtatgaggttgacgccaaagatatgaattatgagaagttctggaactgaagtcccatcttcaagtgccacaatccaatcgaagtcagctagaggtgcaaccagggaaaagtcaggtgaagagaagattccatctgcaacaggagattgagccaagcagtccagagtggagaagttttgctaggcaagtttgttataaaagatgcgacggaagaagtcggacaagaagagaagaccgcccaacctatcttcttgc

SEQ ID NO: 13915 - DNA, 4346 bp, Oryza sativa
  Clone ID: TFbOSC400773j.C1.o40.np
atgggggaaaatcaaggaattgaacaggtgatgggaaaattggtagatatgcttgcaaagaaactcagtgagacctctactactatcaatgcaattgttcctcatgctgaatcagtacaaaaaattgagttgatgcaaaatgatattaagttggagggtgtcaaaaattatttgagttggacaaggagagcaatgttgattttaaagacaaaggggttagaaggatatgtcataggagaagtgaaggagcctgagagcacaagtgtagaatggaaaacttgaagtactaccaactctttagtggtagcgtggtagttgacctcactaatccctgctattgctacaactgttgagaccatctctagtgcgagtgagatgtggaaaactctcactaatctatactcagaagaaggtaatatgatgctaatgatggtggcacaagagaagataagtgctttgaaacagggggagcgcctatggcagaatatgtcgcagagttgaagtgtttgtgatttgatttagattattatgatcctcttgggttagagcattctaattacatagcaaaaatgaagaaatgggtagagcgtaaaagggtccttgagtttttgaagggcttaaatccggagttcaaaggaagaagagatgcaatgtttcaccaaaccactcttcctaccttagatgtggctattgcaactatggcacaagaggagcttaagaagaaactatttcctatgccacatcgtcttcatcaagtcccacctatgcaattgtacaaggtaataaaactagagagtgctttaattgtggtgaaatggggcatcttatgtgtgattgtcgtgcttctcacaagcctagttatggaagaggaagaaatggtgatagaggaggagcaagaggtggaagaggttatgaaagtagagataacagaggtagaggctatgagtacagaggtgatcacaaagctaatgtggtcactcttgaagggggttcttctgaacctataaatgttgatgttaccaactttgttcattccacctcagataattcaaatcaagcatttatgtccatcaatggttcttatccaaattggatattagactctagtgcattacacatgtaacgagtatgcgtggggcatttgcatcatataaaccatacccatttacacgtaaagaaacaattcaaattgccgatggaacatcatgcccacttaagggagagggtacagtgcagtgtactccttcaatcactttatcatcagtgttatatatttcttcctttccagtgaatttggtttcaaaaagttttcttgttgatcatatggactgtcaagtctcccttgatcgtgagaattgtttaattcaggagaggcaaacagggaagaaacttgggattggtgtcaggcatgatggactttcgtatttggatcggggaaggactaatgaagccatgtgtctagctttgatggcttccacaagtgaagaagagctaaggtgttatttttgcactgtcgattgggacatatatcttttgaaattataagtaaaatatttccagtagagttcagtagagtggataaacataagttagtatgtgatgcttgtgagtatgggaaacatacaaaaatgtcatatgtgagtagaggactccgaagtatgttgccctttatgctaattcactcagatatttggacctcacctgtggtttctatgagtggaatgaagtattttgtcacctttattgattgctactctcgcatgacatggatatatcttatgaggcacaaggacgaggtgcttaaatgcttccagaatttttatgcttacattaaaaatcattttaatgctcgggtttagtttattagaactgacaatggaggggagtatataaataagaatttagtaactttctttcatcagaaggaatattacatcaaacttcttgtcctgatactcctccacaaaatggggtggctgagaagaaaaatcatcatcatttggagacagctcgttcattgatgtatactatgaatgtacctaaattcttgtggagtgtggctgtaatggcagcaacatatcttatcaatcgtacaccatcgggaatacttgggatgaagacaccatatgagatgatatttcacaagaatgtatttgttcttccaccaaaggtgtttggttgcacatgctttgtcagaaacaacagaccttctgttgcaaaacttgatcttcataggttattcctctggccagaaggggtataagtgttggagtccatcagaacaatgaacatttgtaagtacggatgttacttttagagaatttgttccattttatgatgagaaaatagatttaagttcttttttttgttgatcttgataattcaactagtgtaatcatgataaacaaagggaggataaaataatgggttccaaggaagatgaacaagcgaaggagaaaaaagttgtgattggccaaatcccagttgatatgaatgatcctatataagagcaagagttgagaaagccacatgaagaggaaaatcttcaagtttacaaaaggagggcaagatttccagtgatccaataagttgtagaggataattaagtagtgggagatgcaagtcatgtgcaagtgcctttggagttagggggagaagaggatgaagttagagaagaagaatctaacttaccaattgccgtcagaaagggtgtaaaaagcaatgtaggtaaacctccctaagatatggttttgaagctcaagatgagggtaatgatgagaataacatatccaactatatttcttatgactctttgtcatctacatataaggcctttgtagcatcggtagatttagtgggaattctaaagaattggagagaagcaaagcaagatccaaaatgacatcaaactatgctggatgatctagaggctcttgagaagaacaaaacatggaatcttgtaccatttcctgaagggaagaaagttgtcaactgtaagtgggtatatacaataaagcaaaaccttaatggaaagaaggaaaggtagaaagcaaggcttgttgctaaggggtatagtcaaacatatggaattgattatgatgaaacttgtacaactaattttgattggtcactgcatcaattagatgtcaaaaatgcatttttacatggagaccttcaagaagtggtgtatatggatatcccacctggatttagcacttcacaaactgaaggaaaaaagtgttgaggttgaagaaatctttatatggtctcaaacaatcaccaggagaatggtttgattgttttcaacgtgtaatgtgtggcatgggttataagcaatgtaatggggatcatacatcattctatcatcataagggatgtcacgctactatctttgccgtgtatgtggatgacatgattatcattggggatgattctatagagatagcaagattaaaagaaaatctaagtaaggaatttgaacttaagaatttgggtcagctgaaatacttaggcattgagattgcaagatctcctagagggatagtactttcacaatgaaagtatgcgttagatctactcagtgacacaggtatgcttggttgtcgaccagcctctacacaaattgaacaaaaccataagttgtgtgctgaattaggagacccagtaaataaagagagttatcaaagacttgtgggacaggtgatatacttgtgtcatacaagacctgatataacccatgctgtaagtgtgataagtcagtatatgcataatcctagaagtggtcacatggatgctgtgtatagaattttgagatatttgaagggaagcctaggtaagggcttatggttcaagaaaattgacatcttgatgtggagggatactgtgatgcagatcagggcaactgtcttgatgatagaaggtcaatatcaggctattgtgtatttgttcgtggcaatttagtatcttggagaagcaagaaacaattggtggtgtctcgttcaactgctgaggcagaatacaagtcaatgtcgattagtttgagcgagttgttatgggtaagagatcttctaactgaattgaagttgatgataaacattcccatgaagttatggtgcgacagcaaatcagccattaatattgctaacaattcagtccaacatgatcgaacaaaacatgtggagaccgatcgcttctttattaaagaaaggatagatgacaaaaccttgaagttaaactttgtgaattctagagaacaagtggttgattgtttaacgaaggctttaggtgttaaatagtgtatgtcgtcatgtagcgagatgggcatgatagatatttatcgcccatct

SEQ ID NO: 13916 - DNA, 5133 bp, Oryza sativa
  Clone ID: TFbOSC32500j.C1.o1.np
ctcctggtttggaatggtatattcctggtttggagatagaactgtgtagccaggaatggttgttcagaaagtttgggcctatgcaacgggatgccgcgcttcaagcctgagtacttgttcggtgttgagggatttgtccaggagctgcgtacgatgtcctttaccataggattcgggactgcccctttgtatgcccagattcctcatgatcgtgataaagagaagtgctgtgtcaaggtcaccttgaatagtgatcgtgaagacctcccatcggtgatcttcgaggctggagggggaagctatcctcatgcttgtcaggaggtggcaaggatcgccataggagagctctggaccgttacaatgatctgttggccgacactgagtatcgctaccatcctcatcagccccagggaagggaccgtgccagctatgttgaccctgaaggaattgagaatgatgctagcacaagacatttggtcgagatgctgtgggccatggatgagtcccacgctgaagtcgtgtcagctactcaagctcgtgaagaccggaaccatggtaagatctacaagctggaggacaaggttgatcgtctggagaaggaactgaccgaattgaagggagaagcgccaccacagaaggccagggttcgtcttaccgcaaggaagagagctctttttattccccgctaccagttggtgcccaagatggtgaacacttgcagcaatggaaatgggcccaacaacaacaacaacaacaacaaatgagagattcccacgcttgcccaagtcctagctcaacaggcccaactcatgaacatgatgatgcaacaactccagaaccaacagaactaggggaacaatcacgctcctccccagaacaagttagcagaatttcttcgtgtgaggccgcccactttttccagcactaccaatccggttgaggctggtgattggctgcacgtcatagaaaagaagctggacctgcttcagggcactaaccaagaaaaagtctcctttgcttcacatcagcttcatggccctgcctctaagtggtgggatcacttccgtctcaacagggctactgctgaaccaatcacttggcttgagttcactgccgctttcaggaagactcacgtaccatcgagagtggtgtctctcaagaagaaggagttcagggcgctcactcagggatcccgttctgtcaccaagtacatgcatgaattcaatcgtctggcccgttatgctccggaggatgtgtgcacagatgaagagcgtcaagagaagttcttggaaggactgaatgatgagctttcttaccctctgatgactagggattattctgatttccagaagttggtggataaggccattcgccaggaggataagtacaaccgaatggaacagaagaaacgcaggattgctcacttcaaagctcagcagaggaatagtcagaggtcgcgtctcactatgggacctcaggcagtgtcacagggaggatcttcgtctgttgttcgtccacagcgtcagttcttcaacaacaatgctggcaataacaaccgcaaccaagctccacgccctgttgcaactccagtccagcaccagcctgtcaagagggagcaaggaaacaagccaggggtgtgcttcaactgtggtgaagcaggtcattattctgacaagtgtccgaagcctcgacgtgtgaagattgttcctgtgcagaataactccaatgcaccaacgtcaaaggctcgtgtcaatcatgttgctgctgcagaagcccaaggtgctccagatgtgattttgggtatgtttcctgttaactcagttcctgcaacagtgcttttcgattctggtgctacacattcttttttgtctatgagttttgcgggaaatcatgggatggagatggaagatcttagacgtcctttgatggttagtaccctagtaaccaaggactctcatcacaacgtagcccttctgtcagaatagagattcaaggtgttccatttctggccaactttattttgttagaatccaaagaccttgatgtcatcctagggatggactggttagctagatacaaaggtgtgatagactgtgacaatagtaaagtaactctcaccagcaatgatggtcaagttgtaactgttcatgcattgcctactgaacctttaaggtcaagtttgaaccaaataacattggaagagattcccatagtacgggactacccagatgtgttcccggatgatttacctggtatgccgcctaagagagatatataattcagaatagatctggtaccagggacaaccccgatccataagagaccttatagaatggcagccaatgaattagcagagggggatcaagagacaagtagatgatttgcttcagaaaggatacattagaccaagttcatctccatggggagctccagttatttttgtggagaagaaagatcatacccagaggatgtgtgtggattatcgtgcactgaataatgtgaccatcaagaataagtacccaatgcctagaattgatgatttgtttgatcagcttaaaggtgccaccgttttctccaagatcgatcttcgatcaggatatcaccagttgaggattaaagaggaagatatacctaagacggcttttaccactcagtatgggttatttgaatgtattgtcatgtctttcagacttaccaatgcccctgctttcttcatgaacttgatgaataaggtgtttatggaatacctggataagttcgtggtggtctttattgatgacattcttatctactcccgaaccaaagaagagcatgaagaacatcttcgtcttgcactagagaagctacgagaacatcagctttttgccaagtttagcaaatatgaattttggttgtctgaagtaaagtttcttgggcacgtcatctcagccagaggagttgccgtcgaccctagtaatgtggaatccgtaactaattggaaacaaccgaatacagtttcagagattcgtagtttcctgggtcttgcaggctattaccggaggttcatagagaatttttccaagattgctaagcacatgacacgcctgcttcagaaagacgtgaagtacaagtggtcaaaagaatgtgagcagagctttcaagagttgaaaaatcgcttaatatcagcacccattttgattttgccggatccaaagatgggtttccaagtgtattgcgatgcatctaagcttgggttaggttgtgttctgatgtaagatgggaaggtggttgcctacgcatctcgtcagttatgtccccatgagaagaattaccctacccatgatcttgagttagctgcagtggttcatgccttgaagatttggcgtcactatctctttggtactcatacggaggtgtacacggatcacaagagtttgaagtatatcttcacccagccagatttgaatatgagacagcgaatatggttggaattaattaaggattatgacatgggaattcattatcacccgggaaaggctaatgttgtagcagatgctctcagcaggaaaggcaattgcaatgctacggaaggacgacagttgccatgggagttatgcaaggaatttgaaagactgaatttgggaattgtcagtagaggttttgttgcagctttagaagcgaagtccacactcattgattagtgattaggttagagaagctcaaaccaatgatcctgatatccaagaaatcaagaagaatatgagaagaggaaaggctatcggttatttggaagatgagcaaggaactatatggttgggtgagagaatttgtgtcccagacaacaaggagttgaagggtacagtcctgaaggaagctcatgacactttatactccattcaccctggtagtaccaagatgtaccaagatctcatggagaaattttggtgggcgagtaggaagcgtgagatagcggagtatgtagctgtgtgtgatgtatgtcagcgagtcaaggcagaacatcagaaacccgcaggtttgctgcagcctttaaagataccagaatggaagtgggaggaaattgggatggatttcatcactggtctgcccagaatgtcatctggccatgattctatttgggtgatagtcgacaggcttacaaaagttgctcattgcatccctgtgaggacaacatattccggaaatcgtttggcagaattgtatatggcaaggattgtgtgtttgcatggtgttcctaagaaaatagtatccgatcaagcgagccagtttacttcaaagttctggaagaagcttcttgaagagatggcttctaagctgaatttcagtacctcatatcatccgcaaacagacggacaaactgaaagggtaaatcagattttggaagacatgttgagagcttgtgttttagacttcgatggaagttgttataagaatttgccttacgcagaattctcgtacaacaacagttaccaagctagtcttcaaatggctccttatgaagcactgtatggtcggaagtgccgcactccacttttgtgggatcaaacgggagaacgtcaggtttacgggactgatattctgagggaagcagaagagaaggtaaagatcattcaagaaagattacgtatagcccagtgtcgtcataagagatatgctgacaatcgccgcagggatctaagttttgagaaaggagatcatgtgtaccttcgtgtcacgcctcttcggggagtttatcgttttcacaccaaagggaaattggcaccgcgttttgtgggaccatataagattgtcagtagaagaggtgaggtcgcctatcagttggagttacctcaatccttggcaggtgttcataatgtgttccatgtgtcacagctaaaatagtgtttgagggtacccactgaagaagctaatcctgagcagatagaaatccaggaggatctgacttatgttgagaaaccaatccgtatcttggagacagatgagagaagaaccaggaatcgagttatccgtttctgcaaggtccaatggagcaatcactcggaagaagaagctacctgggaacgagaagatgaattaaagtcagctcatccgcatctcttcgccagctcttccgaatctcaaggacgagattctgtt

SEQ ID NO: 13917 - DNA, 2643 bp, Oryza sativa
  Clone ID: TFbOSC13800j.C1.o1.fg
atggaggcagaagactggctacgcatcatagagaagaaactgactcttgtcagggtacgcgaaaccgacaaagtaatcttcgcagtaaaccaactggaaggacccgctagtgattggtgggacacctacaaggaagctcgggaaaacgatgctggagaacccacttgggaggagttcactgcagcatttcgcgagaacttcgtacctgctgcagtgatgcgcatgaagaagaacgagtttagatggctgcggcaagggaatacaacggtgcaagaatatctgaacaagtttactcagttggcccgctatgcaattggagacctagcggatgaagaagaaaagatcgacaagttcatagaagggctgaatgatgaattgcgtggacctatgatcgggcaggatcacgagagtttccagagcctgatcaacaaagtcgtcaggctagagaacgatcaaaggacggtggaacacaaccgcaagaggaggcttgctatgagtcgcctacctcagatagtgcctcagcgactcaagggagccacttcatccggatggaagccccctatcgtggcaaccaaccgtcccgctgcacctagcaacttcaacaggccagttgcaattcagaaccgcacccctacaccaactttggctgcccctggagccaagatgaatgtgaactgcttcaattgcggggggtatgggcactacgccaacaactgccctcatccacgcaagactcctgtccggaccggcacgaatgcaatgactgttcgtggcactactacccctgttaccgggcgaggtctattcaagactccgcaatctaacaggaccgccactggacttgggcgcggacaagtgaaccatgtccgagctgaagaggcccaggaagatcagggcatactcatgggtatgttctctatcaattctaccccggttaaagttctcttcgattctggtgcatcgcattcatttatatctctgaaggctagtcaaaagcacaacttaaccctagtgggacttagaaagcctatgatagtacactcacctgggggcgagataactgtgagtcatgcttgcatagacgtaccaattcgtcttagggacgtggtgtttccctccaatcttatgatcttaatacctcagaccctagatgtcatactgggcatggattggttaacaaagaatagaggtgtaattgactgtgggcgtagagaggtgaccttaaccacaccctggggatcggatatgagagcaaccatggatcaagatcctaggctaaccgaacgtgccggaggtatatttaccatgctacccctaaagggaatgcctgtagtgcagcgatttcctgatgtgttcccagaagatttacctggaatgccaccagatcgtgacataaagttcattattgacctgatacctggaaccgcccccatatccaagagaccatatcggatgccggttaatgagttagaagaacttaaaaagcaaattagggagttgcaagaaaagggatttgtacgccccagttcgtcaccttggggagccccagtgctattcgtcaagaagaaagatggtagcatgagaatgtgtgtggactaccgatcactgaacgaagtaactattaagaacaagtacctactaccaaggattgatgatctcttcgatcaactcaaaggagctaaggtgttttcaaagatcgacattcgatcaggataccaccaactgaagattaggaccaaggatattcccaagaccgcgttttcaacacactatggattgtatgagttcacagtgatgtcatttggtctaaccaatgccccagcctacttcatgaatcttatgaacaaaataaacaccctggacattcaacctcttttgagaacccaaatagaagaagcccagaaggacaacgaggaaatccgagagttgaaggaacgcttagctgcaggacgtgcaaaggaattttcaatcgacgaaaaagatgttctatggtataaaaagagaatttacgtacccgaacagggtggactgaggggattaattttaaaggaagctcacgaatcggcatactcattgcaccccggaagtacgaagatgtaccaagatctgaaggaaggatactggtggcccaacatgaagagagatgtggcagaatacgtagcactctgtgacgtatgccaaaaagtgaaggctgagcatcagcgaccggcaggcttgctgcaaccccttaggattcctgaatggaaatgggatgagatagtgtgtcttcatggtatacctaagaggattatatccgatcgaggcacacagtttacctcgcatttctgggaaaaagtacatgaagccctaggaagttatcttgcttttagcacagcttatcatccacagacagatggccagacggagagaaccaaccaggtactggaggacatgctgagagcttgtgcgttggattttagcaaagactgggagaggtgtttgccctacgccgagttctcctacaacaacagctttcaagcaagcctgaagatgtcccccaatgaagcattgtttggtcgacgatgccggacgccgctgatgtggtctgagacaggtgaacgggcggtatttggacctgacattatcaatgaggccgaagaaaag

SEQ ID NO: 13918 - DNA, 1251 bp, Oryza sativa
  Clone ID: TFbOSC15177j.C1.o4.np
acaaaataccagaggaagcatgagatgcaagaagaaaaatattatgaagatgattgcaattttgatcctcattggagttgcgagtttttcaggttctgctagaatgaggggatgagattgccgtcaatagaagattgcccaggatgtggtggctctagaaggagatatgttgggagttcaagtcgatcacatgcaaggagagaggatcggcaagtgcagaaaaagttgcctgttcaccagagattgggtccaactcatcaagattcgtttcaggaggaggatgctgaagatgaagatgaaactaggaaaccccaatggtgtccttctggcattttcactaagaaccagaagagaagaattcaaaggacgaggaacatggagcaaattcaagaggccaaagaagagatcaatcatcggctaaagaggacaaggaatgagtggcgtgttaagagcaaggttgtctcagctgatgaggtcgaagccgacaaggcgagatggttagccaaagggaaggctgttgcttcttcattggtttacatggtctttatattgccagcaaaatattgtgctaaaccagccgatgcagaaatcatggaagaatctttggctaagttgggtctgtcacctaagcaagctatctttgagaagccagaaggaacagggcatcggcatttgaagccgttatatgtcaagggatttgtcaatggcaagccgatctccaagatgttagttgatggtggggctgctgtgaacttgatgccttattctaccttcaggaagttagggaagaattcagatgatctcatcaagactaagatggtgctcaaagactttggagggaatccttcagaaccaaaggaattttgaaagtggagttgactattggcagcaagacaatttctactaccttttttgtcattgatgggaaaggttcttacagtatgttgttgggaagggattggattcatgcaaattgttgtattccttcgaccatgcaccagagcttgatccaatggaaaggagaccagatagaaatcgtgccagccgacaagtcagttaatgttggtaatgccgatttgactatttgggagatggatggatgtccgattgtgatatacaaccagttagagatggagagccctaattgttgttttgagggcgtcgttgagggttcaaatttctacaccgaagatactgtagatgatctcgatgataaatatgggcacagggcagagaggatttcttagtgag

SEQ ID NO: 13919 - DNA, 2692 bp, Oryza sativa
  Clone ID: TFbOSC16862j.C1.o1.gm
agtacttgcatgagttcaaccgccttgcgcgctacgctcctgaggacgtgcgcaccgatgctgagaagcaggagaagtttttgtttgggctcgacgatgaattgaccaaccagctaatctccggagtctatgaggactttgagaagcttgtggacaaggctatccgccaggaagagcaacgcaacaaaatggaccgaaaaagaaaggcagctcagatcagctttcctcaggggaacaatcagaagcctcgcttcatgacgggacagctaggtgggccttccaccctgatcgtctgtcagcaccgtccctatcacccgagtaacttcgacaacgactacaacggtggcagtcacaacaacagtaagcagcacaaccacaactcgactccacccccactaatggcaccagctcagtcagatccgccagctgtgtcagctcagtcagaacaacccaagaagagggctgtaggaaagccaggaccctgcttcaactgtggcaagcacggccactttgctagcaagtgtccgaagctgaatcgcactggacccaggttcatccaggcccacgccaatcatgtgtctgcagtggaagcacaggcagcaccagaggtcgtgttgggcacgtttccagtgaactcatatccagcaacagttctctttgattcaggtgcctcgcattctttcatttccaaaagatttgctgggacacatggattatcggtagtggaacttaaaataccgatgcaggttcatacccctggaaatgatatgaggacagcacactactgcccctcggtgactatagagatcagaagatcaccgtttctatccaacctcatccttctcgaatctaaagacctggatgtcattcttggaatggattggttgaccagaaacaagggagtgattgactgcgcaagccgcaccatcaccctaaccaacgacaaaggggagaagatcaccttccgttccccagcgtcgcagaagtccgtagcgagtctgaatcaggctgctattgagggtcagacagaaacagtggagaaaagtcccaggaagttggaggatattcctatagtacaagagtatcctgaggtgttcccagaagacctcactacaatgccaccgaagagagaaatcgagttccggatcgatttggcacccgggactactccaatttacaagaggccgtacagaatggcagctaatgagctagcagaggtcaagaagcaggttgacgaacagctgcagaaagggtacatccgaccgagtacttcaccttggggtgctccggttatctttgtggagaagaaagacaagaccaagaggatgtgcgtggattatcgcgcccttaatgaggtcacaatcaagaacaaatatccgttgccaagaattgatgacctgtttgatcagctaaaaggagctaaggtgttttccaagatagacctacgatcaggctatcatcagttgagaattcgggaagaggatattcccaagacagccttcaccactcggtatgggttgtttgagtgcacggttatgtcctttggactcaccaatgcaccggctttcttcatgaacttgatgaacaaagtgtttatggagtttcttgacaagtttgtcgtggtattcattgacgacatacttatttattcaaaatcagaagaggaacatgagcaacatcttcgtctggtacttgagaaattgaaggagcaccagttatatgccaagtttagcaagtgtgacttctggttatcggaggtcaaatttctgggtcacgtcatttctgctcaaggcgtggcagtggatccatcaaatgtggaatcagttacaaagtggaccccaccaaagacagtttctcagatccggagttttcttggacttgcgggctattaccgtcggttcatcgaaaatttctctaagattgccaggcccatgacacagttgctaaagaaagataaaaaattcaaatggtcagctgagtgcaaccaaagttttgaagaactcaagaagaagttagtctccgcaccagttctaattctgccagatcagacgaaagacttccagttgcgcccacacgagaccaattatcccactcatgaccttgagttggcagcagtggttcatgctctgaaaatctggcggcactatcttattggcaaccgctgtgaagtttacactgatcataagagcctgaagtacatcttcacccagcccgacttaaatctccggcaacgaagatggctggagttgattaaagattatgacatggggatacactatcatccaggcaaagcaaatgtggtagcagatgctctgagcagaaagagctattgcaatgcagtatgtaccgaaggcatgtgtgacaaattgcagcaagatcttgagcacctaaatttgggcatcgtagaacacgggtacgtagctgccctagaggcccggcctacgctcgtggatcaagtcagagcagctcaagtaaatgatcctgaaatagctgagctgaaaaagaatatgagggttggaaaagctcgagatttccatgaggatgagaatggcacaatctggttgggagaaagattgtgtgtgcctgacgacaaagaactgaaggatctcatactcacagaagctcatcaaactcagtattcaattcatcccggcagtactaaaatgtaccaggacctcaaagagaaattctg

SEQ ID NO: 13920 - DNA, 4227 bp, Oryza sativa
  Clone ID: TFbOSC18686j.C1.o1.fg
atggtgaagacaaggaatgatccccgtgactccaacgacgccagtggcagcgaagagcagaccgatggagctcatgtcagtggtgcatctggcagcagatcatctccaccgcccgaaaacccaacagtcactcaaatgatgacaatgatgatgcaacagatgcagcaacattaccatcagatgttgcagcaggcgcaacagaaccagcagtttggtcctccaccatcacacgtgtccaaactgttagactttcttcgtatccagccacccactttctcaagcaccaccaacccaatggaggccaatgactggctccgtgctattgagaagaagctgaacctactgcaatgcaacgaccaagagaaagttgcttttgctacacaccagttgcaaggtcccgcttctgcctggtgggataactacgtggcgacccgtctagatgcaacggagaagagagagttccgtgcgctccagcaaggaaccatgtcagttacagagtacttgcatgagttcaaccgccttgcgcgctacgctcctgaggacgtgcgcaccgatgctgagaagcaggagaagtttttgtttgggctcgacgatgaattgaccaaccagctaatctccggagtctatgaggactttgagaagcttgtggacaaggctatccgccaggaagagcaacgcaacaaaatggaccgaaaaagaaaggcagctcagatcagctttcctcaggggaacaatcagaagcctcgcttcatgacgggacagctaggtgggccttccaccctgatcgtctgtcagcaccgtccctatcacccgagtaacttcgacaacgactacaacggtggcagtcacaacaacagtaagcagcacaaccacaactcgactccacccccactaatggcaccagctcagtcagatccgccagctgtgtcagctcagtcagaacaacccaagaagagggctgtaggaaagccaggaccctgcttcaactgtggcaagcacggccactttgctagcaagtgtccgaagctgaatcgcactggacccaggttcatccaggcccacgccaatcatgtgtctgcagtggaagcacaggcagcaccagaggtcgtgttgggcacgtttccagtgaactcatatccagcaacagttctctttgattcaggtgcctcgcattctttcatttccaaaagatttgctgggacacatggattatcggtagtggaacttaaaataccgatgcaggttcatacccctggaaatgatatgaggacagcacactactgcccctcggtgactatagagatcagaagatcaccgtttctatccaacctcatccttctcgaatctaaagacctggatgtcattcttggaatggattggttgaccagaaacaagggagtgattgactgcgcaagccgcaccatcaccctaaccaacgacaaaggggagaagatcaccttccgttccccagcgtcgcagaagtccgtagcgagtctgaatcaggctgctattgagggtcagacagaaacagtggagaaaagtcccaggaagttggaggatattcctatagtacaagagtatcctgaggtgttcccagaagacctcactacaatgccaccgaagagagaaatcgagttccggatcgatttggcacccgggactactccaatttacaagaggccgtacagaatggcagctaatgagctagcagaggtcaagaagcaggttgacgaacagctgcagaaagggtacatccgaccgagtacttcaccttggggtgctccggttatctttgtggagaagaaagacaagaccaagaggatgtgcgtggattatcgcgcccttaatgaggtcacaatcaagaacaaatatccgttgccaagaattgatgacctgtttgatcagctaaaaggagctaaggtgttttccaagatagacctacgatcaggctatcatcagttgagaattcgggaagaggatattcccaagacagccttcaccactcggtatgggttgtttgagtgcacggttatgtcctttggactcaccaatgcaccggctttcttcatgaacttgatgaacaaagtgtttatggagtttcttgacaagtttgtcgtggtattcattgacgacatacttatttattcaaaatcagaagaggaacatgagcaacatcttcgtctggtacttgagaaattgaaggagcaccagttatatgccaagtttagcaagtgtgacttctggttatcggaggtcaaatttctgggtcacgtcatttctgctcaaggcgtggcagtggatccatcaaatgtggaatcagttacaaagtggaccccaccaaagacagtttctcagatccggagttttcttggacttgcgggctattaccgtcggttcatcgaaaatttctctaagattgccaggcccatgacacagttgctaaagaaagataaaaaattcaaatggtcagctgagtgcaaccaaagttttgaagaactcaagaagaagttagtctccgcaccagttctaattctgccagatcagacgaaagacttccaggtctactgtgatgcatctcgccaaggattgggatgtgtgttgatgcaagaaggcagagtggtcgcatatgcttcgcgacagttgcgcccacacgagaccaattatcccactcatgaccttgagttggcagcagtggttcatgctctgaaaatctggcggcactatcttattggcaaccgctgtgaagtttacactgatcataagagcctgaagtacatcttcacccagcccgacttaaatctccggcaacgaagatggctggagttgattaaagattatgacatggggatacactatcatccaggcaaagcaaatgtggtagcagatgctctgagcagaaagagctattgcaatgcagtatgtaccgaaggcatgtgtgacaaattgcagcaagatcttgagcacctaaatttgggcatcgtagaacacgggtacgtagctgccctagaggcccggcctacgctcgtggatcaagtcagagcagctcaagtaaatgatcctgaaatagctgagctgaaaaagaatatgagggttggaaaagctcgagatttccatgaggatgagaatggcacaatctggttgggagaaagattgtgtgtgcctgacgacaaagaactgaaggatctcatactcacagaagctcatcaaactcagtattcaattcatcccggcagtactaaaatgtaccaggacctcaaagagaaattctggtgggtcagcatgagaagagagatagccgaattcgtcgcactctgcgatgtttgtcagcgagtcaaagcagaacatcagaggcccgcaggactgctacaaccccttcagatcccggaatggaaatgggaagaaatcggaatggatttcataacaggtttgcccagaacatcgtcggggcacgattcaatctgggtggtcgtggatcgactcaccaaagttgctcattttattccagtacacactacctatactgggaaaaggttggcagagctttatctttcaagaatcatgtgtttgcatggggtacctaagaagattgtatctgatcgaggaagtcaattcacttcaaagttttggcagaaactgcaagaagaattggggactcgtttgaatttcagcacggcttatcatccacaaacagatgctatcagtccagtttgcaaatggtaccgtttgaagcattgtacggacgaaagtgccgcacaccacttttctgggatcaaacaggggattatgtgtacccttcgtgtcactccgcttcggggagtacaccgcttccaaaccaaaggcaagttggcaccacgctttgtgagaccatacaggatcttggaacgcagaggtgaagtcgcttaccagctagagcttccacctaatatggttggtatccacgatgtgtttcatgtgtctcaactgaagaagtgtttgagggtacctgaggaacaagctagctcagagcacattgacatccaagaagatttgacctacgtggagaagccagttcgtatccttgagaccagtgagagaaggaccagaagcaaggtgatcaggttttgcaaagttcaatggagccaccactcagaggaagaggccacctgggaaagagaagatgaattgaaggccgcccatccgcacctcttcgccagctcttccgaatctcggggccgagattccgtttaa

SEQ ID NO: 13921 - DNA, 4551 bp, Oryza sativa
  Clone ID: TFbOSC400481j.C1.o14.fg
atggtgaagacaaggaatgatccccgtgactccaacgacgccagtggcagcgaagagcagacagatgaagctcataccagtggtgcacctggcagtagttcatctccgccgcccgagaacccaacagtcactcagatgatgacaatgatgatgcaacagatgcagcaacattaccatcagatgttgcagcaggcgcaacagaaccagcggtttggtcctccaccatcacacctgtccaaactgttagactttctccgcatccagccacctactttctcaagcaccaccaacccaatggaggccaacgactggctccgtgctattgagaagaagctgaaccttctgcaatgcaacgaccgagagaaggttgcttttgctacacatcagttgcaaggtcctgcttctgcctggtgggataactacgtggcgacccgtctaggtgcaacggaggttacttgggcagagttttgtcaaaactttaggaaggcacagattcctaaagggattatggcacaacagaagagagagttccgtgcattgcaacaaggaaccagaacgattacagagtacctgcacgagttcaaccgcctcgcgcgctacgctcccgaggacgtgcgcaccgatgctgagaagcaggagaagtttttgtttgggctcgatgatgaattgaccaaccagctaatctccggagtctatgaggactttgagaagcttgtggacaaggctatccgccaagaagagcaacgcaacaaaatggaccgaaaaagaaaggcagctcagatcagctttcctcaggggaacgatcagaagcctcgcttcatgacgggacagctaggtgggccttccaccctgatcgtctgtcagcaccgtccctatcacccgagtaacttcaacaacgattacaacggtggcagtcacaacaacagtaagcagcacaaccacaactcgactccacccccactaatggcaccagctcagtcagatccgccagctgtgtcagttcagtcagaacaacccaagaagggggctgtaggaaagccaggaccctgcttcaactgtggcaagcacggccattttgctagcaagtgtccgaagctgaatcgcactagacccaggttcatccaggcccgcgcccatgatgtgtctgcaaaggaagcacaggcagcaccagaggtcgtgctgggcacgtttccagtgaactcatatccagcaacagttctctttgattcaggtgcctcgcactctttcatttccaaaagatttgctgggacgcatggattatcggtagtggaacttaaaataccgatgcaggttcatacccctggaaatgatatgaggacagcacactattgcccctcggtgactatagagatcaaaagatcaccgtttctatccaacctcatccttctcgaatctaaagacctggatgtcattctcggaatggattggttgaccagaaacaagggagtgattgactgcgcaagccgcaccatcaccctaaccaacgacaaaggggagaagatcaccttccgttccccagcgtcgcagaagtccgtagcgagtctgaatcaggctgctattgagggtcagacagaaacagtggagaaaagtcccaggaagttggaggatattcctatagtacaagagtatcctgaggtgttcccagaagacctcactacaatgccaccgaagagagaaatcgagttccgaatcgatttggcacccgggactgctccaatttacaagaggccgtacagaatggcagctaatgagctagcagaggtcaagaagcaggttgacgaacagctccagaaagggtacatccgaccgagtacttcaccttggggtgctccggttatctttgtggagaagaaagacaagactaagaggatgtgcgttgattatcgggcccttaatgaggtcacaatcaggaacaaatattcgttgcccagaattgatgacctgtttgatcagctaaaaggagctaaggtgttttccaagatagacctacgatcaggctatcatcagttgagaattcgggaagaggatattcccaagacagccttcaccactcggtatgggttgtttgagtgcacggttatgtcctttggactcaccaatgcaccggctttcttcatgaacttgatgaacaaagtgtttatggagtttcttgacaagtttgtcgtggtatttattgacgacatacttatttattcaaaatcagaagaggaacatgagcagcatctccgtctggtactcgagaaattgaaggagcaccagctatatgccaagtttagcaagtgtgacttctggttatcggaggtcaaatttctgggtcacatcatttctgctcaaggcgtggcagtggatccatcaaatgtggagtcagttacaaagtggaccccaccaaagacagtttctcagatccggagttttcttggacttgcgggctattaccgtcggttcatcgaaaatttctccaagattgccaggcccatgacacagttgctaaagaaagatgaaaaattcaagtggtcagctgagtgcaaccaaagttttgaagaactcaagaagaagttagtctctgcaccagttctaattctgccagatcagacaaaagacttccaagtctactgtgatgcatctcgccaagggttaggatgtgtgttgatgcaagaaggcagagtggccgcatacgcttcgcgacagttgcgtccacacgagaccaattatcccactcatgaccttgagttggcagcagtggttcatgctctgaaaatctggcggcactatcttattggcaaccgctgtgaagtatacaccgatcacaagagtctgaagtacatcttcactcagcctaacttgaatctccgacagcgaagatggctggagttaattaaagattatgacatggggatacattatcatccaggcaaagcaaatgtggtagcagatgctttgagcagaaaaagctattgcaatgccttatgcactgaagacatgtgtggcaaattgcagcaagatcttgagcacctaaatttgggcatcgtggaacacgggtacgtagctgccctagaggcacggcctacgctcgtggatcaagtcagagcagctcaggtaaatgatcctgaaatagctgagctaaaaaagaatatgagggtcggaaaagcccgagatttccatgaggatgagcatggcacaatctggttgggagaaagattgtgtgtgcctgacgacaaagaactgaaggatctcatactcacagaagctcatcaaactcagtattcaattcatcccggcagtactaaaatgtaccaagacctcaaagagaaattctggtgggccagcatgagaagagaaatagccgaattcgtcgcactctgcgatgtttgtcagcgagtcaaagcagaacatcagaggcccgcaggactgctacaaccccttcagatcccggaatggaaatgggaagaaatcggaatggatttcataacaggtttgcccaggacatcatcggggcacgattcaatctgggtggtcgtggatcgactcaccaaagttgctcatttcattccagtgcacactacctatacggggaaaaggttagcagaactgtacttagcaaggatcatgtgtctgcatggggtacctaagaagatagtatctgatcgagggagtcagttcacttcaaaattttggcagaaactgcaagaagaattggggactcgtttgaatttcagcacggcctatcacccgcaaactgatggtcagaccgaaagggtcaatcagatcttggaagatatgctgcgagcgtgtgcgctcgattttggtggagcatgggataaaagtctaccgtatgcggaattctcttacaacaacagctatcagtccagtttgcaaatggcaccgtttgaagcattgtacggacgaaagtgccgcacaccacttttctgggatcaaacaggtgagcgccaactgtttgggacagaagtgttaaccgaagcagaggagaaagtcaggaccgtcagggaaagactgcgaatcgcccagtctcggcagaagagttatgctgataaccgccgaagagagcttactttcgaagcaggggattatgtgtaccttcgtgtcactccgctccggggagtacaccggttccagacgaaaggcaaattggcaccacgctttgtgggaccatacaggattttggaacgcagaggtgaagtcgcttaccagctagagcttccatctaatatggttggtatccacgatgtgtttcatgtgtctcaactgaagaagtgtttgagggtacctgaggaacaagctagctcagagcacattgacatccaagaagatttgacctacgtggagaagccaattcgtatcctggaaaccagcgagagaaggaccagaaacaaagtaatcagattttgcaaagttcagtggagccaccactcagaggaagaggccacctgggaaagagaagatgaattaaaggccgcccatccgcacctcttcgccagcccttccgaatctcggggtcgagattccgtttaa

SEQ ID NO: 13922 - DNA, 4614 bp, Oryza sativa
  Clone ID: TFbOSC400738j.C1.o7.fg
atggaggcagaagactggctacgcatcatagagaagaaactgactcttgtcagggtacgcgaaaccgacaaagtaatcttcgcagtaaaccaactggaaggacccgctagtgattggtgggacacctacaaggaagctcgggaaaacgatgctggagaacccacttgggaggagttcactgcagcatttcgcgagaacttcgtacctgctgcagtgatgcgcatgaagaagaacgagtttagatggctgcggcaagggaatacaacggtgcaagaatatctgaacaagtttactcagttggcccgctatgcaattggagacctagcggatgaagaagaaaagatcgacaagttcatagaagggctgaatgatgaattgcgtggacctatgatcgggcaggatcacgagagtttccagagcctgatcaacaaagtcgtcaggctagagaacgatcaaaggacggtggaacacaaccgcaagaggaggcttgctatgagtcgcctacctcagatagtgcctcagcgactcaagggagccacttcatccggatggaagccccctatcgtggcaaccaaccgtcccgctgcacctagcaacttcaacaggccagttgcaattcagaaccgcacccctacaccaactttggctgcccctggagccaagatgaatgtgaactgcttcaattgcggggggtatgggcactacgccaacaactgccctcatccacgcaagactcctgtccggaccggcacgaatgcaatgactgttcgtggcactactacccctgttaccgggcgaggtctattcaagactccgcaatctaacaggaccgccactggacttgggcgcggacaagtgaaccatgtccgagctgaagaggcccaggaagatcagggcatactcatgggtatgttctctatcaattctaccccggttaaagttctcttcgattctggtgcatcgcattcatttatatctctgaaggctagtcaaaagcacaacttaaccctagtgggacttagaaagcctatgatagtacactcacctgggggcgagataactgtgagtcatgcttgcatagacgtaccaattcgtcttagggacgtggtgtttccctccaatcttatgatcttaatacctcagaccctagatgtcatactgggcatggattggttaacaaagaatagaggtgtaattgactgtgggcgtagagaggtgaccttaaccacaccctggggatcggatatgagagcaaccatggatcaagatcctaggctaaccgaacgtgccggaggtatatttaccatgctacccctaaagggaatgcctgtagtgcagcgatttcctgatgtgttcccagaagatttacctggaatgccaccagatcgtgacataaagttcattattgacctgatacctggaaccgcccccatatccaagagaccatatcggatgccggttaatgagttagaagaacttaaaaagcaaattagggagttgcaagaaaagggatttgtacgccccagttcgtcaccttggggagccccagtgctattcgtcaagaagaaagatggtagcatgagaatgtgtgtggactaccgatcactgaacgaagtaactattaagaacaagtacctactaccaaggtttgatgatctcttcgatcaactcaaaggagctaaggtgttttcaaagatcgacattcgatcaggataccaccaactgaagattaggaccaaggatattcccaagaccgcgttttcaacacactatggattgtatgagttcacagtgatgtcatttggtctaaccaatgccccagcctacttcatgaatcttatgaacaaaataaacaccctggacattcaacctcttttgagaacccaaatagaagaagcccagaaggacaacgaggaaatccgagagttgaaggaacgcttagctgcaggacgtgcaaaggaattttcaatcgacgaaaaagatgttctatggtataaaaagagaatttacgtacccgaacagggtggactgaggggattaattttaaaggaagctcacgaatcggcatactcattgcaccccggaagtacgaagatgtaccaagatctgaaggaaggatactggtggcccaacatgaagagagatgtggcagaatacgtagcactctgtgacgtatgccaaaaagtgaaggctgagcatcagcgaccggcaggcttgctgcaaccccttaggattcctgaatggaaatgggatgagataggtatggattttattgttggattgcccaagaccgcaacaggatatgattccatttgggtgatcgtggatcgactcaccaagacggcaagattcatccccgtcaagacaaactatagcagtgctaaacttgccgagttgtatatgaccaggatagtgtgtcttcatggtatacctaagaggattatatccgatcgaggcacacagtttacctcgcatttctgggaaaaagtacatgaagccctaggaagttatcttgcttttagcacagcttatcatccacagacagatggccagacggagagaaccaaccaggtactggaggacatgctgagagcttgtgcgttggattttagcaaagactgggagaggtgtttgccctacgccgagttctcctacaacaacagctttcaagcaagcctgaagatgtcccccaatgaagcattgtttggtcgacgatgccggacgccgctgatgtggtctgagacaggtgaacgggcggtatttggacctgacattatcaatgaggccgaagaaaaggttcgcttgatccgtgaccgtttaaaggtagcacaatcacgacaaaagagttatgccgacacccgaagaagaaacctagaatttaaggaaggagattacgtttatttaaaggtttctccgatgaggggaacaaaaaggtttagggttaagggaaaactagcaccaagatacgtgggaccctttcaaatcacggctagaagaggagaagtcgcatatcagttacagctaccagagaatatcgctgatgtgcacccagtcttccatgtgtctcaattaaagaaatgcttacgagtgccggaagaacaagctccgctggaagagattcacattagcaatgatcttacgtatccagaacacccgatccggatattggatgaagccgagaagaggactaggagcaaagtgtggcgtatgaacaaggaagcagtacgtagtgagatagactcaattatgtctaatggtacttgggaagtcgttgagcgtctatatgggtccaagcctgtaggatgcaaatgggttttcaagaaaaagcttaggccagaggttacaattgaaaagtacaaggcaaggcttgtggccaagggttatacccaaaaggaaggcgaggattttttcgacacctactcatcagttgcccatttgaccacgattcgagtactacttgctctggcagcctctcatgctcttctcgtccatcagatggacgttaagacagctttcctaaatggagagctggaggaggagatctatatggatcaaccaaacgggtatgcactagaaggtcgggagggaatggtgtgtaaactgttgaaatccttgtatggccttaagcaagcacctaagcaatggcatgagaagtttgacaccacacttacatctgctggctttgttgtgaacgaaactgacaaatgcgtgtactatcgctatggtgggggagaaggagtgatcttgtgtttatatgtcgatgacatattgatctttaggaccagcctcaatgtgatcgaggaggtcaaggactttctgtccaagagttttgaaatgaaggatttgggagaggctgatgttattcttaacattaagctactaagaggagatgagggtgggattacacttgtgcaatcccactatgtggacaaggttctgagtcgctttggacacaacgactgcaagccagctcctactccttatgatcccagtgtgctattaaggaaaaaccgaagaatagcaagggatcaactgagatactcacaaatcataggttcattgatgtacttggctagtgcaacgaggcctgacatctcatttgctgtaagcaagctgagccggtttgtctcaaatctggtggatgatcattggcaggctttggaaagagtaatgcgctatctaaagggcactatgagctatggaattcactataccgggtacctaaaagtactggaagggtatagtgactcaaactggatatctgatgctgatgagataaaagccacaagtggatatgtgttcacacttggaggtggcactgtttcctggaagtcttgtaagcagaccatcttaacgaggtcaacaatggaagcagaacttacaggactagatactgcgacagttgaggccgagtggcttcgtgaactcctgatggatttgccggtggttgaaaaaccagtgccagctatcctaacgaactgtgataatcaaacagtgattattaaagtgaacagttcaaaggacaacgtgaagtcatctagacatatcaaaataagactgaaatctgtcagaaagcagaaaaactccggagtgatagcattggactatgtctaa

SEQ ID NO: 13923 - DNA, 4216 bp, Oryza sativa
  Clone ID: TFbOSC401018j.C1.o41.np
atgtcatacacaccgcctggccgtcgtggtggcggtggcggcgggggaagcgacaacggctgcggcatcactcccgctagtcgatgcagggcacactgcccgtctcttgatcctgtcgaggacaaattatatagactgagcgctgttgatgcgcgtcaacctgcaggcgcaggggctctggacggccatcgatccctgctatgcggagtaccgcgaggatcgtgcagcgctctcggcgattctccaagctgtgccccgcgagatgttgcgcggcttggcaaagcacgacacggcgaaggcggcgtgggatgccattaaaaccatgcgggtcggtgtcgaccgcgtgagcgaggcgagggagcagggattccgccgtcagttcgaggcgatgcgcttcaaggacggtgagacaccggaggaatttgcgatgcggctcactgccatcgttgcggacatgcgcaacatgggcggagtcatggaagacgaacacatcaacaagaagctgctgcgtgttgtccccaagaagtacaagccggtggcaatttccctcgagcagctcctcgacgtgaagaccatggccctggaggagctcatcgagtggctgtcgacggtcgactcctacagtgatgatgaggaggcaagtgacggtggcaaattgtacctcactaaggagcagtggcaggccggtgtcaagcagcgggagtaggagggatctggcagcagcaacaagggccgggcgggctctggcaaccagaaccgtcgaggcaaggccggcgattcaccgaagggaaaggagatggccaccagcggccatggctgtcgtgacatctctaaggtgaagtgtttcaattgtgatgaatacggtcattactcgaagcagtgccgtatgccgcgtcgccaatgtcggggagaggcaaatgcaaatctggtccaggctgaggaagagccgactctgctcatggcacacgtgatgggggtgtcgctcgccggcgaagcggccgttggtcgaacaccttgtgtgcaggaagtgcatctcacagagaagaaggttgtgctggaccatgaggatgggcgtaaggaggagaagactggagagtggttcctggacaccggggccacgaatcacttgacgggcgcacgctcagcgttcgcggagcttgacactggtgttgtgggcacggttaaattcagcgatggctcagtggttgacatctaggggcgcggaactgtggtgtttcagagcaagaatggtgatcaccgctcactagaggcagtgtactacatccccaagctgagaaaaaacattgttagtgttggtcgcctcgatgcgcgcggctacgacgcacacatttggcatggtgttttcacgttgcgtgacccggaagggatgcagctagctaaggtaaatcgtgattcaagttacctgtatgttctcaagttgaaccttgcgacactaatctgtatggcagcgagcggctccgagctagcatggcgatggcatgcacgatttggccatctgaatttcctggcacttcggaggttggcaaaaggaggcgtggtccgcaggatcccgcaaattgatcacattgatcagttgtgtgacgggtacctcgcgggcaaacaacatcgcacaccgttcccagaggaggcgcagtacagggcgcagacggcgctcgagctggtgcacggtgacctctgcggaccaatcacgccggcgacgacagggggcaagaagtatttcttgctcctagtcgatgacatgagtcatcacatgtggatacgactcctctctgccaaacacgaagcatcggcagcgattaagccggcgtggagaaggatagcaatcggaagctcatggcgctgcgcactgatcgcgggggtgaattcacctctatagagttcatggagtactacgcggacacaggggtgaaacgttaaatcactgcaccctactcacggcagcagaacagtgtcgtggagcggcgcaatcagactgtggtggcagcagctaggtccatgctgaaggcggcaaacatgctggcatatttctggggagaggcggtggttgcagccgtctatgtcttgagcaaatcaccaatgaagagtcttgatggggtgacgccgtatgaagcgtggtatggtcgccgacccactgtcgaacacctgcgtgtgtttgagtgtgtgggctatgttaagacagccaagccaaacttgagaaagcttgatgatcgtagcacgaggatggtcttcatcggctacgagcaaggatcaaaagcctacaagatgtatgattttgtggtgcgacgcgtgtgtgtgtcacgcgacgtcgtttttttatgagacgacgttctgggactggggcagcaacactgatgaagaaggagatcaggacgcgtatgtggagtttacggtggagaatttcacaatcccagtccaagggagtgagacacatgcccaggatgcagcagccactccaaccatgctagcaacatcaccaacatcaagcaccggaactgcaacaactctgccatctggtgttgaattctgttcccctccaactgatgctagtgaagggactgatgaagggcccaggagctacagaacagtggtgaacacgcttgccaccttgaccccaatcctagattttaattacagtgatcaatgccttatggcagcagaggaaccagcaagtttcttggaggctgagcaggagagctgctggaggaaggccatgcttgaagagatggaatcaattgaaggtaacaacacctggactctctatgatttgccctctagccacagagcaacaggactgaaatgggtttacaaaatcaaacgtgatgccaaagatgtcattgtgaagtacaaagctcgattggtggcaaagggatatgtccatcaacaaggagttgattttgatgaagtatttgccccagtgacgaggatggagactgtgcgattgctgattgcaacggctgctcatcagggatgggaagttcatcagatggatgtgaaattagctttcttgaatagggaattggaagaagatgcttaggtggttcaaccacctggttttgttgttgatggaaaagaagacaaggtgttgaaattgaagaaggccctatatggactgaaacaagcaccacgtgcatgttatgcgaagttggattctagtcttgtgagcctgaattttgtcaagagtggtgtcaaaagtgctgtgtatactcgaggagagaagaactcatgacttgtggttggtgtatatgtggatgatctcattactacaggagcaagtctgatggaaataaacaagtttaaggagcagatgcaggctctttttaaaatgagtgatctcggtctgctctcttattatctcgggatggaggtgaaacatgcaaaggaagggatcacagtgtctcaaggtgcatatgcagcaaagatacttgacaaagctgggatgagggattgtaatccatgtcagactcccatggatgctcggttgaagttgagaaaggagggaggagaatgtatggaggaaactcaattcagaagcataattgggagcttgaggtacttggtgaacacaagacctcatctaagttattcggttggttatgttagcaggtttatggagaaaccgacctctgaacattgggctgccatgaaacatattttgaggtatgtggcaggtactctgaatctcggggtggaattcagaaagaagcaacaacaggttcctcagctgaatggctatagtgacagtgatatggctggggatattgatgatagaaagagtacaaccggagttctatttaaattgggagacagtttgatcagttggcagtcacaaaaacaaaaggtggtagcaatatcttcgtgtgaggctgaatatatagctgctgcaactgctgctgtacaaggagtgtggctggctcgaccaataggtgagttggaaggccaagaacctggttgtgcactgatcaaggttgataacaagtctgctataagtctcttgaagaatcctgtgcttcatgatcgcagtaaacatattgatacaaagttttatttcatctgggattgtgttgatcagaaacgggtggaggtggaatacataaggttagaggagcaacatgcagatattttaacaaagcctcttggtaagattcgatttttggagttgagaggcaagctgggattagttccagtctgatgcttc

SEQ ID NO: 13924 - DNA, 906 bp, Oryza sativa
  Clone ID: TFbOSC401101j.C1.o2.np
tgtcactgcagcggtagcggcagcggtagtgccctaggtggccatgagctcgttgtgcaacaagtgaaggaggttgggttgacgctatgttaccccatgctcgaggagaacaactacggcgtttgggcagtgaaaatgaaaattttcatgcgcgcacaaggcgtgtgggctgctgtggagggcaacacggccgatgagaagatggaccaaatggctctcaccgccattgtacaagctatgccggaggccgtggtgatgaccatatttgagaaggagacggcgaaggcagcgtgagacgccctcaagttgatgaacatgggtgaagagagtatcaagaaggcctgagtacaaacccttaagagcgagcttgatggtatgaaaatgggtaattctgagaaaattaatgattttgctttaaaggttaccacgatcatgaacgagattcactctcttggcgtgaaagtggaggagaccaccgtcgtggagaagctcctacattctgttcccgagaagtcctaatccctcataagcaccattgagcaatggggggatgtgtcagagatgatggtgacaaagacaattgggcacctgcgggcattcgaggactcttcacaggggctgcgtcgtgacaaagagggggagcagcagctgttcgccgcatatgccgagccacgactgatgcgtgctgagtgggaggccaaggttgctaaagagaggaggagtggaggtggttccggcagcagcagtggtggtgacaagaggaagtaccacggcaaattcgacaaggcaaaagttcattgctacaattgtcaagagtatgggcatttcgctgatgagtgtcctaagccgaagaaggacatggcttttcttgccacagttgacgcggatgatgagccaacattggtg

SEQ ID NO: 13925 - DNA, 3930 bp, Oryza sativa
  Clone ID: TFbOSC900319j.C1.o16.fg
atggtgaagacaaggaatgatctccgtgactccaacggcgccagtggcagcgaagagcagacagatgaagctcataccagtggtgcacctggtagcagttcatctccgccgcccgagaacccaacagtcactcagatgatgacaatgatgatgcaacagatgcagcaacattaccatcaaatgttgcagcaggtgcaacagaaccagcagtttggtcctccaccatcacacgtgtccaaactgttagactttcttcgtatccagccacccactttctcaagcaccaccaacccaatggaggccaacgactggctccgtgctattgagaagaagctgaacctactgcaatgcaacgaccaagagaaagttgcttttgctacacaccagttgcaaggaagacagctggaccgaaaaagaaagacagctcagatcagctttcctcaggggaacaatcagaagcctcgtttcatgacgggacagctaggtgggccttccaccctgatcgtctgtcagcaccgtccctatcgcccgagtaacttcaacaactattacaatggtggcagtcacaacaatagtaagcagcacaaccacaactcgactccacccccactaatggcaccagctcagtcagatccgccagctgtgtcagctcagtcagaacagcccaagaagggggctgtaggaaagccaggaccctgcttcaactgtggcaagcacggccactttgctagcaagtgtccgaagctgaatcgcactggacccaggttcatccaggcccacgccaatcatgtgtctgcaatggaagcacaggcagcaccagaggtcgtgttgggcacgtttccagtgaactcatatccagcaacagttctctttgattcaggtgcctcgcattctttcatttccaaaagatttgctgggacacatggattatcggtagtggaacttaaaataccgatgcaggttcatacccctggaaatgacatgaggacagcacattattgcccctcggtgactatagagatcagaagatcaccgtttctatccaacctcatccttctcgaatctaaagacctagatgtcgttctcggaatggattggttgaccagaaacaagggagtgattgactgcgcaagccgcaccatcaccctaaccaacgacaaaggggagaagatcaccttccgttccccagcgtcgcagaagtccgtagcgagtctgaatcaggctgctattgagggtcagacagaaacagtggagaaaagtcccaggaagttggaggatattcctatagtacaagagtatcctgaggtgttcccagaagacctcactacaatgccaccgaagagagaaatcgagttccggatcgatttggcacccgggactgctccaatttacaagaggccgtacagaatggcagctaatgagctagcagaggtcaagaagcaggttgacgaacagctgcagaaagggtacatccgaccgagtacttcaccttggggtgctccggttatctttgtggagaagaaagacaagaccaagaggatgtgcgtggattatcgcgcccttaatgaggtcacaatcaagaacaaatatccgttgcccagaattgatgacctgtttgatcagctaaaaggagctaaggtgttttccaagatagacctgcgatcaggctatcatcagttgagaattcgggaagaggatattcccaagacagccttcaccactcggtatgggttgtttgagtgcacagttatgtcatttggactcaccaatgcaccggctttcttcatgaacttgatgaacaaagtgtttatggagtttcttgacaagtttgtcgtggtgttcattgacgacatacttatctattcaaagtctgaagaacaacatgagcaacatcttcgtctggtactcgagaaattgaaggagcaccagttatatgccaagtttagcaagtgtgacttctggttatcggaggtcaaatttctgggtcacgtcatttctgctcaaggcgtggcagtggatccatcaaatgtggaatcagttaccaagtggaccccaccaaagacagtttctcaaatccggagttttcttggacttgcgggttattaccgtcggttcatcgaaaatttctctaagattgccaagcccatgacacagttgctaaagaaagatgaaaaattcaaatggtcagctgagtgcaaccaaagttttgaagaactcaagaagaagttagtctctgcaccagttctaattttgccagatcagacaaaagacttccaagtctactgtgatgcatctcgccaagggttgggatgcaaagcaaatgtggtagcagatgctttgagcagaaaaagctattgcaatgccttatgcactgaagacatgtgtggcaaattgcagcaagatcttgagcacctaaatttgggcatcgtggaacacggatacgttgctgccctagaggcaaggcctacgctcgtggatcaagtcagagcagctcaggtaaatgatcctgaaatagctgagctaaaaaagaatatgagggtcggaaaagcccgagatttccatgaggatgaacatggcacaatctggttgggagaaagattgtgtgtgcctgacgacaaagaactgaaggatctcatactcacagaagctcatcaaactcagtattcaattcatcccggtagtactaaaatgtaccaggacctcaaagagaaattctggtgggtcagcatgagaaaggaaatagccgaattcgtcgcactctgcgatgtttgtcagcgagtcaaagcagaacatcagaggcccgcaggactgctacaaccccttcagatcccggaatggaaatgggaagaaatcggaatggatttcatcactggtttgcccaggacatcgtcagggcatgattcaatttgggtagtcatggatcgcctcacgaaagttgctcattttattccggtgcacactacctatacggggaaaaggttggcagagctgtacttagcaaggatcatgtgtctgcatggggtacctaagaagatagtatctgatcgagggagtcagttcacatcaaaattttggcagaaactgcaagaagaattggggactcgtttgaatttcagcacggcttatcatccgcaaacagatggtcagaccgagcgagtaaatcaaatcttggaagatatgttgagagcttgtgcacttgactttggtggagcctgggataaaagtctaccgtatgcggaattctcttacaacaacagctatcagtccagtttgcagatggcaccgtttgaagcattgtacggacgaaagtgccgcacaccacttttctggaatcaaacaggtgagcgccaactgtttgggacagaagtgttaaccgaagcagaggagaaagtcaggaccgtcagggaaagactgcgaatcgcccagtctcggcagaagagttatgctgataatcgccgaagagagcttactttcgaagcaggggattatgtgtaccttcgtgtcactccgctccggggagtacaccggttccaaacgaaaggcaaattggcaccacgctttgtgggaccatacaggatcttggaacgcagaggtgaagtcgcttaccagcttgagctcccatctaatatggttggaatccacgatgtgtttcatgtatctcaattgaagaagtgtttgagggtacctgaggaacaagctagctcagagcacattgacatccaggaagatctgacttatgtggagaagccgattcgtatcctcgagaccagtgagagaaggaccagaaacaaggtgatcaggttttgcaaagttcagtggagccaccactcggaagaagaggccacctgggaaagagaagatgaattgaaggccgctcatccgcacctctttgccaactcttccgaatctcggggtcaagattccgtttaa

SEQ ID NO: 13926 - DNA, 4275 bp, Oryza sativa
  Clone ID: TFbOSC900325j.C1.o4.fg
atggtgaagacaaggaatgatctccgtaactccaacgacgccagtggtagcgaagagcagacagatgaagctcataccagtggtgcacctggcagcagttcatctccgccgcctgagaacccaacagtcactcagatgatgacaatgatgatgcaacagatgcagcaacattaccatcagatgttgcagcaggcgcaacagaaccagcagtttggtcctccaccatcacacgccaacgactggctccgtgctattgagaagaagctgaacctactgcaatgcaacgatcaggagaaagttgcttttgctacacaccagttgcaaggtcccgcttctgcctggtgggataactacgtggtgacccgtccagatgcaacgaaggttacttgggcagagttttgtcaaaactttaggaaggcacagattcctgaagggattatggcacaacagaagagagagttccgtgcattgcaacaaggaaccagaacggttatagagtacctgcacgagttcaaccgccttgcgcgctacgctcctgaggacgtgcgctccgataccgagaagcaggagaagtttttgtttgggctcgatgatgaattgaccaaccagctaatctccggagtctatgaggactttgagaagcttgtggacaaggctatccgccaggaagagcaacgcaacaaaatggaccgaaaaagaaaggcagctcagatcagctttcctcaggggaacaatcagaagcctcgcttcatgatgggacagctaggtgggccttccaccctgatcgtctgtcagcaccgtccctatcacccgagtaacttcaacaacgattacaacggtggcagtcacaacaaccgtaagcagcacaaccacaactcgactccacccccactaatggcaccagctcagtcagatccgccagctgtgtcagctcagtcagaacaacccaagaagggggctgtaggaaagccaggaccctgcttcaactgtggcaagcacggccactttgctagcaagtgtccgaagctgaatcgcactagacccaggttcatccaggcccgcgccaatcatgtgtctgcagaggaagcacaggcagcaccagaggtcgtgttgggcacgtttccaatgaactcatatccagcaacagttctctttgattcaggtgcctcgcattctttcatttccaaaagatttgctgggacacatggattatcggtagtggaacttaaaataccgatgcaggtacatacccctggaaatgatatgaggacagcacactactgcccctcggtgactatagagatcaaaagatcaccgtttctatccaacctcatccttctcgaatctaaagacctagatgtcattctcggaatggattggttgaccagaaacaagggagtgattgactgcgcaagccgcaccatcaccctaaccaacgacaaaggggagaagatcaccttccgttccccagcgtcgcagaagcccgtagcgagtctgaatcaggctgctattgagggtcagacagaaacagtggagaaaagtcccaggaagttggaggatattcctatagtacaagagtatcctgaggtgttcccagaagacctcactacaatgccaccgaagagagaaatcgagttccggatcgatttggtacccgggactgctccaatttacaagaggccgtacagaatggcagctaatgagctagcagatgtcaagaagcaggttgacgaacagctgcagaaagggtacatccgaccgagtacttcaccttggggtgctccggtgatctttgtggagaagaaagacaggaccaagagaatgtgcgtggattatcgcgcccttaatgaggtcacaatcaagaacaaatatccgttgccaagaattgatgacctgtttgatcagctaaaaggagctaaggtgttttccaagatagacctacgatcaggctatcatcagttgagaattcgggaagaggatattcccaagacagccttcaccactcggtatgggttgtttgagtgcacggttatgtcctttggactcaccaatgcaccggctttcttcatgaacttgatgaacaaagtgtttatggagtttcttgacaagtttgtcgtggtgttcattgacgacatacttatctattcaaagtctgaaaaacaacatgagcaacatcttcgtctggtactcgagaaattgaaagagcaccagttatatgccaagtttagcaagtgtgacttctggttatcggaggtcaaatttctgggtcacatcatttctgctcaaggcgtggcagtggatccatcaaatgtggagtcagttacaaagtggaccccaccaaagacagtttctcagatccggagttttcttggacttgcgggctattaccgtcggttcatcgaaaatttctccaagattgccaggcccatgacacagttgctaaagaaagatgaaaaattcaagtggtcagctgagtgcaaccaaagttttgaagaactcaagaataggttagtctctgcaccagttctaattttgccagatcagacaaaagacttccaagtctactgtgatgcatctcgccaagggttgggatgtgtgttgatgcaagaaggcagagtggtcgcatacgcttcgcgacagttgcgtccacacgagaccaattatcccactcatgaccttgagttagcagcagtggttcatgctctgaaaatctggcggcactatcttattggcaaccgctgtgaagtatacactgatcacaagagtctgaagtacatcttcactcagcctgacttgaatctccgacagcgaagatggctggagttaattaaagattatgacatggggatacattatcatccaggcaaagcaaatgtggtagcagacgctttgagcagaaaaagctgttgcaatgccttatgccctgaagacatgtgtggcaaattgcagcaagatcttgagcacctaaatttgggcatcgtggaacacgggtacgtagctgccctagaggcacggcctacgctcgtggatcaagtcagagcagctcaggaaaatgatcctgaaatagctgagctaaaaaaaaatatgagggtcggaaaagcccgagatttccatgaggatgagcatggcacaatctggttgggagaaagattgtgtgtgcctgacgacaaagaactgaaggatctcatactcacagaagctcatcaaactcagtattcaattcatcccagcagtactaaaatgtaccaagacctcaaagagaaattctggtgggccagcatgagaagagaaatagccgaattcgtcgcactctgcgatgtttgtcagcgagtcaaagcagaacatcagaggcccgcaggactgctacaacctcttcagatcccggaatggaaatgggaagaaatcggaatggatttcatcactggtttgcccaggacatcgtcagggcatgattcaatttgggtagtcgtggatcgcctcacgaaagttgctcatttcattccggtgcacactacctatacggggaaaaggttggcagagctgtacttagcaaggatcatgtgtctgcatggggtacctaagaagatagtatctgatcgagggagtcagttcacttcaaaattttggcagaaactgcaagaagaattggggactcgtttgaatttcagcacggcttatcatccgcaaacagatggtcagaccgagcgagtaaatcaaatcttggaagatatgttgagagcttgtgcacttgactttggtggagcctgggataaaagtctaccgtatgcggaattctcttacaacaacagctatcagtccagtttgcaaatggcaccgtttgaagcattgtacggacgaaagtgccgcacaccacttttctgggatcaaacaggtgagcgccaactgtttgggacagaagtgttaaccgaagcagaggagaaagttaggaccgtcagggaaagactgcgaatcgcccagtctcggcagaagagttatgctgataaccgccgaagagagcttactttcgaagcaggggattatgtgtaccttcgtgtcactccgctccggggagtacaccggttccaaacgaaaggcaaattggcaccacgctttgtgggaccatacaggattttggaacgccgaggtgaagtcgcttaccagcttgagctcccatctaatatggttggaatccacgatgtgtttcatgtatctcaattgaagaagtgtttgagggtacctgaggaacaagctagctcagagcacattgacatctag

SEQ ID NO: 13927 - DNA, 4766 bp, Oryza sativa
  Clone ID: TFbOSC900398j.C1.o13.np
ctccgggtcaccgacaggtggggcccacctgtcggccccttcttcctcctccagccgacggcaccgccgccgccgaaaccgccaccgacgccgccggtttccccgtttcccgcggcccactccgcccgtaaccccaagcccacgtcgccgcccaccttccccgcacctcccgccagttcgggggcccgcaaacggcgggggggatttgaaatttcccatggtgaagacaaggaatgatccccgtgactccaacgacgccagtggcagcgaagagcagaccgatggagctcatgtcagtggtgcatctggcagcagatcatctccaccgcccgaaaacccaacagtcactcaaatgatgacaatgatgatgcaacagatgcagcaacattaccatcagatgttgcagcaggcgcaacagaaccagcagtttggtcctccaccatcacacgtgtccaaactgttagactttcttcgtatccagccacccactttctcaagcaccaccaacccaatggaggccaatgactggctccgtgctattgagaagaagctgaacctactgcaatgcaacgaccaagagaaagttgcttttgctacacaccagttgcaaggtcccgcttctgcctggtgggataactacgtggcgacccgtctagatgcaacggaggttacttgggcagagttttgtcaaagcttcaggaaggcacagattcctgaagggattatggcacaatagaagagagagttccgtgcgctccagcaaggaaccatgtcagttacagagtacttgcatgagttcaaccgccttgcgcgctacgctcctgaggacgtgcgcaccgatgctgagaagcaggagaagtttttgtttgggctcgacgatgaattgaccaaccagctaatctccggagtctatgaggactttgagaagcttgtggacaaggctatccgccaggaagagcaacgcaacaaaatggaccgaaaaagaaaggcagctcagatcagctttcctcaggggaacaatcagaagcctcgcttcatgacgggacagctaggtgggccttccaccctgatcgtctgtcagcaccgtccctatcacccgagtaacttcgacaacgactacaacggtggcagtcacaacaacagtaagcagcacaaccacaactcgactccacccccactaatggcaccagctcagtcagatccgccagctgtgtcagctcagtcagaacaacccaagaagagggctgtaggaaagccaggaccctgcttcaactgtggcaagcacggccactttgctagcaagtgtccgaagctgaatcgcactggacccaggttcatccaggcccacgccaatcatgtgtctgcagtggaagcacaggcagcaccagaggtcgtgttgggcacgtttccagtgaactcatatccagcaacagttctctttgattcaggtgcctcgcattctttcatttccaaaagatttgctgggacacatggattatcggtagtggaacttaaaataccgatgcaggttcatacccctggaaatgatatgaggacagcacactactgcccctcggtgactatagagatcagaagatcaccgtttctatccaacctcatccttctcgaatctaaagacctggatgtcattcttggaatggattggttgaccagaaacaagggagtgattgactgcgcaagccgcaccatcaccctaaccaacgacaaaggggagaagatcaccttccgttccccagcgtcgcagaagtccgtagcgagtctgaatcaggctgctattgagggtcagacagaaacagtggagaaaagtcccaggaagttggaggatattcctatagtacaagagtatcctgaggtgttcccagaagacctcactacaatgccaccgaagagagaaatcgagttccggatcgatttggcacccgggactactccaatttacaagaggccgtacagaatggcagctaatgagctagcagaggtcaagaagcaggttgacgaacagctgcagaaagggtacatccgaccgagtacttcaccttggggtgctccggttatctttgtggagaagaaagacaagaccaagaggatgtgcgtggattatcgcgcccttaatgaggtcacaatcaagaacaaatatccgttgccaagaattgatgacctgtttgatcagctaaaaggagctaaggtgttttccaagatagacctacgatcaggctatcatcagttgagaattcgggaagaggatattcccaagacagccttcaccactcggtatgggttgtttgagtgcacggttatgtcctttggactcaccaatgcaccggctttcttcatgaacttgatgaacaaagtgtttatggagtttcttgacaagtttgtcgtggtattcattgacgacatacttatttattcaaaatcagaagaggaacatgagcaacatcttcgtctggtacttgagaaattgaaggagcaccagttatatgccaagtttagcaagtgtgacttctggttatcggaggtcaaatttctgggtcacgtcatttctgctcaaggcgtggcagtggatccatcaaatgtggaatcagttacaaagtggaccccaccaaagacagtttctcagatccggagttttcttggacttgcgggctattaccgtcggttcatcgaaaatttctctaagattgccaggcccatgacacagttgctaaagaaagataaaaaattcaaatggtcagctgagtgcaaccaaagttttgaagaactcaagaagaagttagtctccgcaccagttctaattctgccagatcagacgaaagacttccaggtctactgtgatgcatctcgccaaggattgggatgtgtgttgatgcaagaaggcagagtggtcgcatatgcttcgcgacagttgcgcccacacgagaccaattatcccactcatgaccttgagttggcagcagtggttcatgctctgaaaatctggcggcactatcttattggcaaccgctgtgaagtttacactgatcataagagcctgaagtacatcttcacccagcccgacttaaatctccggcaacgaagatggctggagttgattaaagattatgacatggggatacactatcatccaggcaaagcaaatgtggtagcagatgctctgagcagaaagagctattgcaatgcagtatgtaccgaaggcatgtgtgacaaattgcagcaagatcttgagcacctaaatttgggcatcgtagaacacgggtacgtagctgccctagaggcccggcctacgctcgtggatcaagtcagagcagctcaagtaaatgatcctgaaatagctgagctgaaaaagaatatgagggttggaaaagctcgagatttccatgaggatgagaatggcacaatctggttgggagaaagattgtgtgtgcctgacgacaaagaactgaaggatctcatactcacagaagctcatcaaactcagtattcaattcatcccggcagtactaaaatgtaccaggacctcaaagagaaattctggtgggtcagcatgagaagagagatagccgaattcgtcgcactctgcgatgtttgtcagcgagtcaaagcagaacatcagaggcccgcaggactgctacaaccccttcagatcccggaatggaaatgggaagaaatcggaatggatttcataacaggtttgcccagaacatcgtcggggcacgattcaatctgggtggtcgtggatcgactcaccaaagttgctcattttattccagtacacactacctatactgggaaaaggttggcagagctttatctttcaagaatcatgtgtttgcatggggtacctaagaagattgtatctgatcgaggaagtcaattcacttcaaagttttggcagaaactgcaagaagaattggggactcgtttgaatttcagcacggcttatcatccacaaacagatggtcagaccgagcgagtaaatcaaatcttgtaagatatgttgagagcttgtgcacttgactttggtggagcctgggataaaagtctaccgtatgcggaattctcttacaacaacagctatcagtccagtttgcaaatggtaccgtttgaagcattgtacggacgaaagtgccgcacaccacttttctgggatcaaacaggtgagcgccaactgtttgggacagaagtgttaaccgaagcagaggagaaagtcaggaccgtcagggaaagactgcgaatcgcccagtctcggcaaaagagttatgctgataaccgccgaagagagcttactttcgaagcaggggattatgtgtacccttcgtgtcactccgcttcggggagtacaccgcttccaaaccaaaggcaagttggcaccacgctttgtgagaccatacaggatcttggaacgcagaggtgaagtcgcttaccagctagagcttccacctaatatggttggtatccacgatgtgtttcatgtgtctcaactgaagaagtgtttgagggtacctgaggaacaagctagctcagagcacattgacatccaagaagatttgacctacgtggagaagccagttcgtatccttgagaccagtgagagaaggaccagaagcaaggtgatcaggttttgcaaagttcaatggagccaccactcagaggaagaggccacctgggaaagagaagatgaattgaaggccgcccatccgcacctcttcgccagctcttccgaatctcggggccgagattccgtt

SEQ ID NO: 13928 - DNA, 4913 bp, Oryza sativa
  Clone ID: TFbOSC900414j.C1.o9.np
agacgattatcctggtttaggcccttagcatggggtaataccctacgtctggtgatgtagattggatctatgtcaactaaaaagacaagagtgttaccgcttagggttagtgccagcgcccttatagagctagggcaaccgacgacatgcttcgtacagtatccctcataatccggctccagccgacggcaccgccgccgccgaaaccgccaccgacgccgccggtttccccgtttcccgcgcccactccgcccgtaccccacgcccacgtcgccgcccaccttccccgcacctcccgccagctcgcgcgcccgcaaacggcgggggatttgaaatttcccccactctctctctcctcctccatatggtgaagacaaggaatgatccccgtgactccaacgacgccagtggcagcgaagagcagaccgatggagctcatgtcagtggtgcatctggcagcagatcatctccaccgcccgaaaacccaacagtcactcaaatgatgacaatgatgatgcaacagatgcagcaacattaccatcagatgttgcagcaggcgcaacagaaccagcagtttggtcctccaccatcacacgtgtccaaactgttagactttcttcgtatccagccacccactttctcaagcaccaccaacccaatggaggccaatgactggctccgtgctattgagaagaagctgaacctactgcaatgcaacgaccaagagaaagttgcttttgctacacaccagttgcaaggtcccgcttctgcctggtgggataactacgtggcgacccgtctagatgcaacggaggttacttgggcagagttttgtcaaagcttcaggaaggcacagattcctgaagggattatggcacaatagaagagagagttccgtgcgctccagcaaggaaccatgtcagttacagagtacttgcatgagttcaaccgccttgcgcgctacgctcctgaggacgtgcgcaccgatgctgagaagcaggagaagtttttgtttgggctcgacgatgaattgaccaaccagctaatctccggagtctatgaggactttgagaagcttgtggacaaggctatccgccaggaagagcaacgcaacaaaatggaccgaaaaagaaaggcagctcagatcagctttcctcaggggaacaatcagaagcctcgcttcatgacgggacagctaggtgggccttccaccctgatcgtctgtcagcaccgtccctatcacccgagtaacttcgacaacgactacaacggtggcagtcacaacaacagtaagcagcacaaccacaactcgactccacccccactaatggcaccagctcagtcagatccgccagctgtgtcagctcagtcagaacaacccaagaagagggctgtaggaaagccaggaccctgcttcaactgtggcaagcacggccactttgctagcaagtgtccgaagctgaatcgcactggacccaggttcatccaggcccacgccaatcatgtgtctgcagtggaagcacaggcagcaccagaggtcgtgttgggcacgtttccagtgaactcatatccagcaacagttctctttgattcaggtgcctcgcattctttcatttccaaaagatttgctgggacacatggattatcggtagtggaacttaaaataccgatgcaggttcatacccctggaaatgatatgaggacagcacactactgcccctcggtgactatagagatcagaagatcaccgtttctatccaacctcatccttctcgaatctaaagacctggatgtcattcttggaatggattggttgaccagaaacaagggagtgattgactgcgcaagccgcaccatcaccctaaccaacgacaaaggggagaagatcaccttccgttccccagcgtcgcagaagtccgtagcgagtctgaatcaggctgctattgagggtcagacagaaacagtggagaaaagtcccaggaagttggaggatattcctatagtacaagagtatcctgaggtgttcccagaagacctcactacaatgccaccgaagagagaaatcgagttccggatcgatttggcacccgggactactccaatttacaagaggccgtacagaatggcagctaatgagctagcagaggtcaagaagcaggttgacgaacagctgcagaaagggtacatccgaccgagtacttcaccttggggtgctccggttatctttgtggagaagaaagacaagaccaagaggatgtgcgtggattatcgcgcccttaatgaggtcacaatcaagaacaaatatccgttgccaagaattgatgacctgtttgatcagctaaaaggagctaaggtgttttccaagatagacctacgatcaggctatcatcagttgagaattcgggaagaggatattcccaagacagccttcaccactcggtatgggttgtttgagtgcacggttatgtcctttggactcaccaatgcaccggctttcttcatgaacttgatgaacaaagtgtttatggagtttcttgacaagtttgtcgtggtattcattgacgacatacttatttattcaaaatcagaagaggaacatgagcaacatcttcgtctggtacttgagaaattgaaggagcaccagttatatgccaagtttagcaagtgtgacttctggttatcggaggtcaaatttctgggtcacgtcatttctgctcaaggcgtggcagtggatccatcaaatgtggaatcagttacaaagtggaccccaccaaagacagtttctcagatccggagttttcttggacttgcgggctattaccgtcggttcatcgaaaatttctctaagattgccaggcccatgacacagttgctaaagaaagataaaaaattcaaatggtcagctgagtgcaaccaaagttttgaagaactcaagaagaagttagtctccgcaccagttctaattctgccagatcagacgaaagacttccaggtctactgtgatgcatctcgccaaggattgggatgtgtgttgatgcaagaaggcagagtggtcgcatatgcttcgcgacagttgcgcccacacgagaccaattatcccactcatgaccttgagttggcagcagtggttcatgctctgaaaatctggcggcactatcttattggcaaccgctgtgaagtttacactgatcataagagcctgaagtacatcttcacccagcccgacttaaatctccggcaacgaagatggctggagttgattaaagattatgacatggggatacactatcatccaggcaaagcaaatgtggtagcagatgctctgagcagaaagagctattgcaatgcagtatgtaccgaaggcatgtgtgacaaattgcagcaagatcttgagcacctaaatttgggcatcgtagaacacgggtacgtagctgccctagaggcccggcctacgctcgtggatcaagtcagagcagctcaagtaaatgatcctgaaatagctgagctgaaaaagaatatgagggttggaaaagctcgagatttccatgaggatgagaatggcacaatctggttgggagaaagattgtgtgtgcctgacgacaaagaactgaaggatctcatactcacagaagctcatcaaactcagtattcaattcatcccggcagtactaaaatgtaccaggacctcaaagagaaattctggtgggtcagcatgagaagagagatagccgaattcgtcgcactctgcgatgtttgtcagcgagtcaaagcagaacatcagaggcccgcaggactgctacaaccccttcagatcccggaatggaaatgggaagaaatcggaatggatttcataacaggtttgcccagaacatcgtcggggcacgattcaatctgggtggtcgtggatcgactcaccaaagttgctcattttattccagtacacactacctatactgggaaaaggttggcagagctttatctttcaagaatcatgtgtttgcatggggtacctaagaagattgtatctgatcgaggaagtcaattcacttcaaagttttggcagaaactgcaagaagaattggggactcgtttgaatttcagcacggcttatcatccacaaacagatggtcagaccgagcgagtaaatcaaatcttgtaagatatgttgagagcttgtgcacttgactttggtggagcctgggataaaagtctaccgtatgcggaattctcttacaacaacagctatcagtccagtttgcaaatggtaccgtttgaagcattgtacggacgaaagtgccgcacaccacttttctgggatcaaacaggtgagcgccaactgtttgggacagaagtgttaaccgaagcagaggagaaagtcaggaccgtcagggaaagactgcgaatcgcccagtctcggcaaaagagttatgctgataaccgccgaagagagcttactttcgaagcaggggattatgtgtacccttcgtgtcactccgcttcggggagtacaccgcttccaaaccaaaggcaagttggcaccacgctttgtgagaccatacaggatcttggaacgcagaggtgaagtcgcttaccagctagagcttccacctaatatggttggtatccacgatgtgtttcatgtgtctcaactgaagaagtgtttgagggtacctgaggaacaagctagctcagagcacattgacatccaagaagatttgacctacgtggagaagccagttcgtatccttgagaccagtgagagaaggaccagaagcaaggtgatcaggttttgcaaagttcaatggagccaccactcagaggaagaggccacctgggaaagagaagatgaattgaaggccgcccatccgcacctcttcgccagctcttccgaatctcggggccgagattccgtt

SEQ ID NO: 13929 - DNA, 930 bp, Oryza sativa
  Clone ID: TFbOSC423524j.C1.o5.fg
atggcggagaaggaggtcgggaggatcttcgtgggcgggctgtcgtgggacaccacggagcgcacgctcgagcgcgccttcagcgagtacggcaaggtcatcgagacgcagatggtcgtattggaaagagacacaggccgctcccgtggatttgggtttgttacattctcagaacctcgggctgtggatgctgcaattcggggaatgcataatggagaactagatggcagaaccatttctgtgaacaaggctcaacctaggatgaacactgatgatggctatggctatggtggtggtggtggtggtggtggtacttactcatctggtgctagaggtggatatcgtggtggaggtgatgcagttccctctgcaaatgatgactgcttcaaatgtggccgtgcgggacattgggctcgtgaatgtccttattccagtggaggtgggggtggtagaactggaaggtactcacccccttccagatatggcagtggaactggtggtggacgtggtgaccgctttggaggatcagaccgttttgctaaccgctatgttgatgaccgatatgatggtgggcgctatgttgatgatcgctatggtggtggtggacgtgatcgatatgccactgatcgctatccaccaactgccgatcgttttacaggtgacagatatggtggttctgatcgttatgcatcaagtggatttaccagggaaagaagctatgaaagagatggaggacggtccggtggaagttactatcgtgatgaacctagaggctctggtggttatgacagaggtggcatgcgcatggggagtggtgacagatacgggaccggtggacctgctcgctttgctgggagttacagagataggcctgccccatatgatcgtcccagccgggcagcagcacgcacttatgatgaccgctactga

SEQ ID NO: 13930 - DNA, 910 bp, Oryza sativa
  Clone ID: TFbOSC423524j.C1.o9.gp
taatcttcaatgctatccagaataaaattatataagacagcacactcggaacacgattattacactggagggtaattacacagtaccacgataacagggaatcagaatcacccactgcctggagcttaatgtgccaacatactaacaattcaagaactgccttattgtctcactagtaattaaacaaactgcatggaagaacaacactcaaagagtcgatgtactaatacaggaaggcaaataaagtaggaactgcgaactggaacatatatttgtaattctggtcttctgcaatgctccgaagtaacctccatcagtagcggtcatcataagtgcgtgctgctgcccggctgggacgatcatatggggcaggcctatctctgtaactcccagcaaagcgagcaggtccaccggtcccgtatctgtcaccactccccatgcgcatgccacctctgtcataaccaccagagcctctaggttcatcacgatagtaacttccaccggaccgtcctccatctctttcatagcttctttccctggtaaatccacttgatgcataacgatcagaaccaccatatctgtcacctgtaaaacgatcggcagttggtggatagcgatcagtggcatatcgatcacgtccaccaccaccatagcgatcatcaacatagcgcccaccatcatatcggtcatcaacatagcggttagcaaaacggtctgatcctccaaagcggtcaccacgtccaccaccagttccactgccatatctggaagggggtgagtaccttccagttctaccacccccacctccactggaataaggacattcacgagcccaatgtcccgcacggccacatttgaagcagtcatcatttgcagagggaactgcatcacctccaccacgatatccacc

SEQ ID NO: 13931 - DNA, 5607 bp, Oryza sativa
  Clone ID: TFbOSC400058j.C1.o8.fg
atggccgcaagaatggtgacggcggggcttcgtccacctcatgcttgggccaagcgagctgttcggggtggcgcgttggtggtggtgccggcagtggcggagcctaggccatggcaggcagccaggacatgcttgctagggagcgaggctggccgaattaacgttggtgtcgaggctggcacacgggaagagatggtgcaggcgtggcaggccggcgcgtggatggcgacggtaaccggagagctagtgtggcacttgattgatcatctccatgccgggtcattgcttgttactcttggaggttgccgcctcctagacggcttgtggaggagttgcccggtgacctctccgagaagattgtggaggaggcccggcgctggctttgctatcaccggcacgctcttgatggagattgatcaccgcaacctccaactcaatgcccaagctatgaatgctttgttcaactctttgagccaagaggagttcgatagagtgagcaaccttgagactgcatatgagatttggaacaagttggcggagatccatgagggcataagcgagtacaaggatgccaagcttcatttcctcaagatccaatatgagacattctccatgttgcctcatgagagtgtgaatgacatgtatgggaggctcaatgtcattgtaaatgatctcaagggacttggggcaaactataccgatcttgaggttgcccaaaagatgcttagggctctaccagagaagtatgagacccttgtcaccatgctcatcaactctgacatgtcaaggatgacacccgcaagcctcttggggaagatcaacaccaatgacatgtacaagttgaagaagaaggagatggaggaagtctcacattccaagaagtgcattgttctacaagccgaagttaaagacaagggcaagggcaaggtgaatgaagccaatgaggacttggaggaagagattgcccttcttgctagaaggtgctttgagtgtggtgagaagggacactttgcttccaagtgcccttccaaggatgatgatggagacaagtcatccaagaagaagagtggaggctacaagctcatgaagaagctcaagaaggaaggcaagaatattgaggcctttatcggggaatgggactcaaatgaggagagctccgcctcatccgggtccgaagaagaaggtggtgatgatgcaagctccaagaagaagaagatggccgttgttgccatcaaggaggctccatcactcttcgctccactttgtctcatggcaaaggactcctctaaggtagcatttcttagtgatagtgagagtgatgatgattgtgatgatgtttcctatgatgagcttgtgagtatgtttaaggagctctatgcttatagtgagaaggagattgtcaagttcaaggcccgaaagaaggatcatgcttctttggaggtcttgtatgaggagctaaagacctctcatgagagactcaccatttctcatgagaagcttaaggaagctcatgacaacctcctttccactactcaacatggagttctcattgatgttggcatatcttgtgatttgcttgatgatagtgctatttgccatattgctcatgttgtatcatctagcatttctacctcttgtgatgatcttgtggatatgcctagctctagctctagcacttgtgtttctatttgtgatgcctcacttgttgttgagaacaatgagcttaaggagcaagtggttaagctcaacaagagtttggagatgtgcttcaagggaaggctcatgatggtagcattattgctagatatgtgggttcccctatactccgtggtgaactaccgcaccggtgggagccattgtgtgcttgatagtggatgcactcaacacatgactggtgatagggctatgttcaccatatttgaagtaggagggaaagaacaagagaaagtgacatttggagacaatagcaaaggaaaggtaattgggttagttgcaaaaacttcaatgggttggctttggcataggaggctagcccatgtttgcgtgaatcaattgagcaaactttcaaaacgtgatctagttgtgggcttgaaagatgtgaagtttgagaaagataagctttgtagtgcttgtcaagctggcaagcaagttgcatgttctcatcctactaagagtatcatgtccacatctagaccattggagctcttgcatatggatttgtttggcccaacaacctataagagcattggtgtggagaggaaaaatcgtacattgattgagatggcaatgactatgcttgatgaatatggtgtttctgattccttttgggcggaagccataaacaccgcttgccatgcaaccaattggctttatttgcatcgtctcatgaaaaagactttctatgagcgaattattgggaggaagccaaatgttgcctattttcgagtttttggttgcaagtgttatatttatcaaaagggtgttagactaaccaaatttgaaagtcgttgtgatgaagggtttcttctaggttatgcctcaaatagcaaggcataccgggtctacaacaagaacaaaggtattgtggaagaaaccgccgatgttcaatttgatgagactaatggctcccaagaggggcacaagaatctggatgatgtaggtgatgaaggcttgatgagagctatgaagaacatgtcaattggagatgtcaagcctactgaagtggaagacaagccatccacctccactcaagatgagccatctacttccgctacgccaagtcaagctcaagttgaagtggaggaggagaaggcacaagatccacctatgccaccaaggatacacaccgctctttccaaggatcacccaattgaccaagtgttgagtgacattagtaagggtgttcaaactcgatctcgtgtcgcttcaatttgtgaacattactcgtttgtttcttgtcttgagccaaaacatgtagatgaagctctttgtgatccggattggatgaatgctatgcatgaagagctcaacaactttgcaagaaataatgtgtggactttggttgaaagacttagagaccacaatgtcatagggacaaagtgggtctttaggaacaaacaagatgagaacgggttggtggtgagaaacaaggcaaggttggtggcacaaggtttcacacaagttgaaggtttggacttcggtgaaacttttgcccccgtggcaagacttgaggctattcgcatccttcttgcatttgcattatgctttgatataaaactatttcaaatggatgtgaaaagtgcttttctaaatggtgaaattgccgaacttgtctttgttgaacaacctcccggttttgaagatcctaaaaatcctaaccatgtttataaactctcaaaagctctttatggtttaaaacaagctcctagggcttggtatgaaagattgagagattttcttttgtcaaaggatttcaaaattggaaaagttgacaccacccttttcacaaaaatcattggtgatgatttctttgtgtgtcaaatttatgttgatgatttcattttcggttctactaataaggtattttgcaagggatttggtgatatgatgtctagggaatttgagatgtccatgattgaagaattgagcttcttccttggacttcaaatcaagcaactcaaggatgggacgttcgtgagccaaaccaagtacatcaaggatctactcaagaggtttggcttggaggatgcgaagcccatcaagacacctatggcaaccaacgggcatctcgaccttgatgagggaggtaaaccggtagatttaaagctttatcgttctatgattggtagcttgctttaccttactgcatctaggccggatatcatgtttagtgtttgcatgtgtgcacggtttcaagccgctcctaaggagtgtcacttagtggccgtgaaaaggattctaagatatttaaagcattcctctactattggcttgtggtacttaaaaggtgctaagtttaaacttgttggctattccgattcggattatgccggttgcaaagtggatagaaagagcacattcggtagttgccaaatgcttggtagatcccttgtgtcatggtcatccaagaaacaaaactccgtagccctctaccgccgaggcggaatatgtttcggcggaaactatattcttatttttggccaaaatgagattttcctccaaaatgagattgagagagaatttgagaaaagtttcaaaacaaagttgaggtggtctgatcgagctcggtcagcggtcgacggtctgaccgagctcggccgacggtctgaccgacatgtggacggcggtctgaccggccgttatccaccgcaaatgcctccccgcactcgtcatagtcgtcgtgagcccacgcccgatcccgtgagtgaggagtcaagcggagatgagtacgctcaaagtgatgaagaggttgaggccaatgttgagggggctagtgaggaggaaagtggagatgatgtcagtggaagtggagaggatgaggatgaaggaagtgatgatatgcacattgatccctccatccagtttgttgtgaacatgaggaatccatcgcagtataccattttgaggcaccatgatcagtttttgaggcctcgggacacccggaatccccgttttcacaccgctttccaaaagatgtgggtggctggagactatagtgagatgaagtggatgtccgacacccttcagtgttctatctctaggaggcaattctggcggctcctcagtattcgcttggactttggagatgacttgcatgaggagcacactcacaatccgctctccatagactacgtctctcagttttacgaagacggagtgtggtacacacatgggaaggttgccggcttgaggaccatcccctgtgtggttaacaggattgtgagagttaccatcctccctcgccttggtaacaatgatgacattaggggggtggcttggcacgtcatcgatgccatcattcagggccatcaattcgacattgtgtctcttatgatgcaagagattgccatctctaaggctacattcactcagggaatctattatgccccttacatcatgaggttgattcaagacaagcttggggctgttgggcaaaatttaaagaagcacaagcagtacaagccccgccttcagcttggagctccccgtgctcctagggcggcaccctcctctcatcctggagctagctcaagctcagcacctcctcctcctcatgggtatgatccaaatgcttttttctatcctcagtatgcctactttggaatgcaaccaaacgaatactttaacccggtacttggggctattaataccctaagtgaaagcattcaacgcttgtccaccgggcatgaagctttgcatgagaatgttcgtggattgcgcacagatgttggagacttgaatgcttctgtggggagattgcacactagagtgggtacattggattctcgagtccaaatgttggagagctcccaagcatttgtgtatcatcgtcgtcgtgatgctcctcatccttccacttcggcgcgtcctcctcctctacaagagtga

SEQ ID NO: 13932 - DNA, 2796 bp, Oryza sativa
  Clone ID: TFbOSC900191j.C1.o6.fg
atgtcgaacactggacacaacggcaacactggagacaaggagaaggaggttcctgtcaacatcaacggagtcaatactgcctcaaactccaacagaggaccattcttggggtccttttcggtagttggctttgccgcaacactgaaacatcatgcttttgatggttcgaactataagagatggaaagcacgtgcactactatggttgacagcgatgcaatgcttctatgtttcacggggcaaacagagtgaaccgcctctctcttctgagaaggaggctaagttcgaggcttcggattgcctgttccgtggagcattgatcagtgtactcgctgataatatagtggacgtgtacattcacatgccttcacggaaggacatgtatgatgcacttgaggccaagttcagagtttccgacgccggcaacgagctgtatgtcatggagcagttctatgactacaagatggtcgatgaccattctgtagtgcaacaggctcatgagattcagatgctggcaaaggaacttgagaacaacaactgcgagttgccgggcaagtttgtggcgggtggcattattgccaaattgccaccttcttggttggactttgctacttctctaaaacacaaaaggcaaaagttcagtgttactgatctcattggctctttgggtgttgaggagaaggagagggcaaaggacaaccggggcaataagatcgagggagggacaagaagtccgccaacatggttattagcgagggtggatgaacattggggtacggctactaccaattttaagaagaaaggcaagggaaaggccaagggcaactgctttgtgtgcggtaaacctaggcattgggctaagaattgtcctgatcgtagggacaagaagtccgccaacatggttattagcaagggtggaggaacattggggtacggtcgggagaggttcctctttgttgatgggaaacggatagcttgcggctgttcatggtgttgcatgttgactaaagggggaaataaatatttcatgacactgatagatgattgcactagattttgctatgtgtatctattgaaaacaaaggatgaagcattacattactttaagatctataaagctgagacactgcgggactttccaaggaatggttggggtgaggcaatcttgactgcttttcatgtcctgaataaaattccagtaaagcataacttggccaaggtgaatgtacctatagccaaaaagcgtaaacttggaccaaagacggtagactgtgtgttccttggttacgctatcctcagcgtgggttattggttcttaatagtaaactctggagtacccgacatgtgtatgggtacaattactgagtccagagatgccacattctttgacaatgaatttcccatgaaaaatacacctaacacttctagtcaagaacctgttttaccccatgagcactttgcaccgatagaacacaatgatcaaacgcctgaggaaaatcctgaggaggataacattgtagatactcgaaagagtaagagacaaagggttgcaaaattctttggagatgactacattgtatacctcatggattacactccaagaaccatagaagaggcatattcatctcctgacgctgactattggaaggaagtgaaggcaaggcttgtggccaagggttatacccaaaaagaacgcgaggacttttttgacacctattcattagtagcccgcttgaccacgattcaagtactacttgctctggcggcctctcatggtcttctcgttcatcaaatggacgttaagacagctttcctaaatagagagctggaggagaagatctatatggatcaaccagatgagtatgtactagaaggtcaggagggaatggtgtgcaaactgttgaaatctttgtatggcctaaagcaagcacctaagcaatggcatgagaagtttgacacaacacttacatctgctggctttgttgtgaacgaagttgacaaatgtgtgtactatcgctatggtgggggagagggagtgatcttgtgtttatatgtcgatgacatattgatttttggaaccagcctcaaagtgattgaggaggttaaggactttctgtccaaaagctttgaaatgaaggatttgagagtggctgatgttattcttaacattaagctactgagaggagatgagggtgggattatactcgtgcaatctcactatgtggacaagatgatcattggtaagctttggaaaagagtaatgcgctatctaaagggcacagtgagctatggaattcactatactgggtacccaaaagtactggaaggatatagtgactcaaactggatatctgatgctgatgagatagaggccacaagtggatatgtgttcacacttggaggtggcgctgtttcatggaagtcttgcaagcagaccatcttaacgaggtcaacaatggaagcagaactcacagcactagatactgccacagttgaggccgagtggcttcgtgaactcctgatggatttgccggtggttaaaaaaccagtgccagctatcctaatgaactgtgataatcaaacaatgattattaaggtgaatagttcgaaggacaacatgaagtcagctaggcatgtaaagagaagactgaaatctgtcggaaagcagaaaaaatccagagtgatagcactggactatgtccagacagctaaaaatctggtagatcagtttaccaaggggctactacataatgtgatagacagtgcatcgagggaaatgggtttgagacccacttag

SEQ ID NO: 13933 - DNA, 5483 bp, Oryza sativa
  Clone ID: TFbOSC28808j.C1.o2.np
aggggcgaccacccaaccaactaccgcggagaaggcattgacgattttgtggcagagttggctcgcatgaccctggtggtgggctaccccaatgcgtcggagtactcgactgttccgccgctcagtggcaagcttcctcaccgtgttcgtctggaggttcatggctaagtgggcacctgcctcgctaacatggtggttgtggcatctggaggcacagcagatcacgcctgtcaggaggcagcatatctgatgatggccagacttcgtgagcgcgacaactacatcttctgcaacacggcgtaccgtttccaccctcgccgagcaagtggtgacggtgtcagcaccttccgtccgacagccggtgagaacgacaccaccttcggtcacatgtgcgcaatgatgaggggaatggacaggatgcactcggatctgcacaaggcgtccaaggccttgaatgatgggaagctcgtgaggatcatagctctgaaggatgagatagcacgcctgaagaaggagaatgctcacttgaagggtctccccattcccggaggagtccggatccgcaccatgccccgcaagtcgacgactgcacccgtgcgcatttagcttgcgcccaggaacccacctccgcccgcagctctcgcagctcctccagttccgcccgcagttcccgcagctcctgcagctccacctccagtcccggctccagtcccagtgtcagctcccgcgtctgctctctccttcgctccagcatcagccgccaggggtccagccagtggcaacggaggttggttgcctgctactcccagtggcagccgcgaccacagtagcagcagttccagtggctcagagctgggcagcggcgagacgtatctgctagactccaggagccgctcagagggacctggcctcttccttcagatggccaacaccaggaatggcagccgtgcagcaggtgagggcagcaacggcgaagaacgcaccgacggtgggtatcccaacagcgcctccggcaatggtccgcccccgctccccgagaatccgactcttgccccagtaatggctcatcaaactcagatgatggcagccatgatgcagcagatgcagcagcggcaccagcagatgcaccagaggatgcagcagcaagccgagcagcagtagcaacagtttggtccccctccccctcagtccaagctactagagtttttacgcgtcaggccacccaccttttccagcaccaccaaccctatggaggcaaatgactggctccacaccatagagaagaagctcaatctcctacagtgcaatgatcaggagaaggttgccttcgccacacaccagctccaaggtcccgtgtcagcttggtgggacaatcacatggccacccgtccggcaggtacggaggtcacttgggtggagttctgtcgcagctttaggaaggcgtaggtgcccgacggggtcgtggcacagaagaagagagaattccgggcactccaccagggcaaccggacggtaactgagtacctccatgagttcaatcgcctagcgtgatatgcaccggaggatgtccgcactgacgcagagaagcaagagaagttcctagcaggcctagatgacgagctgaccaaccagttgatctctggagactacgccgactttgagaagctggttgacaaggcaattcgtcaggaggatcagcgcaacaaagtggacaggaagagaaagccagcgcagttccggtcaaaccaaggaagtcaccagcgaccgcgcttcactcccggacagcagggtggacctaccaccatgatcgtccgccagcatcgccctttcaactcgagcagcttccacccgggcgctagtggcagctagaaccaccagggaggtcagctcaactgcagtgcagctctgcgcccaccaatggcaccggcacaatcagttccatcagcccaagccaagaaggagactagagcaaagccaaggtcctgtttcaactgtggcgagcatggccactttgccaacaagtgcccgaagccaaggcgtgccgggccaaggtttgcccaagctcgtgtcaaccacgcgtccgcagaggaggcgcaagcagcaccagaggtcgtactgggtacgtttcttgtcaactcagtccctgctacagtactttttgattctggtgcaacgcattctttcatttcaaagaaatttgtggggatgcatgggttaagaaaagaagagcttagtacaccaatgagggttcataccccgggaaatagttcaacctcggtcagttatagccctttagtgctaatagaaatacacctatcacaatttctagccaacctcatccttctcgaatccaaagacctagatgtcattcttgggctggatgggctgaccaagttcaagggagtcattgattgtgcgaatcgcacagtcaccttgaccaatgagaagggagaaaccatggtgtacaagtcaccagtctcaccgaagcagagaatctccttaaatcaaattgaggtggaaaaccctgtgaccaccgaggagaagagttcgcggaaattggaggatatccccatagtctgcgagtacccagaagtgttccccgaagacctcactaccatgccacctaagagagagattgaattccggattgatttggcaccgggaaatgccccaatttacaagagaccgtacagaatggtagccaatgagctagcagaggtcaagaagcaggttgatgagcagttgcagaaagggtacattcgactaagtacttcaccttggggtgctccggtcatttttgtggataagaaggacaagacgaagagaatgtgcgtcgattatcgcgcactcaatgaggtcacaatcaagaacaaatatcctttgccgcgaattgatgatttgtttgatcaactgaatggagctaaagtgttttctaaaatagacctgcgatcaggctatcaccagttgagaattcgggaggggatattcccaagacagccttcaccactcggtatgggttgtatgagtgcacggttatgtcttttggacttaccaatgcacccgcattcttcatgaacttgatgaacaaaatgttcatggaatttctggataagtttgtggtggtattcatcgatgacattcttatctattccaaattggaagaagaacatgagcgacatctccgtctggtactcgagaagttggaggagcaccagttatatgccaagttcagtaaatgcgacttttggctatcggaggtcaaattcttgggtcacgtcattacagctcagggcgtggcagttgatccgtcgaatgtggagtcagttaccaagtggaccccacctaagaccgtgtcacaaattcggagttttcttggacttgcgggttattaccgtcggttcattgaaaatttctccaggatcgccagacctatgactcagttgcttaagaaagatgagaaatttaaatggacagctgagtgtgacaagagttttgaggagttcaataagaaattagtatccactccagttctgattttgcccgaccagacgaaagacttccaagtctattgcaacgcgtcccgtcatgggcttggatgtgttctaatgcaagagggcagagtggtcgcttatgcctcgcggcagttgcgtccgcatgaagggaactatccgacacatgacttggagttggcagcggtggtttatgctttaaaaatctggacgcgttatctgattggcaaccgctgcgaagtatatacggaccataagagtctaaaatatatcttcacccaacctgatgtaaatctccgacagcgaagatggttggagttaatcaaggattacgacatgagcattcactatcatccgggcaaagccaatgtggtggcagatgcattaagcaggaagagctattgcaataccttatgcactgaaggcatgtgtaaggaattgcagcaggagcttgaacacctcaacttggggcttgtagaatacgggtacgtggctgccctagaggcacgacctacgctcgtggatcaagtcagagcagctcaagtaaatgatcctgaaatagcggatatgaaaaagaatatgagggtcggaaaagcccgggatttccacgaagatgaacatggcacaatctggttgggagaaagattgtgcgtacctgacgacaaggaactaaaggatctgatactcaccgaggctcatcagactcagtactccattcatccaggcaacaccaaaatgtaacaagacctcaaagaaaagttttggtgagtcagcatgagaagagaaatagctgaatttgtcgcactctgcgacgtttgccaacgagtgaaggcagagcaccaaaggccagcaggttttctacaacctcttcagatcccgaaatggaaatgggaggagattggaatggacttcataacaggactgccccggacatcatctggccacgattcaatctgggtagtcgtgaatcgactcactaaagttgcccatttcattccagtgcataccacgtatacggggaagaaattggcagagctgtacttggcaaggatcatgtgtctgcatggagtacccaagaagattgtatctgatcgagggagtcagttcacctcaaaattttggcagaagctgcagaaagaattggggacccgtttgaatttcagcacaacctaccatccgcagacagatggccaaaccgaaagggtcaatcagatcttggaagatatgctacgtgcatgtgtgctcgattttggtggagcatgggataaaagtctgccttatgcggaattctcgtacaacaacagctatcaggccagtctacagatggcaccgttcgaagcgttgtatggccggaagtgccgcacacctctctactgggatcaaacaggtgaacgtcaactgttcgcaacagaagtgttaacgaaagcagaagagaaagtcagaaccgtcagagagaggctgagaattgcccagtctcgacagaagagctacgcggacaaccgccgaagggagctcacttttgaagcaggggattatatgtatctccgtgttactccgctccggggagtgcatcgtttccagacgaagggcaagttggcaccacgcttcgtgggaccatacaaaatcttggaacaaagaggagaagtcgcctatcagctagaacttccatccaacatgatcggcatccatgtcatgttccatgtatcccagttaaagaagtgcttgagggtacccgaagaacaagccgattcggagcacattgacatccaagaagatctgacctatgtggagaagccagttcgtatccttgagaccagtgaaaggaggacaagaaacaaggtcaccaggttctgcagggttcagtggagccaccacttagaagaataagcaacctgggaaagggaaaatgggttaaaggccgcccatccgcacctcttcaccagctcttccgaatctcggggtcgagattccgtt

SEQ ID NO: 13934 - DNA, 4788 bp, Oryza sativa
  Clone ID: TFbOSC416746j.C1.o20.fg
atgggaacccctggagatcaaggcatcctcgatgagttctccacaaaccctttccatgcaaagaaaaacaagaactggatactcatagcggacaatgaagtaatagccaacgttgctgcctcctacatgagcttcatgtccgccttgaacttgggactatggctacaatcaggagtaggcacaagagcggcggtagatgactcaataaagaaagccacacccgacaggtggctggtcatgggggctatagctttgagagctgagcccgagttttgggcgcgtcttgtacagaggctcgacgtgtgcacgttcacgcgggagtctggtagtcctcccggcgttgtcttcctcaactccggcgagcgctccgactccggcgagggtcggaacacttggtatcagagccgaagatcatcgggaggcgggatgtcgcggcactccgagccgcacggcgggcgttcgcacacgccgccgcgtcgtcgacgcctatcgatctcgccggagcccactcgtgggcgcggcgggccgaagatcatcgtcaggcgcacgatcaaggaggccaacgcgacgatccagtacccgacgctcacccgcaccaactacgacgaatgggcaatgttgatgcaggtgaacatggaggcagcaggcatctggtacgcggtcgagccgtaccccgacgaggaggtagagtaccgcgacgaccgtctcgctctggcggccattctccgctccgtcccatcggagatgctccccacgctccgtggcaagcgctcggcgcgagctgcgtgggacgcgatcaagacgatccgcgtcggcgtcgagcgcgtgcgcgagagcaaggcgcagcagctccggcgtgagttcgcggcgctgacctggaaggagggggagaccgccgaggacttctccgtgcgcatcaccggcctcgccaacaacctccgcacgcttggcgacaacatctccgacgccgacgtcgtccgcaagatgcttgacgtcgtccccgagcacctggaacagatcgccgtcgcggtcgagacactccttgacctgaacaccgtttcggtcgaggaggtgaccgggcggcttcgcgccgttgagcaacggcgtcacaggtcggcgcccgtcgtcaacaaccaggggcggctcctcctaacgcaggaggagtggatggcgaagctcaagaaccccggagcgtccggagagaaggggacccccagcgggtccggcggaggcggcaacaagcgtaccgggggatcgcgcaggcacgaccgcggcaaaggcggctctcgccaggctgccgggcctggagacggctcgaaccagcccaagaagacggacaagtgccgctactgcggcaagaagggccattgggctaaggaatgccggtcacggttgcgggacgaggcccatctggcccaaggcgaagaagaggaggagcccatgctgatggttgccacggcgcaagtcaacgccatctcgtcttcttccccgccgcgcttcacatcactgccggcgcttgaacagatccacctcgacgagagtaagctcttcgttcagctgggcggcgagcacggaggagaagccaccagatggatcctcgacacgggcgccaccaaccacatgacggggacgcgatctgccttctccgagctgaacaccggcatccgcggcacggtcaagttcggggacggctccgtcgtcggcattgaagggcgtggcaccgtcctcttcaagtgcaaggacggggaacatcaggcgctggagggagtgtaccatattccgcgcctcaccaccaacatcgtcagcctggggcagctcgacgaggagaagttcaagtggagctgtgaagatggagtcctcaagatctggaacaagcagcgtcgactactcgccaaggtggtgcgctcgccgaaccgcctctacgtcgtcaagctcaacatcgggaggccggtctgcctcgcggcacaagggggcgacatcgcctggcgttggcacgcaagattcggccacctcaacttccgcgcgctcgagaagcttggtcgcgccgtcatggtgcgcgggcttcccctgatcaaccatgttgatcaagtctgcgacagctgcctggtcgggaagcagcggcgcctgcccttcccgtctaaggccaagtaccgcgcgaaagaaaaactcgagctggtgcatggggacatctgtgggccggtgacgccggcgacgccaagcgggaacaagctgttccttctcctcgtcgacgatctgagccgctatatgtggctcatcctcctcagcagcaaggaccaagcatcggtggcaatcaagcgcttcctggcgtgcgcggaggcggaagccgggcggaagctgcgcactctgcgcactgaccgcggcggcgagttcacggcgcacgcgttcgcggagtactgcgccgagcacgggatccagaggcacctcaccgcgccgtacacaccccagcagaatggcgtggtcgagaggaggaaccagacggtgatggggatggccagaagcatgatgaaggcgaagtcactgccgggctggttttggggggaggcggtgaacaccgccgtgttcctcctgaaccgggctccaacgcagtgcgtcgacggcaagactccttttgaggtatggcatggtgtcaagcccccagtccattttctccgcacgttcggttgtgttgcacatgtgaagaacggcggccagcgactcgccaagctcgacgacaggagcatgcccatggtgtttgtgggctacgaagctggaaccaaggcataccgcttctataacccggtgtcgcggcgcgttcacgtgtcgcgcgacgccgtgttcgaggaggagcgaagctgggagtggggagccgagaagggagctggacctgacgacgacatcgagccgttcgtggtggagcacctcgccacgggaccaacggggcagggaggccctgtcgccgcgactccgaccgcgacacagcgctctacatcagcaccagctcccatggcgccgcctgcgacaccaagtcaagccggaacgcccacacacggggcggggcctcgtacaccggcttcagcctcttcaccggcaatcgagttcgcctctccgccgcagggggacctcgatctggacaacgaccacgacgacgatgtacctctccgcttccgcaccgttgacaaccttctcggggcatcctcgcctccgggtcttgcagaacgggaagtgacagaggggctcatggtggcgatcgaggacgaaccagcaacggctgaggaagccaagcaagtcaaggagtggcgtgaagcgatgatcgaggagatggcatcgatcgagcacaacaagacctggtctctggtggagctgccggcggggcaacgtgccatcggcctcaagtgggtcttcaagatcaagaaggacgagcacgggaacatcaccaagcacaaggcccgactcgtcgcaaaaggctatgtacaacgccaaggcatcgactatgaagaagttttcgcgccggtcgcaaggattgagtccgtgcgcgtgctcctggccgtggccgctcacaggtcatggtcagtgcaccacatggatgtgaaatcggcgtttctcaacggcgatctggcggaagaagtctacgtgcagcagccgcccggctttgtcgccgccgggcacgagcgcaaggtgctgaagctgcacaaggcgctttacggcctcaagcaggcgccacgcgcctggaactcgaagctcgacagcagcctgctcatgctcggtttcgcccggagcgagtgcgaacacgggctgtacacgcgcagcgacggcgagaagcggctggtggtgggaatctacgtcgacgatctcatcatcacaggaggctccaccgaggtgatcaacacattcaagacggagatgaagactctgttccgcatgagtgatctcggtgtactgtcctactacctcggaatcgaggtccgacaggggcggcgcggcatcgagcttctgcaggccgcctacgccaagaagatactggaaaaggcgggcatgggaacctgcaatccgtgcgcgacgccgatggaggcaaggttgaagctgtccaagcagagcacctcgccggcagtcgacgcgacggagtaccgcagtctgatcgggagtctgcggtacttgatgaacacacggccggacatggcgttcgccgtaggttacctgagcaggttcatggagaaccccaggcaggagcacttggcagccatgaagcacctgctccggtatgtggccggaacgatcgactacggcttggtgtacaccagcggcgacaccgagttcaacctcgtcggctacagcgacagcgacatggccggcgacatcgacgaccggaagagcaccagcggcatcatctacttcctcggcggcaaccctgtggcgtggcagtcgcagaaacagcgcgtggtggcgctgtcgtcgtgtgaagcagagtacatcgctggcgcagcagcagcgtgccagggcgtctggctcagacggctgctgcaggatgtggtgggcgtcagcgggcctccaccacaactcaagatggacaaccagtctgcaatcgccctcagcaagaatccggtacttcacgatcgatctaagcatattgatacaaagtttcattttcttcgtgagtgcgtggatagtggggcggtgcgcctggcgttcgtgagcacccaagcgcagctcgcggacatcatgacgaaggcgctcgggaggtccaagtttcaggagcttcgcgagctgatcggcgtcaccaagctcaagtga

SEQ ID NO: 13935 - DNA, 1044 bp, Oryza sativa
  Clone ID: TFbOSC10366j.C1.o2.fg
atgtcgggtcacacgggggatggtaatgatggtgaaaagggagctaggattccttttgactatccctctacatctacatcttatgtgagtacctatagtggcaaagctccgtactttaatggtaaggactatgccgcttggaagcataagatgaagatgcatttgaagtctattaacccatctatttggagaatagtcgaaaaaggctatgttttgcagaatcctgaagatcccaccaaggaggacaacgagaacgagcacaagaacgctcaagccgctaatgcaatacttagcgccttgagtagaagtgagttcaaccgtgtggatggcattgaaagtgccaaagtgatttgggacacgcttcggaacctgcatgaaggcacggatagtgttcgtgagtccaaggtggagattctcaaggggcaatttgagaggtttgtgatgttggatggagaaatcccaagcgacatgtacgaccggttgagcaagatcgtcaacgagatcaagggacttggctccaaggacatgaccgatgaggttgtggtcaagaagatggttcgggcaatcactccaaggaactctaccttggtgaccatcattcgtgagcgtccggactacaaaactctcacaccttatgatttgctcgggcgtatccttgcccatgacatgctcgtgcaagattccaaggatgtcatccaatatatcaaccaaagctcaaccgcaagcatcaagaaggaagacttggcattgaaggcagaggaagaagaagaagagaaccgcaagagcaagagcaaggtggagatcgatgatgaagagatggctcttttcgtcaagaagttcggcaagttcatgagacaaagcggcttcttcaagggaagctcttccaagcactactccaacaagtcaagtggaagacactccgcaagggtgtgctatgtgtgcaaagagcccgggcacttcattgcggagtgcccccacctcaaggatggttcccacctcaaggaagataagaaaaagggtgagaagaaggatgagaagaagtag

SEQ ID NO: 13936 - DNA, 4531 bp, Oryza sativa
  Clone ID: TFbOSC401417j.C1.o15.np
accagactgagaagtggcggagataagcccacgggggtcgctggggagtccatgccttactcagcaagaaaccaaaacaacaaccaccacaactcgcagcttccaccacctcccactcggaattcgggagcgagtggtagccgtccaaccggcgcgatggatcccactttggctcagattctcgcggcgcagagtcagctcttcgaccgcttggtcgcgactcaggaggccttgggcaatgctctcctccagaacaaccgtcagccacagtctaagctggcggaagtgcagcgtacacagccacctgtgttctctgctgctgctgatcctctcgacgcggatgactggctccgcgatatcgagaacaagcttaacttcgtccgttgtgacgatgaggagaaggcgacctacgccgcctactaccttcagggcgctgcagctgcctggtgggagacttacaagtctacactcccccagggcaccgccatcacctggaacgtgttcaagcagggcttccgcactgctcacgtcccagaagggcttatgaaggccaagaggaaggagttcctcaatctcacccagggggacttgcctttcatggagttccttagtcgcttcaactaccttgcacggtatgcgactgatgagctaggcactactgaggcgaggaaggtgcaactttgccttgatcgccttagccctgagttgaagcacggtctctctacccatgagatcgacagtatgaagacccttgttgacaaggccctccgctgggaggcaagtgagaaggaagtagctgtggaccgcaagcgcaagttcttggcgcgcagggctactgtcagccgttcgagtcgcccacgcacttggcagcctgctccagctgcacgtcctgcttctgctccaccgcagaggctccagtacgcccccggaggctacaaccgtgctgcaaatgttaactgcttcaactgcgggaagttgggacactactccaacaactgtccttacccgcgtcgcaccggtgctcctccgccgcgccccgcagcaccgcagccccgtcctccacagggccgtggcgcccctgctgctgctccacgtgggggccgagccgctcccaagccggctcagaactttgggcgcggtcgtctcaaccacgcgaccgcagaggaggctgttgacgcacccgatgtggtgctaggtacctttcttgttcactcagttcctgtttggtgttatttgattctggtgcatctcattcctttatatccaccaaagtagcaaaacaaaacaacatagccaccacccttttagacacccccatgataatccaatctcctgggtcaaccttcaaaaccagaacaatatgcaaggatgtgcctattctcattgataaggtagagttcaaagccgacctaatccaagtgagttccttaagtttagatgtcatcctaggcatggattggctttccaaacacaaggggaatatcaactgtgcttctaaaaccatctcttttgtcaacaccaatgggaaaacagccaccttcacttccaataaagccaccacctcaaaacagccatgtatcaactctctcatcaaacctgagcttgaatcaatacccgtggtgtgtgaatatcctgatgtcttccctgatgagctaccaggaatgccacccgatcgtgacattgagttcgtgattgatcttgttcctggtgcgacgcctgtcgctaagcaaccctaccgtatgaccagtgatgaattggttgagctcaagaagcaaattgatgagcaactggagaagggtttcattcgacacagcagctctccttggggctgtcccgttctttttgctccaaaaagtgatggtacgcttcggctgtgtgttgactaccgtccactaaatgaggtgacaatcaagaacaagtatccactcccccgcatcgatgatctctttgaccaaatgaccggtgcgcaagtattctccaagattgatttgaggtctggatattttcaactcaagatcagaccggaggatattccgaaaacagctttcagaacccgctatggtttgtttgaatacaccgtagtttctttcggcttaaccaatgctcctgccacttttatgaacttgatgaacaaggttttcatggagtacttggacaaatttgtggtggtgttcattgatgacatcctcgttttctcgaagaatgaggaagaacacgcacaacatctaaggctagtgcttgacaaacttcgtgagcatcaactctatgcaaaattcaacaaatgcgagttttggatgaatgaagtggcctttctcggtcatgtgatatccgggggtggtatcgcagttgatccaagcaaagtggaaagtgtgcttaactgggaacagcccaagaccgtgacagaggttcgagcttttcttggcttagccggttattaccgccggttcattgggaatttctctaagattgctagaccgctgacccaacttctcaagaaggagaacaagtttgtatggtcagaggtatgcgaggcaagtttccaagagttaaagaaaaggctcacaacggccccagtgcttataatgcccgatatccacaagaatttcgatgtctattgtgacgcatctcaaaatggcctcgggtgtgtattgatgcaagaaagaaaggttgtggcctatgcttcacgtcagctgcgccctcatgaactcaattatccgacccatgacttggaattggcagccgtggttcatgccttgaagatctggcgccactaccttatcggtaaaagatgcgaaatctataccgaccacaaaagtttgaagtatttcttcacccaaccagatctgaacctaaggcaaagaagatggttggaactcatcaaagactacgatctcggcatccattaccatcccggtaaagccaatgttgtagccgatgcactcagctggaaacttaaccacatttctgcttctgaacttgtcacacaaccagagttgttactggaatttcagaagctcaatcttggtgtggttgaagaaggttttgttactgccctagcacttcaaccgaccctcctttctcagataaaagaggctcaactcactaaccaggaggtagctgaaattaaaaaggaaatggcaagtggcaagccaactatcttttccttggatgatgatggtgttgttgttcatgggaagcaattgtttgtccccgacactcaacatcttcgggagcttattcttacagaggcacacgagtctcccatgtccatccatccaggttgcactaagatgtaccaagatatccgctctctttattggtggcctaccatgagacgtgatattgctgcatatgttgctatttgtgatgtgtgtcagcgtgtcaaggctgagcaccagcgtcctgcaggtttgcttcaacccttgcaaattcctgagtggaagttcaatgaagttggaatggatttcataacaggtcttcccaagacttctaatggacatgattccatatgggtcatcgttgaccgcttgaccaaggttgcccatttcattccggtgaatgtctcctacaatggtgcaaagctggcaaagctctatttgactcacatcgttcgcttgcatggggtaccgaaggccattgtatcagaccgtggtccccagttcacttcccggttttgggagaatcttcatgagctccttggtactcaattgttctttagcacagcttttcacccacagactggaggtcagactgagcgcaccaatcagatcttggaagatatgctcagatcttgtgtcctcagttacaacaccaattgggagaaatgtctgtcctttgccgaattctcatacaacaacagttaccaagctagcctccaaatgtcaccctttgaggctttgtatggaagaaagtgtagaaccccactcttctggtcagaggtgggagaaagacaactctttggtcctgccgttatcaaggaagccgagcaaaacgtcgctctcatcagaaaccggctaaaggaggcacagtcacgccaaaagagctattccgaccgtcgccgtcgcgaattaagctttgaggttggtgactatgtctatctaaaggtctcgccgttgcggggcactcgccgatttcaagtgcatggaaaattggcgcctcgatacattggtccatatcgagttcttgccaagaggggtcaagttgcttacaagttgcagctgccatctcaactctcagatgtgcacgatgtgttccatgtttcgcaactcaagaagtgccttcgagttcctacggagctcactccgctagaagacatcaatatccaacccgacctctcctaccaagagtatccaatccgcattctagaggaagccgagcgacacatgcgaagccgctccatcaagatgctcaaaatccagtggagcaaccacactcccgaagaagcaacatgggaaagggaagaccgccttagagccgattttcctagtttcttctcctagatcctatcaaatctcggggtcgagattttgtt

SEQ ID NO: 13937 - DNA, 3900 bp, Oryza sativa
  Clone ID: TFbOSC418198j.C1.o21.fg
atgggggaaaatcagggactggaacaagtaatgggtaaattggtagagatgcttgcaaagaagtttaatgaggctccaactacgagtagtgcagtggttcctcatactgaatcggtgcaaaaaattgagttgatgcaaaatgacattaagttggagggtgtaaaaaattatttgagttggtcaagaagagctttattgattttgaagacaaaggggttagaaggatatgttaccggagagataaaggagcctgagaacatatcaagtgttgaatggaagacttggagtactaccaactcgttagtagtagcatggttattaacctcacttatccctgctattgctacaactgttgagaccatttctagtgcaagtgagatgtggaaaactcttactaatctctactcaggagaaggaaatgtgatgttaatggtggaggcacaagagaagataagtgttttgagacagggggagcgttctgttgcagaatatgttgctgaattgaagcatttgtggtctgatttggatcattatgatcctcttgggttagagcaccctgattgtatagcaaaaatgagaaaatggattgagcgtagaagggtcattgagttcttgaagggcttaaattcggagtttgaaggaagaagggatgcaatgtttcatcaaaccacccttcctagcttggatgaggctattgcagctatggcacaggaggagcttaagaagaaagtattgcctagtgccacaccatcttcaccaagccccacctatgtagttgcacaaagtaaagagaccagggagtgcttcaattgtggtgaaatggggcaccttatacgtgattatcgcgctcctcgcaagcctagttatgggagaggaagatttggtgataggggtggagcaagaggtggaagaggttatgcaggtagaggtaacagaggtagaggctatgagtatagaagtgatcacagagctaatgtggtcacgcttgaagagagttgttctggatctacaaatgttgatgttgccaatcttgttcattcttcctcaggtaactcaaaccaagcatttatgtctatcaatagttctcattcaaattggatacttgactcgggtgcatctagacatgtcacggtgaatttggtttcgataagttctcttgttgatcatatgaattgtcgggtctcccttgatcgtgagaattgtttaattcaggagagggaaacagggaagaaacttgggattggcgtcaggcgtgatggactttggtatttggatcgaaaggagacaagtgaagatgtatgtcttgcattgatggctcctacaagtgaagaagaggctaagtttattagaactgataatggaggggagtatataaacaatgaatttagtagctttctttcatcagaaggaatattgcatcaaacttcttgtcctgatactcctccacaaaatggggtggctgagaggaaaaaccgtcatctcttagagacagcccgctcattgatgtatgctatgaatgtacctaaattcttgtggagtgaggcagtaatgacagcaacttatcttatcaaccgcacaccatcaagaatacttggaatgaagacaccatgtgagatgatatttggaaagaatgaatttgttgttccaccaaaagtgtttggttgcacttgttttgttagagatcatagaccttccattggaaaacttgatcctcgggctgtcaaatgcatctttgtaggctattcatctggccagaaggggtataagtgttggagtccatcagaacgacgaacctttgtaagtatggatgttacttttagagaatctgtcccattctatggtgagaagacagatttaagttctttattcattgatcttgatgattcaactagtggtcatgatggtcaccaaatgaaagatgaaatattgggtccaaagggagatgaacaaccaaagaaggaaaagcttgtggttggttcaattccatgtcccatgggtggtcctgttgcacaggagcaagaatggaggaagccacatgaagagaaaaatcttcaagtatacacaaggagaacaaggtgtccagtaatccaacaagttgaagaggataatcaggtagaggaagatgtaagccgtgagcaaggatctttggagtcagggggagaagaagaggaagttagagaagaatctgacttaccaattgccattagaaagagtgtgagaagcaatgcaggtaaacctccactaaggtatggttttgaagctcaagatgagggtgatgatgaaaataatatatccaactatgtttcctatgactccttgtcatccacatataaggcctttatagcatcactagattcagtgcaaatcccaaaggattggagagaagcaaagcaagatccaaggtggcatcaagctatgctagatgaactagaggctcttgaaaagaacaaaacatgggatcttgtaccatttcctaaagggaagaaaattgtcaactgtaagtgggtttatacagtaaagcaaaatcctgatggaaaggtggaaagatacaaagcaaggttggtggctaagggatatagtcaaacatatggaattgattatgatgaaacttttgcaccagtagcaaagatgagcacggtaagaactcttatatcttgtgcagctaattttgattggccattgcatcagttagatgtcaagaatgcattcttacatagagatcttcaagaagaggtgtatatggatgtcccacctggatttgccacttcacaaactaaaggaaaggtgttgagattgaagaaatctttgtatggtcttaaacagtcaccaagagcatggtttgatcggtttaggcgtgcaatgtgtgctatggactataagcaatgtaatggagatcatacagttttctatcatcatagtggagatcatataaccattcttgctgtctatgttgatgatatgattatcactggaaatgattgcttggagataactaggttgaaacggaatctaagcaaagaatttgaggtcaaggacctaggccagttgagatattttctgggtattgaaattgcaagatctcctagagggatagttatttcacagcgaaaatatgtattggacttgcttagtgaaacaggtatgcttggatgttgcccagtctctacaccaattgatcaaaatcataagttatgtgcggagtctggagatccagtgaatagggaaagataccaaagattggtgggaagactgatatatctatgtcatacacgacctgacataacatatgctgtcagtatggtgagtcgatatatgcatgatccaagaagtagtcatatggaggcggtgtatagaatcttgagatatctgaagggaagtccaggcaaaggcttatggttcaagaaaaatggacatcttaagatagaagggtattgtgatgcagattgggctagctgtcttgatgatagaaggtcaacttcaggctattgtgtttatgttggtggcaacttggtatcttggagaagcaagaaacaatccgtagtgtctcgctcaactgctgaagcagaatacagggcaatggcagcgagtttaagtgagttgttgtggttaagaaatcttctagttgagctgaaaattttggggaacactcccatgaagctattgtgtgataataagtcagctattaacattgctaataatccagtccaacatgatagaacaaagcatgtggagatagatcgtttctttatcaaggaaaaattggacgagggagtgttggaattaggatttgtaacgtctggtggacaagttgctgattgtttaacaaagggcttaggtgttaaagagtgtaattgttcatgtgacaagatgggtatgatagatatctatcacccatcttga

SEQ ID NO: 13938 - DNA, 4194 bp, Oryza sativa
  Clone ID: TFbOSC10678j.C1.o1.np
ctctgttcctgagctgcaaaatccttccccggttctgttcacctgcactcacaggtgtacaggacgagcaggtgcttctggaactccgtccgcttgagaacttgcacgggtaggcgggcgatcaagtttttaggtagcgcttcaagcgcgactgctcctgttcttcgcgactactactgctacatcgacgcctttgtcaacatgtcgacggagattggagacaaggaggtgaacgacatcaacggaggcaatactgcctcaaaatccagcggtgggacgttcttagggtctttttcggtagttggctttgctgcatcactaaaaccacatgctttcgatggttcaaattataaaaaatggaaagcacgtacacttttatggttgacggcgatgcattgtttctttgtctcacggggcaaaccgagtgaaccgcctctctctccagaggaggaggctaagttcgaggcttcggattgcctgttccgtggagtattgatcagtgtactcgttgactatatagtggacgtgtacatgcacatgccttcagggaaggacatgtgggatgctcttgaggccaagttcggggtttccgacgccggcagtgagcggtatgtcatggagcagttctatgactacaacatggtcgatgaccgttctgtagtggaacaggctcatgaaattcagatgctggcaaaggaacttgggaacaacaactgcgagttgccggacaagtttgtggcggatggcattattgcaaaattgccactttcttggtcagactttgctacttctctaaaacacaagaggcaagagttcagtattactgatcttattggctctttgggtgttgaggagaaggcaagggcaaatgacaaccggggcaaaaagatcgagggaggttctagcgccaatttggtgcagaagaagaaccctcacacatcccacaacaacaacaagaaagtcaaacttgacgttaaacccaaggctacaaccaattttaagaagaaaggcaagggaaaggcaaaaggagattgctttgtgtgtggcaagcctgggcattaggccatggattgtcctgagcgcaaggacaagaagtctgcaaacatggttattagtgagggcggaggaacattgtggtatggtaaatttttacctacagttctctctgtctgtcactcacctgattggtgggttgatactggtgctaatattcatgtgtgtgcggatatttccctgttttcttcttatcaagtcgggagaggttcctccttgttgatgggaaacggatcgcttgtggctgttcatggtgttggtacggtcgatctgaagtttacttcgggaaagatcgtgcagctgaagaacgtgcagcatgtcccttcaataaagaagaatctagttagcggctctctactgtgtagagatggttttagacttgtgtttgaatacaataaatgtgtcatatctaaatatggaacgtttattggaaaaggttatgacagcggaggtttgtttcgcttttccttgaatgatatgtgtaataaagttgtgaaccatgtaagcgatgataatgatgagtccaatgtgtggcattcgcgactttgtcatgtgaattttggttgtatgacaggcttagccaacatgagtttaattccaaaattcactttagtcaaaggctctaagtgccatacttgtgttcaattaaaacaacctcgcaaacctcacaaggcatctgaggcgagaaatttagcaccactagaacttgttcattccgatatgtgcgaaatgaacggcgtgttgactaaagggggaaagaaatatttcatgacattgatagatgattgcactagattctgctatgtgtacatattgaaaacaaaggatgaagcattacattactttaagatctataaggctgaggtaaaaaaccaactggaaaggaaaatcaaacggttaaggtctgataggggtggagagtatttttccaatgagtttacttctttctgcgaagagtatggaattattcatgagaggacgtctccctattcaccctagtcaaacagggtagccgaaagaaagaaccgcactctaactgagatggtgaatgccatgttagacactgcagaactttccaaggaatggtggggtgaggcaatattgactgcatgtcatgtcctgaatagaattcctactaagcataaggaagtaacaccattcgaggaatgggaaaggaagaaattaaatctctctcacctacgcacatggggctgtttggccaagataaatgtacctatagccaaaaagcgtaaacttggaccaaagaccgtagattgtgtattctttggttatgctatccacaatgtgggagataggttcttaatagtaaattctggagtacccgacatgcgtgttggtacaattactgagtctagagatgccacattttttgagaatgaatttcctatgaaaaatgcacctagcacttctagtcaagaacctattttatcccctgagcactttgtgccgataaaacacattgatcaaacgcttgaggaaaatcctaaggaggataacattgtagcaactcgaaagagtaagagacaaaggactgcaaagtcttttggagatgactacattgtatatcttgtggatgatacttcaagaaccattgaagaggcatattcatctcctgacgctgactattggaaggaagcgatacgctgtgagatgaactcaattatgtctaatggtacttgggaagtcgtcgagcgtatatatgggtgcaagcttgtaggatgcaaatgggttttcaagaaaaagcttaggcctgatggtacaattgaaaagtacaaggcaatgcttgtggccaagggttatacccaaaaagaaggtgaggattttttcgacacttattcaccggttgctcgcttgaccacgattcgagtactactcgctctggcagcctctcatggtctactcgtccatcaaatggatgttaagacagctttcctcaatggagagttggaggaggagatctatatggatcaatcagatgggtatgtactagaaggtcaggagggaatgatgtgcaagctgttaaagtccttgtatggtctcaaacaagcgcctaagcaatggcatgagaagtttgacaatacacttacatctgctggctttgttgtgaacgaagctgacaaatgtgtgtactatcgctatggtgggggagagggagtaatcttgtgtttatatgtcgatgacatattgatctttgggaccagcctcaatgtgattgaggaggtcaaggactttctatccaaaagctttgaaatgaaggatttgggagtggctgatgttattcttaacattaaactactgagaggagatgagggtgggattacacttgtgtaatctcactatgtggacaaggtcttgagtcgctttggttatagtgactgcaaggcagctcctactccttatgatcctagtgtgctattaaggaaaaaccgaagaatagcaagggatcaattgagatactcccagattattggttcattgatgtacttagctagtgcaacgaggcctgacatctcatttgctgtgagcaagttgagccggtttgtttcaaatccgggagatgatcattggcatgctcttgaaagagtaatgcgctatctaaaagggacaatgagctatggaattaactacgctgggtacccaaaagtactggagggctatagtgattcaaactggatatctgatgctgatgagataaaggccacaggtgggtatgtgttcacacttagagggggtgttgtttcctagaagtcttgcaagcagaccatcttaacgaggtcaacaatggaagcagaactcacagctttagatactgccacagttgaggccgaatggcttcgtgagctcctgatggacttgccggtggttgaaaaaccagtaccagcaatcctgatgagctgtgataatcaaacagtgattattaaagtgaacagtttgaaggacaagatgaagtcatccaggcatgttaaaagaagactgaagtctgtcagaaagcagaaaaactccggagtgatagcattagactatgtccagatggctaaaaatctggcagatcagtttaccaaggggctaccacgtaatgtgatagactgtgcatcaaggaagatgggtttgagacccact

SEQ ID NO: 13939 - DNA, 3024 bp, Oryza sativa
  Clone ID: TFbOSC19178j.C1.o1.fg
atgtctgcgcctggagccggcgccgctgctgctgctggaggagatggcggaggtggtgcgccaccaggagctggagctggaggtggtgcgccaggagctggagcctgtgccgcgaacaacaacaccaacggagtcaattctgcctcgcaatccagtggagggccattctcggggtatatccttctcctgttcctgttcccgttgttagcgctttactgctatgttcctgttcctgatattcatgatgtctctagcatgctactgcgttactgctatgttcttgttcctgatattcataatgcgcatgatgccattagtatgctactggttatgttacatgttgtcactagatcaccctacactgtttatgccatgattattgtcttaacattttggattaaaatatgccgatttatgaccatatttctaacaatccaaaaacctgataggttattttcggtagttggctttgctgctgcactgaaaccacatgcttttgatggttctaactataagagatggaaagcacgtgtactattgtggttgacagcgatgcaatgcttctatgtttcacggggcaaacgaagtgaaccacctctttctcctgaggaggaggctaatttcgaggcttcggattgcctgttctgtggagcattgatcagtgtactcgctgacaacatagtggacgtgtatatgcacatgccttctaggaaggacatgtgggatgcacttgaggccaagttcggagtttctgacaccggcagtgagctgtatgtcatggagcagttctatgactacaagatggtcgatgaccgttctgtagtagaacaagctcatgagattcagatgctggctaaggaacttgagaacaacaactgtgagttgccggacaagtttgtggcgggtggcattattgccaaactgccaccttcttggtcggactttgccacttctctaaagcacaagagacaagagttcagtgtttctgatcttattggctctttgggtgttgaggagaaggcgagggcaaaggacgtccggggcaaaaaggttgagggaggttctagtgccaatatggtacagaagaagaaccctcatgcatcccacaacaacaagaaagtcaagtctgatgtcaaacccaaggctgcaaccaactttaagaagaaaggcaagggaaaggcaaagggagactgctttgtgtatggtaagtatgggcattgggccaaggactgtcctgagcgcaaagacaggaagtctgccaacatggtcattagcgagggcggaggaacatcggtgtacggtaaaatattacctacagttctctctatttttcactcacctgattggtgggtggatactggtgctaatattcatgtcgggagaggttcctccttgttaatgggaaacggttcgcttgcggttgttcatggtgttggtacggtcgatctgaagtttacttcgggaaagaccgtgcagctgaagaacgtgcagcatgtcccttcaataaagaagaatcttgttagtggctctctattgtgtagagaaggttttagacttgtgtttgagtccaataaatgtgtcgtatctaaatatgggacttttgttggaaaaggttccaagtgccatacttgtgttcaatcgaaacaacctcgcaagcctcacaagacatctgaggcgaggaatttggcacctctagaacttgttcattctgatttgtgcgaaatgaacggcgtgttgactaaagggggaaagaaatatttcatgacactgatagatgattgcactacattttgttatgtgtatctattgaaaacaaaggatgaagcattgcattactttaagatctataaagctgagtttggaattattcatgagaggacgcctccctattcaccccaatcaaatggggtggtcgaaagaaagaaccgtactctaactgagatggtgaatgccatgttagacactgtagggctttccaaggaatggtggggtgaggcagttttgactgtgtgtcatgtcctgaataaaattccaatgaagcataaggaagtaacaccattcgaggaatgggaaaggaagaaattaaatctctcatacctgcgaacatggggctgtttggccaaggtaaatgtacctatagccaaaaagcagaaacttggaccaaacactgttgattgtgtgttccttggttatgctattcacagtgtaggttatagattcttaatagtaaactctggagtacccgacatgcatattggtacaatttttgagtccagagatgctacattctttgagaatgaatttcccatgaaacatacacctagcacctctagtcaagaaactgtcatgccccatgagcactttgcaccgatagaacacaatgatcaaacgcctgaggaaaatcctgaggaggacaacattgtagatactcgcaagagtaagagacaaagggttgcaaaatcctttggagatgactacattgtatacctcgtggatgacaccccaagaaccatagaagaggcatattcatctcctgacgctgactactggaaggaagcagtacgcagtgaaatggactcgatcatgtctaatggtacttgggaagtcgttgagcgtccatatgggtgcaagcccgtaggatgcaaatgggttttcaagaaaaagcttaggcctgatggtacaattgaaaagtacaagacaaggcttgtggccaagggttatacccaaaaggaaggcgaggacttttttgacacatactcaccagttgctcgcttgaccacgattcgagaactacttgttctggcagcctcttatggtcttctcgttcatcagatggacgttaagacagctttcctaaacggagagctggaggaggagatctatatggatcaaccagacagcctcaatgtgattgaggaggtcaaggactatctgtccaagagttttgaaatgaaggatttgggagaggctgatgttattcttaacatcaaactacaaagaggagatgagagtgggattacactt

SEQ ID NO: 13940 - DNA, 651 bp, Oryza sativa
  Clone ID: TFbOSC2953j.C1.o1.fg
atggctgacaacctttttgtagttgagcaggctcatgagatacagactatggctaaggaactcgaactccttaagtgtgtcttacccgacaaatttgtagccgggtgcattattgtgaaactacctccatcttggagaggtttcggtactgcactcaaacacaagatactggaatactccgttgaggggttgatagcgtctcttgatgttgaggagaaagctcgggaaaaggatgccgcgtctaagggcgatggtgggcagtccagtgccaatgttgtgcacaaggcccaaaacaagagcaaaggaaaatacaaagctcagcagaccaccaacttcaagaagaagaatataaacaacaatcctaaccaggataagatgacttgctttgtgtgtggcctacctggtcatctggcgaagaagtgtccacaacgcaaggggatgaaggcacctgcagggcagacttctaagtctacaaatatgactattggcaacactgtagatgaaagcgggtatggtcgcacagggttccaccgtcctaatggagaatgggtcacatgcttctgttcatggtgttggcacggtagatctgaagtttacttcgggaaagatcgtgcagctgaagaacgtacagcatgtccctactatcgatag

SEQ ID NO: 13941 - DNA, 3327 bp, Oryza sativa
  Clone ID: TFbOSC421135j.C1.o6.fg
atgtctgcgcctggagccggcgccgctgctgctgctggaggagatggcggaggtggtgcgccaccaggagctggagctggaggtggtgcgccaggagctggagcctgtgccgcgaacaacaacaccaacggagtcaattctgcctcgcaatccagtggagggccattctcggggtatatccttctcctgttcctgttcccgttgttagcgctttactgctatgttcctgttcctgatattcatgatgtctctagcatgctactgcgttactgctatgttcttgttcctgatattcataatgcgcatgatgccattagtatgctactggttatgttacatgttgtcactagatcaccctacactgtttatgccatgattattgtcttaacattttggattaaaatatgccgatttatgaccatatttctaacaatccaaaaacctgataggttattttcggtagttggctttgctgctgcactgaaaccacatgcttttgatggttctaactataagagatggaaagcacgtgtactattgtggttgacagcgatgcaatgcttctatgtttcacggggcaaacgaagtgaaccacctctttctcctgaggaggaggctaatttcgaggcttcggattgcctgttctgtggagcattgatcagtgtactcgctgacaacatagtggacgtgtatatgcacatgccttctaggaaggacatgtgggatgcacttgaggccaagttcggagtttctgacaccggcagtgagctgtatgtcatggagcagttctatgactacaagatggtcgatgaccgttctgtagtagaacaagctcatgagattcagatgctggctaaggaacttgagaacaacaactgtgagttgccggacaagtttgtggcgggtggcattattgccaaactgccaccttcttggtcggactttgccacttctctaaagcacaagagacaagagttcagtgtttctgatcttattggctctttgggtgttgaggagaaggcgagggcaaaggacgtccggggcaaaaaggttgagggaggttctagtgccaatatggtacagaagaagaaccctcatgcatcccacaacaacaagaaagtcaagtctgatgtcaaacccaaggctgcaaccaactttaagaagaaaggcaagggaaaggcaaagggagactgctttgtgtatggtaagtatgggcattgggccaaggactgtcctgagcgcaaagacaggaagtctgccaacatggtcattagcgagggcggaggaacatcggtgtacggtaaaatattacctacagttctctctatttttcactcacctgattggtgggtggatactggtgctaatattcatgtcgggagaggttcctccttgttaatgggaaacggttcgcttgcggttgttcatggtgttggtacggtcgatctgaagtttacttcgggaaagaccgtgcagctgaagaacgtgcagcatgtcccttcaataaagaagaatcttgttagtggctctctattgtgtagagaaggttttagacttgtgtttgagtccaataaatgtgtcgtatctaaatatgggacttttgttggaaaaggttccaagtgccatacttgtgttcaatcgaaacaccctcgcaagcctcacaagacatctgaggcgaggaatttggcacctctagaacttgttcattctgatttgtgcgaaatgaacggcgtgttgactaaagggggaaagaaatatttcatgacactgatagatgattgcactacattttgttatgtgtatctattgaaaacaaaggatgaagcattgcattactttaagatctataaagctgagtttggaattattcatgagaggacgcctccctattcaccccaatcaaatggggtggtcgaaagaaagaaccgtactctaactgagatggtgaatgccatgttagacactgtagggctttccaaggaatggtggggtgaggcagttttgactgtgtgtcatgtcctgaataaaattccaatgaagcataaggaagtaacaccattcgaggaatgggaaaggaagaaattaaatctctcatacctgcgaacatggggctgtttggccaaggtaaatgtacctatagccaaaaagcagaaacttggaccaaacactgttgattgtgtgttccttggttatgctattcacagtgtaggttatagattcttaatagtaaactctggagtacccgacatgcatattggtacaatttttgagtccagagatgctacattctttgagaatgaatttcccatgaaacatacacctagcacctctagtcaagaaactgtcatgccccatgagcactttgcaccgatagaacacaatgatcaaacgcctgaggaaaatcctgaggaggacaacattgtagatactcgcaagagtaagagacaaagggttgcaaaatcctttggagatgactacattgtatacctcgtggatgacaccccaagaaccatagaagaggcatattcatctcctgacgctgactactggaaggaagcagtacgcagtgaaatggactcgatcatgtctaatggtacttgggaagtcgttgagcgtccatatgggtgcaagcccgtaggatgcaaatgggttttcaagaaaaagcttaggcctgatggtacaattgaaaagtacaagacaaggcttgtggccaagatggacgttaagacagctttcctaaacggagagctggaggaggagatctatatggatcaaccagacagcctcaatgtgattgaggaggtcaaggactatctgtccaagagttttgaaatgaaggatttgggagaggctgatgttattcttaacatcaaactacaaagaggagatgagagtgggattacacttgtgcaatcccactatgtggacaagattttgagttgctttggatatagtgactgcaagccaactcctactccttatgatcccagtgtgctattaaggaaaaaccgaagaatagcaagggatcaactgagatactatcaaatcattggttcattgatgtacttggctagtgcaacgaggcctgacatctcatttgctgtaagcaagctgagccggtttgtctcaaatccgggagatgatcattggcaggctctagaaagagtaattcgctatctaaagggcattatgagctatggaattcactataccgggtatccaaaagtactagaagggtatagtgactcaaactggatatctgatgctgatgagataaaagccacaagtggatatgtgttcacacttggaggtggcgctgtttcctag

SEQ ID NO: 13942 - DNA, 4242 bp, Oryza sativa
  Clone ID: TFbOSC401917j.C1.o9.fg
atgtcgaacactggagacaaggagaaggagactcccgtcaacaccaacggaggcaatactgcctcaaactccagcggaggaccattcttggggtataaccttattacattatttcaattagaagttttactgttaatgttcatcgcaatgtcaacattgtgtcattatgtgattgttgatgcttattcaacgttaagcatgctcatgttgattacattcaccactatcactggatcaaatcctattgtaaatatcatgattattatcttgttattttggattaaaatatgccgaattatgaccaaatttccaacaatccaaaaacctgataggtcattttcggtagttggctttgctgctgcactgaaaccacatgcctttgatggttcaaactataagagatggaaagcacgtgcactattgtggttgacagcgatgcagtgcttctatgtttcacggggcaaacgaagtgaaccacctctttctcctgaggaagaggctaagttcgaggcttcggattgcctgttccgtggagcattgatcagtgtactcgctgacaacatagtggacgtgtacatgcacatgccttctgggaaggacatgtgggatgcacttgaggccaagttcggagtttctgacgccggcagtgagctgtatgttatggagcagttctatgactacaagatggtcgatgaccgttctgtagttgaacaagctcatgagattcagatgctggctaaggaacttgagaacaacaactgtgagttgccggacaagtttgtggcaggtggcattattgccaaactaccatcttcttggtcggactttgccacttctctaaagcacaagagacaagagttcagtgttcctgatctcattggctctttgggtgttgaggagaaggcgagggcaaaggacgtccggggcaaaaaggttgagggaggttctagtgccaatatggtacagaagaagaaccctcatgcatcccacaacaacaagaaagtcaagcctgatgtcaaacccaaggctgcaaccaattttaagaaaaaaagcaagggaaaggcaaagggagactgctttgtgtgtggcaagtctgggcattgggccaaggactatcctgagcgcaaagacaggaagtctgccaacatgatcattagcgagggcggaggaacatcggggtacggtaaaatattacctacagttctctctgtttttcattcacctgattggtgggtggacactggtgctaatattcatgtatgtgctgacatttctctattttcttcttatcaggtcgggagaggttcctccttgttgatgggaaacgggtcgcttgcggctgttcatggtgttggtacggtcgatctgaagtttacttcgggaaagaccgtgcagctgaagaacgtgcagcatgtcccttcaataaagaagaatctagttagcggctctctattgtgtagagaaggttttagacttgtgtttgagtccaataaatgtgtcgtatctaaatatgggacttttgttggaaaaggttatgacagcggaggcttgttccgcttttctttgaatgacatgtgtaataatcataatgctgtgaaccatattagcgagaatgatgagtctaatgtgtggcattcgcgactctgtcatatgaatttcggttgtatgacgcgcttagctaacatgagtttaattccaaaattcactttggtaaaaggttccaagtgccatacttgtgttcaatcgaaacaacctcgcaagcctcacaaggcatctgaggcgaggaatttggcacctctagaacttgttcattccgatttgtgcgaaatgaacggcgtgttgactaaagggggaaagaaatatttcatgacactgatagatgattgcactagattttgctatgtgtatctattgaaaacaaaggatgaggcattgcatttctttaaaatctataaagctgaggtagaaaaccaacttgaaaggaaaatcaaacggttgaggtctgatagaggtggggagtatttttccaataagtttgcatccttttgcgaagagtttagaattattcatgagatgacgcctccctattcaccccaatcaaatggggtggccgaaagaaagaaccgtactctaactgagatggtgaatgccatgttagacactgcggggctttccaaggaatggtggggtgaggcagttttgactgcgtgtcatgtcctgaataaaattccaatgaagcataaggaagtaacaccattcgaggaatgggaaaggaagaaattaaatctctcatacctacgaacatggggctgtttggccaaggtaaatgtacctatagccaaaaagcggaaacttggaccaaaaactgttgattgtgtgtttcttggttatgctatccacagtgtgggttatagattcttaatagtaaactctggagtacccgacatgcatgttggtacaattcttgagtccagagatgctacattctttgagaatgaatttcctatgaaatatacacctagcacttctagtaaagaaactgtcatgccccatgagcactttgcaccgatagaacacaatgatcaaacgcctgaggaaaatcctgaggaggacaacattgtagatactcgcaagagtaagagacaaagggttgcaaaatcctttggagatgactacattgtatacctcgtggatgacaccccaagaaccatagaagaggcatattcatctcctgacgctgactactggaaggaagcagtacgcagtgaaatggactcgattatgtctaatggtacttgggaagtcgttgagcgtccatatgggtgcaagcccgtaggatgcaaatgggttttcaagaaaaagcttaggcctgatggtacaatcgaaaagtacaaggcaaggcttgtggccaagggttatacccaaaaggaaggcgaggacttcttcgacacatactcaccagttgctcgcttgaccacgattcgagtactacttgctctggcagcctctcatggtcttctcgtccatcagatggacgttaagacagctttcctaaacggagagctggaggaggagatctatatggatcaaccagacgggtatgtactagaaggtcaggagggaatggtgtgtaaactattgaaatccttgtatggcctcaagcaagcacctaagcaatggcatgagaagtttgacaccacgcttacatctgcaggctttgttgtgaacgaagctgacaaatgtgtatactatcgctatggtgggggagaaggggtgatcttgtgcttatatgtcgatgacatactgatctttgggaccagccttaatctgattgaggaggtcaaagactatctgtccaagagttttgaaatgaaagatttgggagaggctgatgttattcttaacatcaaactacaaagaggagatgagggtgggattacacttgtgcaatcccactatgtggacaaggttttgagtcgctttggatatagtgactgcaagccagctcctactccttatgatcccagcgtgctattaaggaaaaaccgaagaatagcaagggatcagctgagatactctcaaatcattggttcattgatgtacttggctagcgcaacgaggcctgacatctcatttgctgtaagcaagctgagccggtttgtctcaaatccgggagatgatcattggcaggctctggaaagagtaatgcgctatctaaagggtactatgagctatggaattcactataccgggtatccaaaagtactagaagggtatagtgactcaaactggatatctgatgctgatgagataaaagccacaagtggatatgtgttcacacttggaggtggcgctgtttcctggaagtcttgcaagcagaccatcttaacgaggtcaacaatggaagcagaacttacagcactagatactgcgacagttgaggccgagtggcttcgtgaactcctgatggatttgccggtggttgaaaaaccagtgccagctatcctaatgaactgcgataatcaaacagtgattattaaagtgaacagttcaaaggacaacatgaagtcatctagacacatcaagagaagactgaaatctgtcagaaagcagaaaaactccggagtgatagcattggactatgtccaaacggctagaaatctggcagatcagtttaccaaggggctaccacgtaatgtgatagacagtgcatcgagggaaatgggcttgatacccacctaa

SEQ ID NO: 13943 - DNA, 568 bp, Oryza sativa
  unsure (1)..(568): unsure at all n locations
  Clone ID: TFbOSC13024j.C1.o3.np
natgactggagcttnnnnnnnnnnnnnnnnnnnnnnnnnnnntctcggcgaggaagagatggaatcaaaggcatgcacctattgtggagaaattggacacgttgctagcatgtgtctcacactctgccctcattgtgaagaagaccatccaccaggggagtgtcccacccgcaaggtcacatgttttctgtgcgaaggtacaaaccatgtgcccaaggattgccaacttagtgtgttgttgaccaagaccgcagaaatccaatgaaccaccctacgattgtctcatcagctagtcagctccaacagcaacatcgacgatatcatccatagcaccaatgctcctcctgctgcacctgactctgcaatcaatcatagcaataataccttcagcaccaaccattctctgggccgacagcctcagcaaagaattgtcgtcgatggaagaagttgtgtctctccccgacctactccaggccgagcgaagggcaatcaacctcaggagggcgatacaaagcagaagaccgttatccgcttcaaccagcaatcagaaggaagcttctcctgtgaa

SEQ ID NO: 13944 - DNA, 3465 bp, Oryza sativa
  Clone ID: TFbOSC400479j.C1.o1.fg
atggctggacgaacggcgacgacggcggcgctaggctacatggtgctagggctctaccggcgacgagaggcgaaggcgagggtggcggcaggatttttagggtgttacaaagatgatgggcaccaacggcattgtgctcgcaatggcgagcgtgaggacagatttggaaaactcaaggttaccataccaaaattttgtggtaccaatgatcctgaggagtatctcacttgggaatttaaggttgataagatatttcgtatgcgcaactacacagaagaaacaaagctacacatggcatcacttgaatttgatgagtatgctctgatttggtgggagcaaatgctgaaccaaagggaggaacacgatgaacttgctgttgctacatgggtagagatgaagcatgagatgcgtgcacgatttgttcctagtcactacaagcgtgatctttttgaaagattgcagaatatgaggcaaggaacacgctctgtagaagagtactacaaggagatggagaaagccatgattcgagccaaaatatacaacactattgtgcaattggtgcaccaagctacaaaggcagagcatcaagtgcaagaagatgcaaaggtggcacacaacacctcatttactactcgctctttgtccagtgggggtagaccgaccccaaagtttaacttgagcaagaacttcatctccagcaactctccttctctcaatttagcaagtaagaaagaggagagtacacaaagtgcaagcaagaaatttgttgttcctacaggtagcagcacctcttcggtgggttctacaccaaagagtagcaatattcagtgcttcaaatgccttggacgtggtcacatgcagaaggactgcccaaataataagacaatgctgattttggaggatggtgaatatgaatcaacaagtgaagataaggatgatctagctgctgatttgacgcattttgatgatgctcaagaggaggatgaggaaaatggtgttgtgtattatgactttgaagagggaccttcacttgttgttactccaaaagttttgacggttcagcccaagattgatcatgaacaacgatgcaatttatttcagaccaaggcaaaagttgatggcaaggtatgcaaagtaatcattgatggtggtagttgtcatagcctagctagtaaggagatatgcaacaagcttggtttgaatctggtgcgtcatcctcatccgtatcatgtacaatggtttagtgattgtggggaagtgaagatacaattcatggtgcaagtaacatttcagattggggactattgtgacactgtggagtgtgatgtggtgccaatgacggtgtgtcacttgctgcttggtaggccgtggcaatatgatcgtgcggcgcaacatgatggccgtacaaatcagtacaagttgaggtggaaagaaaaggacatagtgctgcgacctatgactccttcacaaattataaatgagaattgccaaaagctagaagttgttgttcagagtgataaaaaaagagagcaaaagattgttatccacaaatcgaaagatggtacatggcgcatgtgtgttgattgtagagcaattaatagcatttctgttagatatcgccatcctattcctaggcttgatgatatgctagatgaacttagtggtgctgtcatattctctaaaattgatttgcgtagtggttaccatcaaattcgaatgaaagaaggggatgaatggaaaattgcctttaaaacaaagtttggattgtatgagtggttagtaatgccttttggtttgactaatgcaccaagtacattcatgcgtctgatgaatcatgttctaagggctttcattgggaaatttgtggtagtgtactttgatgacattttgatatatagtaaaacaatggaggaacatcttgctcacattcggcaagtgctagagatgcttaggtctgaacgcttgtttgctaactttgaaaagtgcactttttgcagagaaaaggaaggtaagcccattgcatattttagtgagaagcttggtagtgcacaattgaattaccctgtttatgataaagaactctatgctcttgtacgtgctttggaaacttggcaacattatctttggccgaaggagtttgttattcattctaatcatgaagctttgaaatatttaagaggccaagctaatctgaaccgtaggcatgctaagtgggttgagtttattgagtcctttccatacattgtgcgatataagaaaggaaaagagaatgtggttgctgatgctttatctcgcaagagtgtgcttttgactcaattagacgtgaaagtttcaagtttagagagtttgaaagaattgtactctaaggatagtgaattttcagatccatattctaagtgtttggatgggaaaggctgggagaagtatcatgtgcatgatgggtttttatttcgtgctgacaagctatgtgttccagaatcgtctttgaggcatgacgttgagaggtatgtgcaaaggtgtgtcactagtcataaagcaaaatcgaaattgaatccccatggtttgtacactccattacctgttcctaatgcaccttgggaggatattagtatggactttgttctaggattgcctaggacaaggagggggagggattcaatatttgtagctgttgatagattttcaaaaatggcacactttattccctgtaacaaaagcgacgacgcgtcgcatgtagctgacttgtttttcagggaggttgtacgcttgcatggagtacctcgcactattgtatcagatcgtgatgtcaagttcatgagttatttttggaagactttgtgggctaagcttgggactaagttgttgttttcaacgacttgtcactcccaaattgacggacaaatggaggtggtgaatcgaacactttctatgttgctgagaatgatgattaagaagaacttgaaagaatgggaagattgtttgccacatgtggagtttgcatataacagggtggtacattctactactcaactcagtccgtttgaggtcgtgtatggcttcaacccaatcacaccacttgatttgctgcccctgccacttcaagaacgtgccaatatggaagcaacaaagcgtgcagattatgtgaagaaaatgcatgagaagacgaaggagaccattgagaggataattcagtcctatgctgcaaaggcaaacaaagacagaaagaagatgctatttcaacccggtgaattagtttgggtgcaccttcgtaaggatcgttttccggagaagcggaagtccaagcttatgccacatggagatgggccattcagggttttggagaaaatcactgacaatgcttacaagatagatcttcccggtgattacacagttagtaacacattcaatgtggttgatttgtcaccattctttggcacggaagaaacagattcgaggacgatttaa

SEQ ID NO: 13945 - DNA, 3123 bp, Oryza sativa
  Clone ID: TFbOSC401033j.C1.o4.fg
atggctgacaaccgttctgtagtcgaacaggctcatgagatacaaaccatggctaaggaactcgaactccttaagtgtgtcttacccgacaaatttctggccgggtgcattattgcgaaactacctccatcttggagaggtttcggtactgcactcaaacacaagagacaggaatactccgttgaggggtggatagcgtctcttgatattgaggagaaagctcaggaaaaagatgccgcgtctaagggcgatggtgggcagtccacagccaatgttgtgcacaaggcccaaaacaagagcaaggggaaatacaaagctcagcagaccaccaacttcaagaagaagaacaacaacaacaattctaatcaggatgagaggacttgctttgtgtgtgatcaacctgaccatctggccaggaagtgtccacaacgcaagaggatgaaggcacttgcagggcagacctctaagtctgctaatgtgaccattggcaacactggagatggaagcgggtatggtcacacggggttccaccgtcctaatggggaatgggtcacatgcttctgttcatggtgttggcacggtagatctaaagtttacttgggaaagatcgtgcagctgaagaacgtgcagcatgtcccttctatcgacaggaatcttgttagtggctcccgtctgactagagacggatttaagttggttttcgagtctaataaagtagtcatgtctaaacatggatattttattggtaaaggttatgagtgcggaggcctgttccgcttttccctttctgatttctgcaataagtctgtgaaccatatttgtggcagtgtggatgatgaggctaatgtatggcactcacgtttatgtcatattaattttggcttgatgtctcggctttccagcatgtatttaattcctaggttttccattgtcaaaggttctaagtgccatagttgtgtgcaatcaaagcaacctcgcaagcctcacaaggctgctgaggagagaaacttggcacctctagaattcctacactcagatctctgtgaaatgattggggtgttgacgaagggtggaaaacgatatttcatgacgttgattgatgatgctactagattttgctatgtgtacttgttgaaaatgaaagacgaggctctagactattttaaaatttataaggcagaagttgaaaatcaacttgatagaaagataaaaagacttaggtctgatcgtggtggagagtttttctcaaacgagtttgacttattctgtgaggaacatggcattatacatgagagtgcgcctccctattcgcccgagtctaatgggattgctgaaaggaagaaccgcacactgaccaacttggtgaatgccatgttggacaccgcgggattacctaaggcatggtggggggaggcattgttgacctcgaatcatgtgttaaacagagttcctaacagaaataaggacaaaacaccatatgagatatggatagggagaaaatcatcactttcttacttgcgcacatgggggtgcttggcgaaagtcaatgtaccaataacgaagaagcgcaaacttagaccaaagactatggactatgtctttctgggatatgctcaccacagcattgccgatagatttttaatagttaaatctgaggtacctgacatgcatgttggtacaattatggagtctcgtgatcctaccttctttgagagctttttcccaatgaatgatacacatagtagttctagccaaccctctgaaataattcccagttcaatcacaccaccagaacaaactgaatatacacatgaacatgttactgaggaggatgacagtgaagctcctcaaaggagcaaaagacaaaggacgactaagtcttttggtgatgatttcactgtgtacctcgtggatgaaactcctaagtcaatttcagaagcatacgcatctcctgatgcagactactggaaggaggctgtccgtagtgaaatgaattccattatcgctaacgggacttgggaggtgacagagcgaccctatgggtgtaagcctgtggggtgcaagtgggtgttcaagaagaagctcaggcctgacggtactattgaaaagtacaaggctcggcttgtcgctaagggctatactcagaaagaaggcgaagatttctttgacacttactcacctgttgctagattgaccataattcgtgtgctactttccctagcagcctcacatggtcttctcgttcatcaaatggacgttaagacagcttttcttaatggagagctggatgaggagatctatatggatcaacctgatgggtttgtagttgaaggtcaagaaggcaaagtgtgcaaattgttgaagtctttgtatggtctgaaacaagttcctaagcaaaggcatgagaaatttgacaaaacattgacatctgcaggctttacagtcaatgaggcagataaatgtgtgtactatcgccatggtggggatttgggagtagctgatgttatcttaaacattaagctaattagaggtgagaatgtgattacactcttgcagtcccattatgtggagaagatcttgaatcgctttggctacattgatagtactatggaattggggcttcactattctgggtattctgcggtactggagggatatagtgattttaactggatctctgatgtggatgagatcaaagccactagtggatatgtcttcacactaggtggtgctgctgtttcgtggaggtcttgcaaacagactattttgacgaggtcaaccatggaagcagaactgatggcactagatactgctactgttgaggcagaatggctgcgtgatctattaatggatctgcctattgttgaaaaaccggtgccggctatccttatgaactgtgacaatcaaacggtaattgtcaaagtgaatagttctaaggataatatgaaatcgtctagacatgtgaaaagacgattgaagtctgtcaggaaattgagaaactccggagttataacattggattacatccaaacagctagaaacctggcagatcctttcacgaagggactatcacgaaatgtgatagataatgcatcgaaggagatgggtttgagacctatgtga

SEQ ID NO: 13946 - DNA, 2184 bp, Oryza sativa
  Clone ID: TFbOSC420097j.C1.o9.fg
atgtccgacgctcggtctcggcgttcggtcgcctcgagcactcggcgtcagcaggacgccgagctcgccgcagcagaagagcgcaggcgagcaacggctcagaccgctgcagcagcagcgagggcggccagactggcggcagcggagttggcagcagccagggcggaggcggaggcggaggcggcggaagatgcggcacgtgcggcggaggtagaggttgagaccttgcgcagcagcatcaacggctccattgccggcgacatcaccgccgacagggagcttgaggagctggcaagaggaagggcacgggagagagcagagcggtgggcagcagcccacctccacggcggcggcggcggcccaagggaccgcgcgtccgcagacgggaacccagacgggcgcaggcgtgccggcggcagcccggagctcgcacgcggccctcgcaggcagcacggctctctctcccctgatcggcgccatggtcaccacggtgtccagacggtggtcagggactttggtcccggcggtgggtggcctactctcaccaaaaccaactacatcgagtgggccgcggtgatgagggtgaggctccaggtgtggcacatgtgggaggcagtccggtacagtgacgtcgactacgacgaggatcggcgggcactggatgccctcatcgctgcagtcccgcccgagatgcagttctcgctttcccagaagcggactgccaaggaggcctgggacgccatcgctgcggcacgcatcggcagtgaccgcgcccgcaagtccacactgcaggcactccgcaaggagtgggagaacctggccttcaagccaggtgaggatgttgatgactttgctctccgtctcaacactctcttgcagaaaatggtgcagtacggcgacgacacctacgacgaggagagagctgtcgagaagctcttccgctgcgtccctgagaagtacagacagatcgctcgctcgatcgaatctctgctggacctctccacgatgtcgatcgaggaggcgttaggtcgcctcaaggtcgtcgatggtgatgagccacagcctctctcggggcccatcaccatcggcgggaagctccatctcactagggagcagtgggaggcctctcagggtgacgggaggaagggggagtcatcttccccgacaggcggccgtaagccgcgcaaggcgcggggaggtgtccagctacggtgggcgcgaagacgtgccgagggtggcgcccgcagaggcgcccagggcattgccaccggcaaccacaagccggcacgagacgacgcctgccgcaactatggcaagcttggccattgggccaaagactgtcgacagccacgacgcggccaggcccacgtcgcacgggtggaggaggaagagccggctctgctcctggctcacgcaagcatcgagctacctccagcggcaccggccgcagcggctttcctccaccttgatgagccgaaggtactcgtctccctctgcaacggctccagcaacgacaaggctgatgggtggtaccttgacaccggcgccacccatcacatgaccggccgacgggagttcttcaccgagttcgactccagcgtccgaggctccgtcaagttcggggacgcctccggcgtggagatcaagggtgttggctccgtcaccttcaccgccaagtccggtgagcacaggctgctcaccggagtctactacatccccgcgttgaggaattctatcatcagcgtgggacagctggatgagaacggctcacgcgtgttggtcgaggacggactcatgaggatttgggatcgccgtcgtcaccttcttgccaaggtaaccagaggcactaatcgactctacatcctcagcgcgcaggtcgcacaaccagtttgcctcgccgctcgtcgggacgacgaggcgtggcagtggcacgagcgcttcgggcacctccacttcgaggccctgaagcagctcagtgccaaggagatggtgcgaggcatgccgtgccttgatgtcacgcccagaaattcccgaatagaattccaagcagaatgtgcattaaaatccccgtccaggaccagccggggtacacaaacgacaatgttgacattcagatccacgtcttacaaacatcataaaagtcttacaaaaaatgcagcggaaaacaaaagaaactggagctaa

SEQ ID NO: 13947 - DNA, 5370 bp, Oryza sativa
  Clone ID: TFbOSC100146j.C1.o1.fg
atgtcgaacgaggtgaaccatgtagggaaggctcccatgtttaatggcacaaactattccacttggaaaattaaaatgtctactcacctcaaagctatgagcttccatatttggagtattgttgatgtaggttttgctatcaccggcaagcccttgacggagattgatcaccgcaacctccaactcaatgcccaagccatgaatgctttgttcaactctttgagccaagaggagtttgatagagtgagcaaccttgagaccgcatatgagatttggaacaagttggcggagatccatgagggcacgagtgagtataaggatgccaagcttcatttcctcaagatccaatatgagacattctccatgttgcctcatgagagtgtgaatgacatgtatggaaggctcaatgtcattgtgaatgatctcaaggggcttgggacaaactacaccgatcttgaggttgcccaaaagatgcttagggctctaccggagaagtatgagacccttgtcaccatgctcatcaactccgacatgtcaatgatgacacccgcaagcctcttggggaagatcaacaccaatgacatgtacaagttgaagaagaaggagatggaggaagcctcaccttccaagaagtgcattgctctccaagccgaagttgaagataagggcaagggcaaggtgaatgaagccaatgaggacttggaggaagagattgcccttcttgctagaaggttcaatgatctcttgggaaggagaaaggagagaggaaggggctccaactccaataggagaagaaatagaagacccaacaagactctctccaacttgaggtgctttgagtgtggtgagaagggacactttgcttccaagtgcccttccaaggatgatgatggagacaagtcatgcaagaagaagagtggaggctacaagctcatgaagaagctcaagaaggaaggcaagaagattgaggccttcatcggggaatgggactcaaatgaggagagctccgcctcatccgggtccgaggaagaaggtggtgatgatgcaagctccaaaaagaagaagatggccgttgttgccatcaaggaggctctatcactcttcgctccactttgtctcatggcaaagggctcctctaaggtaacatctcttagtgataatgagagtgatgatgattgtgatgatgtttcctatgatgagcttgtgagtatgtttgaggagctccatgcttatagtgagaaggagattgtcaagttcaaggccctaaagaaggatcatgcttctttggaggtcttgtatgaggagctaaagacttctcatgagagactcaccatttctcatgagaagcttaaggaagctcatgacaacctcctttccactactcaacatggagctctcattgatgttggcatatcttgtgatttgcttgatgatagtgctacttgccatattgctcatgttgcatcatctagcatttctatctcttgtgatgatcttgtggatatgtctagctctagctcttgtatttctatctgtgatgcctcacttgttgttgagaacaatgagcttaaggagcaagtggctaagctcaacaagagcttggagaggtgcttcaagggtaagaacactcttgacaagattttgagtgagcaacggtgcatccttaacaaggagggacttggattcattccaaagaagggtaagaaaccttctaaccgtgccactcgttttgtcaagagcaatggaaggctcatgatggtagcattgttgctagatatgtgggttcccctatactcggtggtgaactaccacaccggtgggagccattgggtgcttgatagtggatgcactcaacacatgactggtgatagggctatgttcaccacatttgaagtaggagggaatgaacaagagaaagtgacatttggagacaatagcaaaggaaagtctattgttgccgagcttttcaaaaagtttgcaaaaagggcccaaaatgaatttagttgcactcttgtgaaaattagaagtgacaatggttccgagtttaagaataccaatatcgaggactattgtgatgatcttggcattaaacacgaactttccgctacctactcacctcaacaaaatggtgtagtggagaggaaaaatcgtacattgattgagatggcaaggactatgcttgatgaatatggtgtttccgattcttttggggcggaagccataaacaccgcttgccatgcaaccaataggctttatttgcatattctcttgaaaaagactttctatgagctaattgttggaaggaagccaaatgttgcctattttcaagtttttggttgcaagtgttatatttaccgaaagggtgttagactaaccaaatttgaaagtcggtgtgatgaagggtttcttctaggttatgcctcaaatagcaaggcataccgggtctacaacaagaacaaaggtattgtggaagaaaccgccgatgttcaatttgatgagactaatggctcccaagaggggcacgagaatttggatgatgtaggtgatgaaggcttgatgagaaccatgaagaatatgtcaattggagatgtcaagcctattgaagtggaagacaagccatccacctccactcaagatgagccatctacttccgctatgccaagtcaagctcaagttgaagtggaggaggagaaggtacaagatccacctatgccaccaaggatacacaccgctctttccaaggatcacccaattgaccaagtgttgggtgacattagtaagggtgttcaaactcgatctcgtgtcgcttcgatttgtgaacattactcgtttgtttcttgtcttgagccaaaacatgtagatgaagctctttgtgatccggattggatgaatgctatgcatgaagagctcaacaactttgcaagaaacaaggtgtggactttggttgaaagacctagagaccacaatgtcatagggacaaagtgggtatttaggaacaaacaagatgagaacgggttggtggtgagaaacaaggcaaggttggtggcacaaggtttcacaaaagttgaaggtttggactttggtgaaacttttgcccccgtggcaagacttgaggctattcgcatccttcttgcatttgcatcatgctttgatataaaactatttcaaatggatgtgaaaagtgcttttctaaatggtgaaattgctgaacttgtctttgttgaacaacctcccggttttgaagattctaaatatcctaaccatgtttacaaactctcaaaagctctttatggtttaaaacaagctcctagggcttggtatgaaagattgagatattttcttttgtcaaaggatttcaaaattggaaaagttgacaccaccctttttacaaaaatcattgatgatgatttctttgtgtgccaaatttatgttgatgacatcatattcggttctactaatgaggtattttgcaagaaatttggtgatatgatgtcgagggaatttgagatgtccatgattggagagttgagcttcttccttggacttcaaatcaagcaactcaaggatgggacgttcgtgagccaaaccaagtacatcaaggatctactcaagaggtttggcttggaggatgcgaagcccatcaagacacctatggcaaccaacgggcatctcgaccttgatgagggaggtaaaccggtagatttaaagctttatcgttctatgattggtagcttgctttaccttaccgcatctaggccggatatcatgtttagtgtttgcacgtgtgcacggtttcaagccgctcctaaggagtgtcacttagtggccgtgaaaaggattctaagatatttaaagtattcctctactattggcttgtggtacccaaaaggtgctaaatttaagcttgctggctattccgattcggattatgccggttgcaaagtggatagaaagagcacatccggtagttgccaaatgcttggtagatcccttgtgtcatggtcatccaagaaacaaaactccgtagccctctccaccgccgaggcggaatatgtttcggcagctatgcctccccgcactcgccatggtcgtcgtgagcccatgcccaatcccgtcaatgagaatgaggaatcaagcggagatgagtatgttcaaagtgatgatgacaatatggaaaatgttgagggtgatgagatggaagtaagtgatgatggtgatgacaatgggagtggcaatggtgaagatgatgaggcaagtgatgatgggagtcctctcgattccaccatccaatttgtgtttaatttgaggaatgctcaacaatacactatcctccgtcatcatgatcaattccggaggcctaacgattgtaatgatccaagatttcatacccagttccaaaagtccgtgtatgaacaagtgtatgccaacaaagccttcgccgaacacaagtggatttcttggaggcacattggtgagacaccggagtttgaagatttgcaagagatgttctggaccgttgggattgatagaattgtcaccatgaagcaatcttttgatgaagatctcatccggcaattctatgccaccgtatgggtgtccggcgattgtgatgcaatgaagtggatgtcggggacccttcaatgctctatcaaccgccgtgaattcaaggagctcttgcacattcgcttcaacaatggggatgaccttcatgatgagcacacccacaaccccttccccattgatcacttttctcagatttatgaagacgggggaaggcacacatatggaaaggtggcggtaagggccaccatcctcccaagatgcggcaacaatgatgacatacgcggagttgcttggcatgtcattgatgccattttggatggtcgtcggtttgatgttatcaaccttatgatgaaggagattgccatctcaaaggggactattggacaaggaatctattatgctccctacataatgaggttgattcaaagcaagttgggacaaattggtcacaatttaaaagaacataaggagtacaagcctcgtctccaactctcctcccctaaagctcctcgtgtgcgccaaccaacatttgatcaaggtgcaagctcaagtgcagccccccctcctcctcatgggtctgatccaagtgcttttttccatccacaatatgcctactttggaatgcaacccaatgaattcttcaacccggtccttggggctattaataccctaagtgaaagcattcaacgcttatccaccgggcatgaagcattgcatgaagatgttcgtggcttgcgcaccgatgttggcaacttgaatacttcggtgggaagattgcatactagggtgggtgtattggattcttga

SEQ ID NO: 13948 - DNA, 2166 bp, Oryza sativa
  Clone ID: TFbOSC102011j.C1.o13.fg
atggctctccctcaccggaccggtaccatggtcaccacaggatttaggccgtcatcagggaagtcggccctggcggtgtgtggcctaaaccctaccctcaccaagaccaactacgtcgagtgggccgtggtgatgaggataaggctccaggtgcgacacatgtgggagccagttcggcacggcgacgtcaactacgacgaggatcaacgggcgcccagaagcggactgccaaggaggcctgggacgccatcgctgcggcacgcatcggaagcgaccgcgctcgcaagtccacattgcaggcacttcgcaaggagtgggagaacctggccttcaagccagaagttggtgtcgtatggcgacgacacctacgatgaggagagagccgtcaagaagctcttccgctgcatcccagagaagtacaagcagattgctcgctcgatcgagtctctgttggacctctccacgatgtcgatcgaggaggcgataggaagcttcatctcactcgagagcagtgggaggcctgccagggtgacgggaagaagagggagtcctcttcctcgacaggccgcaagcgcggcaagggacacgtcctgcgaggacgcacccagggtggcgcccgcggaggcgcctaagccggcgcgagatgacgcctgccgcaactatggcaagtttggccattgggccaaagactgccgacagccacgacacggccaggccaacgtcgcacaggtggaggaggaggaagagtcggctctgctcctggcacacgcaagcatcgagctatctccagcggcaccggccgcagcggctttcctccaacttgatgagccgaaggccctgaagcggctcagtgccaaggagatggtgcgaggcctgccgtgccttgaccacgtgaagcagctctgcgacgtctgcgtgttaacaaagcagaggcggctcccctttccccagcagataagcttccgagccaaggagcggctcgagctcgtgcacggggacttgtgtggcccagtgacaccggccacaccaggaggacgacgttacttcatgctgctcgtcgacgacctctcccgcttcatgtgggtaatggttctcggcagcaagggagaggttgcggacgccattaggcgcgcgcaggctgctgcggaggcggactgcggcggcgaattcacggcggctgaattcgcatcgtactgcgctgatgagtgcattcagcaccactacttcgcgccgtacagcccgcagcagtacggcgtcgtcgagcggcacaaccagacggttgtagggatggctcgagcactcctcaagcagagggggatgccggccgttttctggggagaggcggtggtgacggctgtctacatcctcaaccgctcgactaccaaggcccgtacgaggcttggcatgggcgcaagccggcgcccccgagcctccaccgactccagcagcgacacgctctcgagctacgacttcggctgcaatgagttcttcgctgacaccatcacaaccggcgaccccacgcactccagcaccaacagccacccctccgggcacatccactccgacgccaggttgtgtcaagcacagcccggtggagttcgctactccgctctctcacgacgaggagcgcatcgacgcataccacgacacaggaggggatgccttcgcccccgtggtgcgatccccggcaaggagggcaaggtgctcctccttgcgctggctgctcaggaaagctggtgcgttcatcacatgaacgtcaagtcagcgtttctgaacgacgacttgaaggaggaggtctacgtacaccagccgccaggatttgcgatccccgacaaggagggcaaggtgctactcctgcacatggctctctatggcttgtggcaggcaccgagggcgtggaataccaagttggattccacgctcaaggggatgggcttcgagcaaagcccgcacgaggtagccatcaaccggctgggcaatggaggaaatgtcctgctggtgggtgtctacgtcgacaacttggtaattaccggcaccaaggatgcggaggtggcggcgttcaaggaagagatgaaggccaccttccagatgagtgacctagggcctctcttcttctacctagggatcgaggtgcaccaggacgactccgggatcacgtttcgatag

SEQ ID NO: 13949 - DNA, 3875 bp, Oryza sativa
  Clone ID: TFbOSC10931j.C1.o1.fg
ccgaagttgaagacaagggcaagggcaaggtgaatgaagtcaatgagaacttggaagaagagaatgcccttcttgctagaaggttcaatgatttcttgggaaggagaaaggagagaggaaagggctccaactcaaataggagaagaaatagaagacccaacaagactctctccaacttgaggtgctttgagtgtggtgagaagggacactttgcttccaagtgcccttccaaggatgatgatggagacaagtcatccaagaagaagagtggaggctacaagctcatgaagaagctcaagaaggaaggcaagaagattgaggccttcatcgaggaatgggactcaaatgaggagagctcgcctcatccgggctcctctaaggtaacatctcttagtgatagtgagagtgatgatgattgtgatgatgtttcctatgatgagcttgtgagtatgtttgaggagctccatgcttatagtgagaaggagattgtcaagttcaaggccctaaagaaggatcatgcttctttggaggtcttgtatgaggagctaaagacttctcatgagagactcaccatttctcatgagaagcttaaggaagctcatgacaacctcctttccactactcaacatggagctctaattgatgttggcatatcttgtgatttgcttgatgatagtgctactttccatattgcttatgttgcatcatctagcatttctacctcttgtgatgatcttgtggatatgtctagctctagctctagctcttgtgtatctatttgtgatgcctcacttgttgttgagaacaatgagcttaaggagcaagtggctaagctcaacaagaggttggagaggtgcttcaagggtaagaacactcttgacaagattttgagtgagcaacggtgcatccttaacaaggagggacttggattcattccaaagaagggtaagaaaccttctcaccgtgccactcgttttgtcaagagcaatggaaggctcatgatggtagcattgttcctagatatgtgggttcccctatactcggtggtgaactaccacaccggtgggagccattgggtgcttgatagtggatgcactcaacacatgaccggtgatagggctatgttcaccacatttgaggtaggaaggaatgaacaagagaaagtgacatttggagacaatagcaaaggaaaggtaattgggttaggtaaaattgctatctccaatgatttgtcaattgataatgtctctcttgttaaatctctaaatttcaatttgctttcggttgctcaaatttgtgatcttagcttgtcatgtgctttcttcccgcaagaagttattgtttctagccttcttgacaagtcttgtgtgttcaaaggttttagatatggaaatctttatttggttgatttcaattctagtgaagcaaatttgaaaacttgtttagttgcaaaaacttctttgggttggctttggcatagaaggctagcccatgttggcatgaatcaattgagcaaattttcaaaacgtgatctagttatgggcttgaaagatgtgaagtttgagaaagataagctttgtagtgcttgtcaagccggcaagcaagttgcatgttctcatcctactaagagtatcatgtccacatctaaaccattggagctcttgcatatggatttgtttgacccaacaacctataagagcattggtggtaatagtcattgtcttgtgattgttgatgattattctcgctatacttgggtgttctttttgcatgataagtctattgtcgccgaccttttcaaaaagtttgcaaaaagggcccaaaatgaatttagttgcactcttgtgaaaattagaagtaacattggttccgagtttaagaataccaatatcgaggactattgtgatgatcttggtattaaacatgaacttttcgctacctactcacctcaacaaaatggtgtagtggagaggaaaaatcgtacattgattgagatggcaaggactatgcttgatgaatatggtgtttccgattccttttgggcggaagccataaacaccgcttgccatgcaaccaataggctttatttgcatcgtgtcttgaaaaagacttcctatgaggtaattgttgggaggaagcctaatattgcctattttcgagtttttggttgtaaatgttatattcatcgaaagggtgttagactaaccaaatttgaaagtcggtgtgatgaagggtttcttctaggttatgcctcaaaaagcaaggcataccgggtctacaacaagaacaaaggtattgtggaagaaaccgccgatgttcaatttgatgagactaatggctcccaagaggggcacgagaatttggatgatgtaggtgatgaaggcttgatgagagttatgaagaacatgtcaattggagatgtcaagcctattgaagtggaagacaagccatccacctccactcaagatgagccatctacttccgctatgccaagtcaagctcaagttgaagtggaggaggagaaggcacaagaaccacctatgccaccaaggatacacaccgctctttccaaggatcacccaattgaccaagtgttgggtgacattagtaagggtgttcaaactcgatctcgtgtcacttcgatttgtgaacattactcgtttgtttcttgtcttgagcgaaaacatgtagatgaagctctttgtgatccggattggatgaatgctatgcatgaagagctcaaaaactttgcaagaaacaaggtgtggactttggttgaaagacctagagaccacaatgtcatagggacaaagtgggtctttaggaacaaacaagatgagaacgggttggtggtgagaaacaaggcaagattggtggcacaaggtttcacacaagttgaaggtttggactttggtgaaacttttgcccccgtggcaagacttgaggctatttgcatccttcttgcatttgcatcatgctttgatataaaactatttcaaatggatgtgaaaagtgcttttctaaatgatactaaatatcctaaccatgtttacaaactctcaaaagctctttatggtttaagacaagctcctagggcttggtatgaaagattgagagattttcttttgtcaaaggatttcaaaattggaaaagttgacatcactcttttcacaaaaatcattggtgatgatttctttgtgtatcaaatttatgttgatgacatcatattcggttctactaatgaggtattttgcaaggaatttggtgatatgatgtctagggaatttgaaatgtccatgattggagagttgagcttcttccttggacttcaaatcaagcaactcaagaatgggacgttcgtgagccaaaccaagtacatcaaggatctactcaagaggtttggcttggaggatgcgaagcccattaagacacctatggcaaccaacgggcatctcgaccttgatgagggaggtaaaccggtagatttaaagctttatcgttctatgattggtagcttgctttaccttaccgtatctaggccggatatcatgtttagtgtttgcatgtgtgcacggtttcaagccgctcctaaggagtgtcacttagtggccgtgaaaaggattctaagatatttaaagcattcctctactattggcttgtggtacccaaaaggtgctaaatttaagcttgttggctattccgatccggattatgccggttgcaaagtggatagaaagagcacatccagtagttgccaaatgcttggtagatcccttgtgtcatggtcatccaagaaacaaaactccgtagccctcttactgccgagacagaatatgtttcggcgggtagttgttgtgcccaattgctttggatga

SEQ ID NO: 13950 - DNA, 880 bp, Oryza sativa
  Clone ID: TFbOSC17329j.C1.o1.gm
gggcggtcagaccggccacatagtggcggtctcaccggcgtgccctgcccggtgacctctccgagaagattgtggaggaggcccggtgccggctttgcaatcaccggcacgcccttgatggagattgatcaccgcaacctccaactcaatgcccaagccatgaatgctttgttcaactctttgagccaagaggagtttgatagagtgagcaaccttgagaccgcatatgagatttggaacaagttggcggagatccatgagggcacaagtgagtacaaggatgccaagcttcacttcctcaagatccaatatgagacattctctatgttgcctcatgagagtgtgaatgacatgtatgggaggctcaatgtcattgtgaatgatctcaaggggcttggggcaaactacaccgatcttgaggttgcccaaaagatgcttagggctctaccagagaagtatgagacccttgtcaccatgctcatcaactccgacatgtcaaggatgacaccggcaagcctcttggggaagatcaacaccaatgacatgtataagttgaagaaaaaggaaatggaggaagcctcaccttccaagaagttcaatgatttcttgggaaggagaaaggagagaggaaagggctccaactcaaataggagaagaaatagaagacccaacaagactctctccaacttgaggtgctttgagtgtggtgagaagggacactttgcttccaagtgcccttccaaggatgatgatggagacaagtcatccaagaagaagagtggaggctacaagctcatgaagaagctcaagaaggaaggcaagaagattgaggccttcatcgaggaatgggactcaaatgaggagagctcgcctcatccgg

SEQ ID NO: 13951 - DNA, 3423 bp, Oryza sativa
  Clone ID: TFbOSC19010j.C1.o1.fg
atgtcgaacgaggtgaaccatgtagggaaggctcccatgtttaatggcacaaactattccacttggaaaattaaaatgtctactcacctcaaagctatgaggttccatatttggagtattgtggatgtaggttttgctatcaccggcacgcccttgacagagattgatcaccgcaacctccaactcaatgtccaagccataaatgatttgttcaactctttgagccaagaggagtttgatagagtgagcaaccttgagaccgcatatgagatttggaacaagttggcggagatccatgagggcacaagtgagtacaaggatgccaagcttcacttcctaaagatccaatatgagacattctccatgttgcctcatgagagtgtgaatgacatgtatgggaggctcaatgtcattgtgaatgatctcaaggggcttggggcaaactacaccgatcttgaggttgcccaaaagatgcttagggctctaccggagaagtatgagacccttgtcaccatgctcatcaactccgacatgtcaaggatgacaccggcaagcctcttggggaagatcaacaccaatgacatgtacaagttgaagaagaaggagatggaggaagcctcaccttccaagaagtgcattgctctccaagccgaagttgaagacaagggcaagggtaaggtgaatgaagccaatgagaacttggaggaagagattgcccttcttgctagaaggttcaatgatctcttgggaaggagaaaggagagaggaaggggctgtaactctaataggagaagaaatagaagacccaacaagactctctccaacttgaggtgctttgagtgtggtgagaagggacactttgcttccaagtgcccttccaaggatgatgatggagacaagtcatccaagaaaaagagtggaggctacaagctcatgaagaagcttaagaaggaaggcaagaagattgaggccttcatcggggaatgggactcaaatgaggagagctccgcctcatccgggtccgaggaagaagatggtgatgatgcaagctccaagaagatgaccgttgttgccatcaaggaggctccatcactcttcgctccactttgtctcatggcaaagggctcctctaaggtaacatctcttagtgatagtgagagtgatgatgattgtgatgatgtttcctatgatgagcttgtgagtatgtttgaggagcttcatgcttatagtgagaaggagattgtcaagttcaaggccctaaagaaggatcatgcttctttggaggtcttgtatgaggagctaaagacttatcatgcgagactcaccatttctcatgagaagcttaaggaagctcatgacaacctcctttccactactcaacatggagctctcattgatgttggcatatcttgtgatttgcttgatgatagtgctacttgctatattgctcatgttgcatcatctagcatttctacctcttgtgatgatcttgtggatatgtctagctctagctctagctcctgtgtttctatttgtgatgcctcacttgttgttgagaacaatgagcttaaggagcaagtggctaagctcaacaagagcttggagaggtgcttcaagggtaagaacactcttgacaagattttgagtgagcaacggtgcatccttaataaggagggacttggattcattccaaagaagggtaagaaaccttctcaccgtgccactcgttttgtcaagagcaatggaaggctcatgatggtagcattgttgctagatatgtgggttcccttatactcggtggtgaactaccacaccggtgggagccattgggtgcttgatagtggatgcactcaacacatgaccggtgatagggctatgttcaccacatttgaagtaggagggaatgaacaagagaaagtgacatttggagacaatagcaaaggaaagtctattgttgccgagcttttcaaaaagtttgcaaaaagggccaaaaatgaatttagttgcactcttgtgaaaattagaagtgacaatggttccgagtttaagaataccaatatcgaggactattgtgatgatcttggtattaaacacgaactttccgctacctactcatctcaacaaaatggtgtagtggagaggaaaaatcgtacattgattgagatggcaaggactatgcttgatgaatatggtgtttctgattccttttgggcggaagccataaacaccgcttgccatgcaaccaatatactttatttgcatcctctcttgaaaaagacttcctatgagctaattgttgggaggaagcctaatgttgcctattttcgagtttttggttgcaagtgttatatttaccaaaagggtgttagactaaccaaatttaaaagtcagtgtgatgaagggtttcttctaggttatgcctcaaatagcaagacataccgggtctacaacaagaacaaaggtattgtggaagaaaccgccgttgttcaatttgatgaaactaatggctcccaagaggggcacgagaatttggatgatgtaggtgatgaaggcttgatgagagctatgaagaacatgtctattggagatgtcaagcctattgaagtggaagacaagccatccacctccactcaagatgagccatctacttccgctacgccaagtcaagctcaagttgaagtggaggaggagaaggcacaagatccacctatgccaccaaggatacacaccgctctttccaaggatcacccaattgatcaagtgttgggtgacattagtaagggtgttcaaactcgatctcgtgtcgtttcgatttgtgaacattactcgtttgtttcttgtcttgagccaaaacatgtagatgaagcactttgtgatccggaatggatgaaggctatgcacgaagagctcaacaactttgcaagaaacaaggtgtggactttggttgaaagacctagagaccacaatgtcatagggacaaagtgggtctttaggaacaaacaagatgagaacgggttggtggtgagaaacaaggcaaggttggtggcacaaggtttcacacaagttgaaggtttggactttggtgaaacttttgcccccgtggcaagacttgaggctgttctcatccttcttgcatttgcatcatgctttgacataaaactatttcaaatggatgtgaaaagtacttttttaaatggtgaaattgccgaacttgtctttgttgaacaacctcccgattttgaagatcctaaaaatcctaaccatgtttacaaactctcaaaagctctttatggtttaaaacaagctcctagggattggtatgtgtcggtgatatgggaccgggagtatcatgaccagaggcttgaggcagacgcaatcgcccacgtggcctggcaccttcggggacgtcgggcccgagggtga

SEQ ID NO: 13952 - DNA, 3231 bp, Oryza sativa
  Clone ID: TFbOSC27261j.C1.o6.gm
atggagcggggcgggccctgcgacggcctctgtcgcttccggattcacctaggcaccagaggggactgcccgttgcccgctagggacgggggctttgctatcaccggcacgtccttgacggagattgataaccgcaacctccaactcaatgcccaagccatgaatgctttgttcaactctttgagccaagaggagtttgatagagtgagcaaccttgagaccgcatatgagatttggaacaagttggcggagatccatgaggacacaagtgagtacaaggatgccaagcttcatttcctcaagatccaatatgagacattctccatgttgcctcatgagagtgtgaatgacatgtatgggaggctcaatgtcattgtgaatgatctcaaggggcttggggtaaactacaccgatcttgaggttgcccaaaagatgcttagggctctaccagagaagtatgagacccttgtcaccatgctcatcaattccgatatgtcaaggatgacacccgcaagcctcttggggaagatcaacaccaatgacatgtacaagttgaagaagaaggagatggaggaagcctcaccttccaagaagtgtattgctctccaagccgaagttgaagacaagggcaagggtaaggtgaatgaagccaatgaggacttggaggaagagattgcccttcttgctagaaggttcaatgatctcttgggaaggagaaaggagagaggaaggggctccaactccaataggagaagaaatagaagacccaacaagactctctccaacttgaggtgctttgagtgtggtgagaagggacactttgcttccaagtgcccttccaaggatgatgatggggacaagtcatccaagaagaagagtggaggctacaagctcatgaagaagctcaagaaggaaggcaagaagattgaggccttcatcggggaatgggactcaaatgaggagagctccgcctcatccgggtccgaggaagaaggtggtgatgatgcaagctccaagaagaagaagatggccgttgttgccatcaagattgtcaagttcaaggccctaaagaaggatcatgcttctttggaggtcttgtatgaggagctaaagacttctcatgagagactcaccatttctcatgagaagcttaaggaagctcatgacaacctcatttccactactcaacttggagctctcattgatgttggcatatcttgtgatttgcttgatgatagtgctactcgccatattgctcatgttgcatcatctagcatttctacctcttgtgatgatcttgtggatatgtctagctctagctctagctcttgtgtttctatttgtgatgcctcacttgttgttgagaagaatgagcttaaggagcaaatggctaagctcaacaagagcttggagaggtgcttcaagggtaagaacactcttgacaagattttgagtgagcaacggtgcatccttaacaaggagggacttggattcattccaaagaagggttatgcctcaaaaagcaaggcataccgggtctacaacaagaacaaaggtattgtggaagaaaccgccgatgttcaatttgatgagactaatggctcccaagaagggtacgagaatttggatgatgtatgtgatgaaggcttgatgagagctatgaagaacatgtctattggagatgtcaagcctattgaagtggaagacaagccatccacctccactcaagatgagccatctacttccgctacgccaagtcaagctcaagttgaagtggaggaggagaaggcacaagatccacctatgcctccaaggatacacaccgctctttccaaggatcacccaattgaccaagtgttgggtgacattagtaaggatgaagctctttgtgatccggattggatgaatgctatgcatgaagagctcaacaactttgcaagaaacaaggtgtggactttggttgaaagacctagagaccacaatgtcatagggacaaagtgggtctttaggaacaaacacgatgagaacgggttggtggtgagaaacaaggcaagggaatttgagatgtccatgattggagagttgagcttcttccttggacttcaaattaagcaactcaaggatgggacgttcgtgagcaaaaccaagtacatcaaggatctactcaagaggtttggcttggaggatgcgaagcccatcaagacacctatggcaaccaacgggtatcttgaccttgatgagggagtgatgcctccccgcacttgtcatgatcgtcgtgcgcccactccggatcccgtgagtgagcctggggaatcgagcggagaggattacgctcaaagtgatgaagaggttgaggcaaatgttgagggggctagtgaggaggcaagtggagatgatgacagtggaagtggagaggatgaggatgaaggaaggaaagcttttgcagagcataagtggatttcttggagagacatcaatgagactccagagtttgagggcttgcaggatctcttcaagactgttggcattgatcggattatgactctcaagcaagactacaatgaagatctgatccggcagttttatgctacagtgtgggtggctggggactatagtgagatgaagtggatgtccgacaccctccagtgttctatctctaggaggcaattctggcggctcctcaatattcgcttggactttggagatgacttgcatgaggagcacacccataatccgctctccatagactacctctctcagttttatgaagatggagtgcggtacacacatgggaaggttgccggcttgaggaccatccccagtgtggttaacaggattgtgagagctaccatcctccctcgccttggcaacaatgatgacattaggggggtggcttggcacgtcatcgatgcgatcattcagggtcgtcagttcgacattgtgtctctcatgatgcaagagattgccatctctaaggggaccttcactcagggaatctattatgccccttacatcatgaggttgattcaagacaagcttggggctgctgggcaaaatttgaagaagcataagcagtacaagccccgccttcagcttggaactccccgtgctcctagagcggcgccctcctctcatcctggagctagctcaagctcagcacctcctcctcctcctcatgggtatgttccaaatgctttcttccatcctcagtatgcctactttggaatgtag

SEQ ID NO: 13953 - DNA, 961 bp, Oryza sativa
  Clone ID: TFbOSC31820j.C1.o1.fg
atggagttgggctcgcctcaacagggagtaggaaaccagcgagtttccgaacctcggctttgctatctcaccggcacgcccttgacggagattgatcacagcaacctcctactcaatgctcaagtcatgaatgctttgttcaactctttgagccaagaggagttcgatagagtgagcaaccttaagatcgcatatgagatttggaacaagttggcggagatccatgagggcacaagtgagtacaaggatgccaagcttcatttcctcaagatccaatatgagacattctcaatgttgcctcatgagagtgtgaatgacatgtatgggaggctcaatgtcattgtgaatgatctcaaggggcttggggcaacctacaccgatcttgaggttgcccaaaagatgcttagtgctctaccggagaagtatgagaccctaatcgccatgctcatcaactccgacatgtcaaggatgacacccgcaagcctcttggggaagatcaacaccaatgacatgtacaagttgaagaagaaggagatggaggaagcctcaccatctaagaagtgcattgctctccaagccgaagttgaagacaagtggaagagcaaggtgaatgaagccaatgatgacttggaggaagagattgcccttcttgctaaaaggttcaatgatctcttgggaagaagaaaggagagaggaaggggctccaactccaataggagaagaaatataatacctaacaagactctctccaacttgaggtgctttgagtgtggtgagaagggacactttgcttccaagtgcccttccaaggctaatgatggagacaagtcatccaagaagaagagtggaggctacaagctcatgaagaagctcaagaaggaagggaagaagattgaggccttcattgggcaatgggactcaaatgaggagagctccacctcatccgggtccgaagaagaag

SEQ ID NO: 13954 - DNA, 5592 bp, Oryza sativa
  Clone ID: TFbOSC400192j.C1.o40.np
agatttgtcattaatcaccgaaaccaaattaaggcacttgaacttacacccgccgctcaactccttagcgtccgaggcggatgtggtggccacggcggcggatggtggtcgatgcggagtcgggagcactgcggtgggcggcggcggacggatccgcctttcccgacggtgggagcggagggggtggtgggagtggacggcgcgacagctagtgtggcacttgatcatctccacgccgggtcatcgcttgttactcttggaggttgccgcctcctagacggcttgtggaggagttgcccggtgacctctccgagaagattgtggaggaggcccggtgccggctttgctatcactggcaagcccttgacggagattgatcaccgcaacctccaactcaatgcccaagccatgaatgctttgttcaactctttgagccaagaggagttcgatagagtgagtaaccttgagaccgcatatgagatttggaacaagttggcggagatccatgagggcacaagcgagtacaaggatgccaagcttcatttcctcaagatccaatatgagacattctccatgttgcctcatgagagtgtgaatgacatgtatgggaggctcaatgtcattgtgaatgatctcaaggggcttggggcaaactacaccgatcttgagattgcccaaaagatgcttagggctctaccggagaagtatgagacccttgtcaccatgctcatcaactccgacatgtcaaggatgacacccgcaagcctcttggggaagatcaacaccaatgacatgtacaagttgaagaagaaggagatggaggaagcctcaccttccaagaagtgcattgctctccaaaccgaagttgaagacaagggtaagggcaaggagagaggaaggggctccaactccaataggagaagaaatagaagacccaacaagactctctccaacttgaggtgctttgagtgtggtgagaagggacactttgcttccaagtgcccttccaaggatgatgatggagacaagtcatccaagaagaagagtggaggctacaagctcatgaagaagctcaagaaggaagggaagaagattgaggccttcatcggggaatgggactcaaataaggagagctccgcctcatctgggtccgaggaagaaggtggtgatgatgcaagctccaagaagaagaagatggccgttgttgccatcaaggaggctccatcactcttcgctccactttgtctcatggcaaaaggctcctctaaggttacatctcttagtgatagtgagagtgatgatgattgtgatgatgtttcctatgatgagtttgtgagtatgtttgaggagctccatgcttatagtgagaaggagattgtcaagttcaaggccctaaagaagaatcatgcttctttgaaggtcttgtatgaggagctaaagacctctcatgagagactcaccatttctcatgagaagcttaaggaaactcatgacaacctcctttccactactcaacatggagctcacattgatattggcatatcttgtgatttgcttaatgatagtgctacttgccatattgctcatgttgcatcatctagcatttctacctcttgtgatgatcttgtggatatgcctagctctagctctagctcttgtgtttctatttgtgatgtctcacttgttgttgagaacaatgagcttaaggagcaagtggccaagctcaacaagagtttggagaggtgtttcaagggaaggctcatgattgtagtattgttgctagatatgtgggttccactatacttagtggtgaactaccacaccgatgggagccattgggtgcttgatagtggatgcactcaacacatgaccggtaatagggctatgttcaccacatttgaagtaggagggaaagaacaagagaaagtgacatttggaggcaatagcaaaggaaaggtaattgggttagttgcaaaaacttcattgggttggctttggcatatgaggctagcccatgttggcatgaatcaattgagcaaactttcaaaacgtgatctagttgtgggcttgaaagatgtgaagtttgagaaagataagctttgtagtgcttgtcaagccggcaagcaagttgcatgttctcatcctactaagagtatcatgtccacatctagaccattggagctcttgcatatatggatttgtttggcccaacaacctataagagcattggtgtggagaggaaaaatcgtacattgattgagatggcaatgactatgcttgatgaatatggtgtttccgattccttttgggcggaagccataaacaccgcttgctatgcaactaataggctttatttgcatcgtctcttgaaaaagacttcctatgtgctaattgttgggaggaagccaaatgttgcctattttcgagtttttggttgcaagtgttatatttaccgaaagggtgttagactaaccaaatttgaaagtcggtgttgtgatgaagggtttcttctaggttatgcctcaaatagcaaggcataccaggtctacaacaagaacaaaggtattgtggaagaaaccgccgatgttcaatttgatgagactaatggctcccaagaggggcacgagaatttggatgatgtagatgatgaaggcttgatgagagatatgaagaacatgtctattggggatgtcaagcctattgaagtggaagacaagccatccacctctactcaagatgagccatctacttccgcttcgccaagtcaagcttaaattgaagtggaggaggagaaggcacaagatccacctatgccaccaaggatacacaccgctctttccaaggatcacccaattgaccaagtgttgggtgatattagtaagggtgttcaaactcgatctcgtgtcgcttcgatttgtgaacactactcgtttgtttcttgtcttgagccaaaacatgtagatgaagctctttgtgatccggattggatgaatgctatgcatgaatagctcaacaactttgcaagaaacaaggtgtggactttgattgaaagacctagagaccacaatgccatagggacaaagtgggtctttaggaacaatcaagatgagaacagattggtggtgagaaacaaggcaagattggtgacgcaaggtttcacacaagttgaaggtttggactttggtgaaacttttgcccccgtggcaagactagaggctattcgcatccttcttggatttgcatcatgctttgatataaaactatttcaaatggatgtgaaaagtgcttttctaaatggtgaaattgccgaacttgtctttgttgaacaacctcccggttttgaagatcctaaaaattctaaccatgtttgtaaactctcaaaaggtctttatggtttaaaacaagctcctagggcttggtatgaaagattgagagattttcttttgtcaaaggatttcaaaattggaaaagttgacaccaccctttttacaaagatcattggtgatgatttctttgtgtgtcaaatttatgttgatgatatcatattcggttctactaatgaggtattttgcaaggaatttggtgatatgatgtctagggaatttgagatgtccatgattggagagttgagcttcttccttagacttcaaatcaagcaactcaaggatgggacgttcttgagccaaacaaagtacatcaaggatctactcaagaggtttggcttggaggatgcaaagcccatcaagacacctatggtaaccaatgggcatctcgaccttgatgagggaggtaaaccggtagatttaaagctttatcattctatgattggtagcttgctttaccttaccgcatctaggccggatatcatgtttagtgtttgcatgtgtgcacggtttcaagtcgctcctaaggagtgtcacttagtggccgtgaaaaggattctaagatatttaaagcattcctcaattattggcttgtggtacccaaaaggtgctaagtttaagctagttggctattccgattcggattatgccggttgcaaagtggatagaaagagcacatccggtagttgccaaatgcttggtagatcccttgtatcatggtcatccaagaaacaaaactccgtagccctctctactgccgaagcggaatatgtttcagcggaaactagattcttagttttggccaaaatgagatttatccccaaaataagattgagaaggaatttgagaaaagtttcaaaacaaagttgaggtggtctgaccgggtaccagccgccggtttgaccgcgctcggccgtcggtctgaccgacatatggacggcggtctgaccggttgttggccctcggctatgcctccccgcactcgccgtggtcgtcgtgagcccacgcttgatcccgtcagtgagaatgaggaatcaaacggagatgagtatgttcaaagtgatgatgaagttatggaaaatattgagggggatgaggtggaagtaagtggtgataatggcagtggcgatggtgaggatgatgaggcaagtgatgatgggagtcctctcgatcccaccatccaatttgtgctcaatttgaggaatgcctagcaatacactatcctccgtcatcacgatcaattccggaggcctaatgattgcaatgatctgagattccatacacggtatcaaaagtccgtggtgtccggcgattgtgatgccatgaagtggatgtcggggacccttcgatgctctatcaactgccgtgcattcaaggagctcttgcacattcacttcaacaacagggatgacctccatgatgagcaaaaccacaaccccttccccattgatcacttttctcagttttatgaagaagggaggaggcacacctatggaaaggtggtgagtttgagggctatcccaagtctgatcaaccgcatagtgagggccaccattctcccaagatgtggcaacaatgatgacatttgcggcgttgcatggcatgtcattgaagccatcatggatggtcgtcggtttggtgtcatcaaccttatgatgaaggagatagccatttccaaggggactattggacaaggagtttactatgccccctacataatgagattgattcaaagcaagttgagacaaattggtaacaacttaaaagaacacaaagactacaagcctcatctccaactctccactcctagagctcctcgtgtgcgccaaccaacatttgatcaaggtgcaagctcaagtgcagcccccctcctcctcatgggtatgatccaagtgccttcttccatccacaatatgcatactttggaatgcaacccaacgaatacttcaatccggtgcttggggctattaataccctaagtgaaagcattcaacgcttatccaccgggcattaagcattgcatgaggatgttcatggcttacgcaccgatgttggagatttgaatgcttccgtgggaagattgcacactagggtgggtgtattggattcttgagtccaaatgttggagagcacccaagcttttgtatatcatcgccgccgtgatgctcctcatccttcatctttggcacgtcctccttctcctccacaa

SEQ ID NO: 13955 - DNA, 5370 bp, Oryza sativa
  Clone ID: TFbOSC400703j.C1.o6.np
gagctagtgtggcacttgattgatcatctccacgccgggtcattgcttgttactcttggaggttgccgcctcctagacggcttgtggaggagttgcctggtgatctctccgagaagattgtggaggaggcccggcgccggctttgctatcaccggcacacccttgacggagattgatcaccgcaacctccaactcaatgcccaagcatgaatgccttgttcaactctttgagccaagaggagtttgatagagtgagcaaccttgagaccgcatatgagatttggaacaagttggcggagatccatgagggcacaagcgagtacaagaatgccaagcttcattttctcaagatctaatatgagacattctccatgttgcctcatgagagcgtgaatgacatgtatgggaggctcaatgttattgtgaatgatctcaaggggcttggggcaaactacaccgattttgaggttgcccaaaagatgcttagggctctaccggagaattatgagacccttttcaccatgctcatcaactccgacatgtcaaggatgacacccgcaagcctcttggggaagatcaacaccaatgacatgtacaagttgaagaagaaggagatggaggaagcctcaccttccaagaagtgcattgctctccaagccgaagttgaagacaagggcaagggcaaggagagaggaaggggctccaactcaaataggagaagaaatagaagacccaacaagactttctccaacttgaggtgctttgagtgtggtgagaagggacactttgcttccaagtgcccttccaaggatgatgatggagacaagtcatccaagaagaagagtggaggctacaagctcatgaagaagctcaagaaggaaggcaagaagattgaggccttcatcggggaatgggactcaaatgaggagagctccgcctcatccgggtccgaggaagaaggtggtgatgatgtaaagctccaagaagaagaagatggccgttgttgccatcaaggaggctccacactctttgctcaagggctcctctaaggtaacatctcttagtgatagtgagggtgatgatgattgtgatgatgtttcctatgatgagtttgtgagtatgtttgaggagctccaagcttataatgagaaggagattgtcaagttcaaggctctaaagaaggatcatgcttctttggatgtcttgtatgaggagctaaagacctctcatgagagactcaccatttctcatgagaagcttaaggaagctcatgacaacctcctttccactactcaacatggagctcacattgatgttggcatatcttgtgatttgcttgatgatagtgctacttgccatattgctcatgttgcatcatctagcattcctacctcttgtgatgatcttgtggatatgcctagctctagctctagctcttgtgtttctatttgcgatgcctcacttgttgttgagaataatgagcttaaggagcaagtggctaatgagacaagagtttggagaggtgcttcaagggaaggctcatgatggtagcattgttgctagatatgtgggttcccctatactcagtggtgaactaccgcaccggtgggagccattgggtgcttgatagtggatgcactcaacacatgaccggtgatagggctatgttcaccacatttgaagtaggagggaatgaacaagagaaagtgacttttggagacaatagcaaaggaaaggtaattgggttagttgtaaaaacttcattgggttggctttggcataggaggctagctcatgttagcatgaatcaattgagtaaactttcaaaacgtgatctagttgtgggcttgaaagatgtgaagtttgagaaagataagctttgtagtgcttgtcaagccggcaagcaagttgcatgttctcatcctactaagagtatcatgtccacatctagaccattggagcttttgcatatggatttgtttggcccaacaacctataagagcattggtgtggagaggaaaaatcgtacattgattgagatggcaaggactatgcttgatgaatatggtgtttccgattccttttgggcggaagccataaacaccgcttgctatgcaaccaataggctttatttgcatcatctcttgaaaaagacttcctatgagctaattgttgggaggaagccaaatgttgcctattttcgagtttttggttgcaagtgttatatttatcgaaagggtgttagactaaccaaatttgcaagtcggtgtgatgaagggtttcttctaggttatgcctcaaatagtaaggcataccgggtctacaacaagaacaaaggtattgtggaagaaaccgccaatgttcattttgatgagactaatggctcccaagaggggcacgagaatttggatgatgtaggtgatgaaggcttgatgagagctatgaagaacatgtctattagagatgtcaagcctattaaagtggaagacaaaccatccaccttcactcaagatgagccatctacttccgctacgccaagtcaagctcaagttgaagtggaggaggagaaggcacaagatccacctatgccacaaaggatacacaccgctctttccaaggatcacccaattgaccaagtgttgggtgacattagtaagggtgttcaaactcgatctcgtgtcgcttcgatttgtgaatattactcgtttgtttcttgccttgagccaaaacatgtagatgaagctctttgtgattcggattggataaatgctatgcatgaagagctcaacaactttgcaagaaacaaggtgtggacattggttaaaagacctagagatcacaatgtcatagggagaaagtgggtctttaggaacaaacaagatgagaacgggttggtggtgtgaaacaatgcaaggttggtggcacaaggtttcacacaagttgaaggtttggacttcggtgaaacttttgcccccgtggcaagacttgaggctattcgcatccttcttgcatttgcatcatgctttgatataaaactatttcaaatggatgtgaaaagtgcttttctaaatggtgaaattgccgaacttgtctttgttgaacaacctcccggttttgaagatcctaaaaatcctaaccatgtttataaactctcaaaagctctttatggtttaaaacaagctcctagggcttggtatgaaagattgaaagattttcttttgtcaaaggatttcaaaattggaaaagttgacaccacccttttcacaaaaatcattggtgatgatttctttgtgtgtcaaatttatgttgatgacatcatatttggttttactaatgaggtattttgcaagtaatttggtgatttgatgtctaggggatttgagatgtccatgattggagagttgagcttcttccttggacttcaaatcaagcaactcaaggatgggacgttcgtgagccaaaccaagtacatcaaggatctactcaagaggtttggcttggaggatgcgaaacccatcaagacacctatggcaaccaacgggcatctcgaccttgatgagggaggtaaaccggtagatttaaagctttatcgttccatgattggtagcttgctttaccttaccgcatctaggccggatatcatgtttagtgtttgcatgtgtgcacggtttcaagccgctcctaaggagtgtcacttagtggccgtgaaaaggattctaagatatttaaagcatttctctactattggcttgtggtacccaaaaggtgctaaatttaagcttgttggctattccgactcggattatgccggttgcaaagtggatagaaagagcacatccgttagttgccaaatgcttggtatatcccttgtgtcatggtcatccaagaaacaaaactccgttgccctctctaccgccgaggcggaatatgtttcggcggaaactagattcttagttttggccaaaatgagatttatccccaaaatgagattgagaaggaatttgagaaaattttcaaaacaaagttgggggcctggcagtctgaccggcgctatatgcgcggtctgaccggccaggtgcggcggtctgaccggccacatagggccggtctgaccggccgaggtgggcccatgatgcctccccgcactcgccatggttgtcgtgcgcccactctggatcccatgagtgagcctgaggaatcgagcggagaggattacgctcaaagtgatgaagaggttgaggccaatgttgagggggctagtgaggaggcaagtggagatgatgtcagtggaagtggagaggatgaggatgaacaaagtgatgagatgaacattgatccctccatccagtttgtggtgaacatgaggaatccatcgcagtataccatcttaaggcatcatgatcagttcttgaggcctcgggacaccccggatccccattttcacaccgctttccagaagatgtgggtggctggagactagagtgagatgaagtggatgtccgacaccctccagtgttctatctctcgaaggcaattccggcagctcctcaacattcgcttggactttggagatgatttgcatgaggagcacactcacaatccgctctccatagactatctctctcagttctatgaagatggagtgcggtacacacatgggaaggttgccggcttgaggactatccccagtgtggttaaaaggattatgagagccactatcctccctcgccttggcaacaatgatgacattaggggggtggcttggcacgtcatcgatgcaatcattcagggccgtcagttcgacattgtgtctctcatgatgcaagagattgctatcttcaagaggacattcactcagggaatctattatgccccttacatcatgaggttgattcaagacaagcttggggctgctgggcaaaatttgaagaagcacaagcagtacaagccccgccttcagcctagagctccccgtgctcctaggacggtgccctcttctcaccctggagctagctcaagcccagcacctcctcctcctcatgggtatgatccaaatgcttctttcatcctcactatgcttactttggaatgcaacccaatgaatacttcaacccggtacttggggctattaataccttaagtgaaagcattcaacgcttgtctaccaggcatgaagcattgcatgaggatgttcgtggcttgcgcaccgatgttggagacttgaatgcttccatggggagattgcacactagagtgggtgcattggattctcgagtccaaatgttggagagcacccaagcttttgtatatcatcgtcgtcgtgatactcctaatccttcctctttggcgcttcctccttctcctccacaa

SEQ ID NO: 13956 - DNA, 4884 bp, Oryza sativa
  Clone ID: TFbOSC400718j.C1.o73.fg
atgtcgaacgaggtgaaccatgtagggaaggctcccatgttcaatggcacaaactactccacttggaaaattaaaatgtctactcacctcaaagctatgagcttccatatttggagtattgtggatgtaggctttgctatcaccggcacacccttgacggagattgatcactgcaacctccaactcaatgcccaagccatgaatgctttgttcaactccttcagccaagaggagttcgatagagtgagcaaccttgagaccgcatatgagatttggaacaagttggcggagatccatgagggtacaagtgagtacaaggatgccaagcttcatttcctcaagatccaatatgagacattctccatgttgcctcatgagagcgtgaatgacatgtatgggaggctcaatgtcattgtgaatgatctcaaggggcttggggcaacctacaccgatcttgaggttgcccaaaagatgcttagggctctaccgaagaagtatgagacccttgtcaccatgctcatcaactccgacatgtcaaggatgacacccgcaagcctcttggggaagatcaacaccaatgacatgtacaagttgaagaagaaggagatggaggaagcctcaccatccaagaagtgcattgctctccaagccgaagttgaagacaagggcaagagcaaggtgaatgaagccaatgatgacttgaaggaagagattgcccttcttgctagaaggttcaatgatctcttgggaagaagaaaggagagagtaagaggctccaactccaataggagaagaaataggagacccaacaagactctctccaacttgaggtgctttgagtgtggtgagaagggacactttgcttccaagtgcccttccaaggatgatgatggagacaagtcatccaagaagaagagtggaggctacaagctcatgaagaagctcaagaaggaagggaagaagattgaggccttcatcggagaatgggactcaaatgaggagagctccgcctcatctgggtccgaggaagaaggtggtgatgatgcaagctccaagaagaagaagatggctgttgttgtcatcaaggaggctccaacactcttcgctccactttgtctcatggcaaagggctcttctaaggtaacatctcttagtgatagtgagagtgatgatgattgtgatgatgtttcctatgatgagcttgtgagtatgtttgaggagctccatgcttatagtgagaaggagattgttaagttcaaggccctaaaaatggatcatgcttctttggaggtcttgtatgaggagctaaagacctctcatgagagactcaccatttctcataagaagcttaactctagctctagctcttgtgtttcaatttgtgatgcctcacttgttgttgagaacaacgagcttaaggagcaagtggctaagctcaacaagagtttggagagatgcttcaacggcaagaacactcttgacaagattttgagtgagcaacggtgcatccttaacaaggagggacttggattcattccaaagaagagtaagaaaccttctcaccgtgccactcgttttgtcaagagcaacggtaagcattgctccaagtattgtgaggttgggcatttggtgaactaccgcaccggtgggagccattgggtgcttgatactggatgtcacgcccagaaattcactagctgtgacaatggatgcactcaacacacgaccggtgatagggctatgttcaccacatttgaagtaggagggaaagaacaagagaaagtgacatttggagacaatagcaaaggaaaggtaattggattagttgcaaaaacttcattgggttggctttggcataggaggctagcccatgttggcatgaatcaattgagcaaactttcaaaacgtgatctagttgttggcttgaaagatgtgaagtttgagaaggataagctttgtagtgcttgtcaagccggcaagcaagttgcatgttctcatcctactaagagtatcatgtctacacctagaccaatggagctcttgcatatagatttgtttggcccaacaacctataagagcattggtggtaatagtcattgtcttgtgattattgatgattattctcgctatacttgggtgttctttttgcatgataagtctattgttgccgagcttttcaaaaagtttgcaaacagggcccaaaatgaatttagttgcactcttgtgaaaattagaagtgacaatggttccgagtttaagaataccaatatcgaggactattgtgatgatcttggtattaaacacgaactttccgctacctactcaccacaacaaaatggtgtagtggagaggaaaaatcgtacattgattgagatggcaaggactatgcttgatgaatatggttatgcctcaaatagcaaggcataccgggtctacaacaagaacaaaggtattgtggaagaaaccgccgacgttcaatttaatgagactaatggctcccaagaggggcacgagaatctggatgatgtaggtgacgaaggcttgatgagagctatgaagaacatgtctattggagatgtcaagcctattgaagtggaagacaagccatccacctccactcaagatgagccatctacttccgcttcgccaagtcaacctcaagttgaagtggaggaggagaaggcacaagattcacctatgccaccaaggatacacaccgttctttccaagcatcacccaattgaccagtttttgggtgacattagtaagggtgttcaaactcgatctcgtgtcgcttcgatttgtgaacattactcatttgtttcttgtcttgagccaaaacatgtagatgaagctctttgtgatccggattggatgaatgctatgcatgaagagctcaacaactttgcaagaaataaggtgtggaccttggttgaaagacctagagaccacaatgtcatagggacaaagtgggtctttaggaacaaacaagatgagattgggttggtggtgagaaacaagccaaggttggtggcacaaggtttcacacaagatgaaggtttggacttcggtgaaacttttgcccccgtggcaagacttgaggctattcgcatccttcttgcatttgcatcatgctttgatataaaactatttcaaatggatgtgaaaagtgcttttctaaatggtgaaattgccgaacttgtctttgttgaacaacctctcggttttgaagatccaaaaaatcctaaccatgtttataaactctcaaaagctctttatggtttaaaacaagctcctagagcttggtatgaaagattgagagattttcttttgtcaaagtatttcaaaattggaaaagttgacaccacccttttcacaaaaatcattggtgatgatttctttgtgtgtcaaatttatgttgatgatatcatattcggttcaactaatgaggtattttgcaaggaatttggtaatatgatgtctagggaatttgagatgtccatgattggagagttgagcttcttccttggagttcaaatcaagcaactcaaggatgggacgttcgtgagccaaaccaagtacatcaaggatctactcaagaggtttggcttggaggatgcgaagtccatcaagacacctatagcaaccaacggccatctcgaccttgatgagggaggtaaaccggtagatttaaagctttatcgttccatgattggtagcttacttttccttaccgcatctaggccggatatcatatttagtgtttgcatgtgtgcacgatttcaagccgctccaaaggagtgtcacttagtggccgtgaaaaggattctaagatatttaaagcattcctcaactattggcttgtggtacccaaaaggtgaagcacgaggtgttcttcgttttgcaccaatagagggtagtttcttgctatgcctccccgcactcgtcatggtcgtcgtgagcccacgccggagccaagtgcgcatgaggaatcaagcggataggagtatgctcaaaggggatgaggtggaagtaagtggtgatgacactggcagtggcgatggtgaggatgatgaggcaagtgatgatgggagtcctctcgatcccaccatccaatttgtgctcaatttaaggaatgcccagcaatacactatcctccgtcatcacgatcaattccggaggcctaatgattgtaatgattcaaggttccatacacggtatcaaaaggccgtgtatgagcaagtatacgcaaacaaagccttcaccgaacacaagtggatttcttggaggcacattggtgagacaccggagtttgtggatttgcaggggttgttcaaggccgttggcattgataggattatcaccatgaagcaaccctttgatgaagacctcatctggcaattctatgccaccttttatgaagaaggggggaggcacacctatggaaaggtggcgggtttgagggtcatccctagtgtgatcaaccgcatagtgaaggccaccattctcccaagatgtggcaacaatgatgacattcgcggcgttgcatggcatgtcattgatgccatcatggatggtcgtcggtttcatttcatcaaccttatgatgaaggagatagccatttccaaggggacaattggacaaggaatttactatgctccctacataatgaggttgattcaaagcaagttgggacaagttggtaacaacttaaaagaacacaaggagtacaagcctcgtctccaactctccactcctagagctcctcgtgtgcgccaaccaacatttgatcaaggcgcaagctcaagtgcaaccccgcctcctcctcatgggtatgataccaatgctttcttccatccacaatatgcttactttggaatgtaa

SEQ ID NO: 13957 - DNA, 5304 bp, Oryza sativa
  Clone ID: TFbOSC401716j.C1.o99.fg
atgtcgaacgaggtgaaccatgtagggaaggcttccatgtttaatggcacaaactactccacttggaaaattaaaatgtctactcacctcaaagctatgagcttccatatttggagtattgtggatgtaggctttgatatcaccggcacacccttgacggagagtgatcaccgtaacctccaactcaatgcccaagccatgaatgccttgttcaactctttgagccaagaggagttcgatagagtgagcaaccttgagaccgcatatgagatttggaacaagttggcggagatccatgagggtacaagtgagtacaaggatgccaagcttcatttcctcaagatccaatatgagacattctccatgttgcctcatgagagtgtgaatgacatgtatgggaggctcaatgtcattgtgaatgatctcaaggggcttggggcaaactacaccgatcttgaggttgcccaaaagatgcttagagccctaccggagaagtatgagacccttgtcaccatgctcatcaactccgacatgtcaagaatgacacccgcaagcctcttggggaagatcaacaccaatgacatgtacaagttgaagaaggagatggaggaagcctcaccctccaagaagtgcgttgctctccaagccaaagttgaagacaagagcaagagcaaggtgaatgaagtcaatgaggacttgagaaaggagagaggaaggggctccaactcaaataggagaagaaatagaagacccaacaagactctctccaacttgaggtgttttgagtgtggtgagaagggacactttgcttccaagtgcccttccaaggatgatgatggagacaagtcatccaagaagaagactggaggctacaagctcatgaagaagcttaagaaggaagggaagaagattgaggctttcatcggggaatgggactcaaatgaggagagctccgtctcatccgggtccgaggaagaaggtggtgatgatgcaagctccaagaagaagaagatggccgttgttcccatcaaggaggctccatcactcttcgctccactttgtctcatggcaaagggctcctctaaggtaacatcccttagtgatagtgagagtgatgatgattgtgatgatgtttcctatgatgagcttgtgagtatgtttgaggagctccatgcttatagtgagaaggagattgtcaagttcaaggccctaaagaaggatcatgtttctttggaggtcttgtatgaggagttaaagacctctcatgagagactcaccatttctcatgagaagcttaaggaagctcatgacaacctcctttccactactcaacatggagctcacattgatgttggcatatcttgtgatttgcttgatgatagtgctacttgccatattgctcatattgcatcatctagcatttctacctcttgggatgatcttatggatatgcctagccctagctctagctctagctcttgtgtttctatttgtgatgcctcacttattgttgagaacaatgagcttaaggagcaagtggctaagctcaacaagagtttggagagatgcttcaagggtaagaacactcttgacaagattttgagtgagcaacggtgcatccttaacaaggagggacttggattcactccaaagaagggtaagaaaccttctcaccatgccactcgttttgtcaagagcaatggtaagtattgctccaagtgttgtgaggttgggcatttggtgaactaccgcaccggtgggagccattgggtgcttgatagtggatacactcaacacatgaccggtgatagggctatgttcaccacatttgaagtaggagagaatgaacaagagaaagtgacatttggagacaatagcaaaggaaaggtaattgggttaggtaaaattgttatctccaatgatttgtcaaatgaaaatgtctctcttgttaaatctctaaattttaatttgctttcggttgctcaaatttgtgatcttggcttgtcatgtgccttcttcccacaagaagttattgtttctagccttcttgacaagtcttgtgtgttcaaaggttttagatatggaaatctttatttggttgatttcaattctagtgaagcaaatttgaaaacttgtttagttgcaaaaacttcattgggttggctttggcataggaggctagctcatgttggcatgaatcaattgagcaaactttcaaaacgtgatctagttgtgggcttgaaagatctgaagtttgagaaagataagctttgtagtgcttgtcaagccggcaagcaagttgcaggttctcattctactaagagtatcatgtccacatctagaccattggagctcttgcatatgaatttgtttggcccaacaacctataagagcattggtggtaatagtcattgtcttgtgattgttgatgattattctcgctatacttgggtgttctttttgcatgataagtctattgttgccgagtttttcaaaaagtttgcaaaaagggcccaaaatgaatttagttgcactcttgtgaaaattagaagtgacaatggttccgaatttaagaataccaatatcgaggactattgtgatgatcttcatatcaaacacgaactttccgctacctactcacctcaacaaaatggtgtagtggaaaggaaaaatcgtacattgattgagatggcaagaactatgctagatgaatatggtgtttccgattctttttgggcggaagccataaacaccgcttgccatgcaaccaatagactttatttgcatcgtctcttgaaaaagactttctatgagctaattgttgggaggaagccaaatgtcgcctattttcgagtttttggttgcaagtgttatatttaccgaaatggtgttagactaaccaaatttgaaagtcggtgtgatgaagggtttcttctaggttatgcctcaaatagcaaggcataccgggtctacaacaagaacaaaggtattgtggaagaaaccgccgatgttcaatttgatgagactaatggctcccaagaggggcacgagaatttggatgttgtaggtgatgaaggcttgatgagagctatgaagaacatgtctattagagatgtcaagtctattgaagtggaagacaagccatccacctccactcaagatgagccatctacttccgcttcgccaagtcaagctcaagttgaagtggaggaggagaaggcacaagatccacctatgcctccaagaatacacaccgctctttccaaggatcacccaattgaccaagtgttgggtgacattagtaagggtgttcaaactcgatctcgtgtcgcttcgatttgtgaacattactcgtttgtttcttgtcttgagccaaaacatgtagatgaagctctttgtgatccggattggatgaatgctatgcatgaagagctcaacaactttgcaagaaacaaggtgtggactttggttgaaagacctagagaccacaatgtcatagggacaaagtggatatttaggaacaaagtggattggtgggaatttgagatgtccatgattggagagttgagcttcttccttggacttcaaatcaagcaactcaaggatgggacgttcgtgagccaaaccaagtacatcaaggatctactcaagaggtttggtttggaggatgcgaagcccatcaagacacctatggcaaccaacggacatctcgaccttgatgagggagattatgccggttgcaaagtggatagaaagagcacatccggtagttgccaaatgcttggtagatcccttgtgtcatggtcatccaagaaacaaaactccgtagccctctctaccgccgaggcggaatatgtttcggcgggtagttgttgtgcccaattgctttggatgaaacaaaccttgttggactatggcatatccttcaccaaaaccccactcctatgtgacaatgatagtgccataaaaatagccaataacccggtccaacattctagaaccaagcatattgacattcgccatcacttcctaagagaccatgttgccaagtgtgacatagtcattagccacataagaaccgaggaccaactagccgacatctttaccaagcctcttgatgaaacccgcttttccatgcctccccgcactcgccatggtcgtcgtgagcccacgcccgatcccgtcagtgagaatgaggaatcaagcggagatgagtatgttcaaagtgatgatgacaatatggaaaatgttgagggtgatgagatggaagtaagtgatgatggtgatgacaatgggagtggaaatggtgaagatgatgaggcaagtgatgatgggagtcctctcgattcctccatccaatttgtgcttaatttgaggaatgctcaacaatacactatcctccgtcatcatgatcaattccggaggcctaacgattgtaatgatccaagatttcatacacggttccaaaagtccgtgtatgcacaagtgtatgccaacaaagccttcgccgagcacaagtggatttcttggaggcacattggtgagacaccggagtttgagaatttgcaagagatgttccggaccgttgggattgatagaattgtcaccatgaagcaaccttttgatgaagatctcatccggcaattctatgccaccgtatgggtgtccggcgattgtgatgcaatgaagtggatgtcggggaccctccgatgctctatcaaccgccatgaattcaaggagctcttgcacattcgcttcaacaacggggatgaccttcatgatgagcacacccacaaccccttccccattgatcacttttctcagttttatgaagaagggagaaggcacacatatggcaaggtggcgggtttgagggctctcccaagtgtgatcaaccgcatagtaagggccaccatcctcccaagaggcggcaacaatgatgacatacgcggagttgcttggcatgttattgatgccattatggatggtcgtcggtttgatgttatcaaccttatgatgaaggagattgccatctcaaaggggactcttggacaaggaatctattatgctccctacataatgaggttgattcaaagcaagttgggacaaattggtcacaatttaaaagaacataaggagtacaagcctcgtctcaaactctcctcccctagagctcctcgtgtgcgccaaccaacattcgatcaaggtgcaagctcaagtgcagcccccctcctcctcaagggtatgatccaagtgtttttttttccatccacaatatgcctactttggaatgcaacccaatga

SEQ ID NO: 13958 - DNA, 4428 bp, Oryza sativa
  Clone ID: TFbOSC405965j.C1.o6.fg
atgtcgaacgaggtgaaccatgtagggaaggctcccatgtttaatggcacaaactactccacttggaaaattaaaatgtctactcacctcaaagctatgagcttctatatttggagtattgtggatgtaggctttgctatcaccggcacacccttgacggagattgatcaccgcaacctccaactcaatgcccaagccatgaatgccttgttcaactctttgagccaagaggagttcgatagagtgagcaaccttgagaccgcatatgagatttggaacaagttggcggagatccatgagggtacaagtgagtacaaggatgccaagcttcattttctcaagatccaatatgagacattctccatgttgcctcatgagagtgtgaatgacatgtatgggaggctcaatgtcattgtgaatgatctcaaggggcttggggcaaactacaccgatcttgaggttgcccaaaagatgcttagagccctatcagagaagtatgagacccttgtcaccatgctcatcaactccgacatgtcaagaatgacacccgcaagcctcttggggaagatcaacaccaatgacatgtacaagttgaagaagaaggagatgaaggaagcctcaccctccaagaagtgcattgctctccaagccgaagttgaagacaagagcaagagcaaggtgaatgaagtcaatgaggacttggaggaagagatggtccttcttgctagaaagttcaatgatctcttgggaaggagaaaggagagaggaaggggctccaactcaaataggagaagaaatagaagacccaacaagactctctccaacttaaggtgttttgagtgtggtgagaagggacactttgcttccaagtgcccttccaaggatgatgatggagacaagtcatccaagaagaagagtggaggctacaagctcatgaagaagcttaagaaggaagggaagaagattgaggctttcatcggggaatgggactcaaatgaggagagctccgcctcatccgggttcgaggaacaatgtagtgatgatgcaagctccaagaagaagaagatggctgttgttgccatcaaggaggctccatcactcttcgctccactttgtctcatggcaaagggctcctctaaagtaacatcccttagtgatagtgagagtgatgatgattgtgatgatgtttcctatgatgagcttgtgagtatgtttgaggagctccatgcttatagtgagaaggagattgtcaagttcaaggccctaaagaaggatcatgcttctttggaggtcttgtatgaggagttaaagacctctcatgagagactcaccatttctcatgagaagcttaaggaagctcatgacaacctcctttccactactcaacatggagctcacattgatattggcatatcttgtaatttgcttgatgatagtgctacttgccatattgctcatgttgcatcatctagcatttctacctcttgtgatgatcttatggatatgcctagccctagctctagctctagctcttgtgtttctatttgtgatgcctcacttattgttgagaacaatgagcttaagagggacttagattcattccaaagaagggtaagaaaccttctcaccatgccactcgttttgtcaagagcaatggtgaactaccgcaccggtgggagccattgggtgcttgatagtggatgcactcaacacatgaccggtgatagggctatgttcaccatatttgaagtaggagggcatgaacaagagaaagtgacatttggagacaatagcaaaggaaagcttttcaaaaagtttgcaaaaagggcccaaaatgaatttagttgcactcttgtgaaaattagaagtgacaatggttccgaatttaagaataccaatatcgaggactattgtgatgatcttggtatcaaacacgaactttccgctacctactcacctcaacaaaatggtgtagtggaaaggctttatttgcatcgtctcttgaaaaagacttcctatgagctaattgttgggaggaagccaaatgttgcctattttcgagtttttggttgcaagtgttatatttaccgaaagggtgttagactaaccaaatttgaaagtcggtgtgatgaagggtttcttctaggttatgcctcaaatagcaaggcataccgggtctacaacaagaacaaaggtattgtggaagaaaccgccgatgttcaatttgatgagactaatggctcccaagaggggcacgagaatttggatgatgtaggtgatgaaggcttgatgagagctatgaagaacatgcctattggagatgtcaagcctattgaagtggaagacaagtcatccacctccactcaagatgagccatctacttccgcttcgccaagtcaagctcaagttgaagtggaggaggagaaggcacaagatccacctatgcctccaagaatacacaccgctctttccaaggatcactcaattgaccaagtgttgggtgacattaatgaagctctttgtaatccggattggatgaatgctatgcatgaagagctcaacaactttgcaagaaacaaggtgtggactttggttgaaagacctagagaccacaatgtcatagggacaaagtggatctttaggaacaaacaagatgagaacggattggtggtgagaaacaaggcaaggttggtggcgcaaggtttcacacaagttgaaggtttggactttggtgaaacttttgcccccgtggcaagacttgaggctattcgcattcttcttgcatttacatcatgctttgatataaaactatttcaaatggatgtgaaaagtgcttttctaaatggtgaaattgccgaacttgtctttgttgaacaacctcccggttttgaagatcctaaaaatcctaaccatgtttacaaactctcaaaagctctttatggtttaaaacaagctcctagggcttggtatgaaatattgagagattttcttttgtcaaaggatttcaaaattggaaaagttgacaccactcttttcacaaaaatcattggtgatgatttctttgtgtgtcaaatttatgttgatgacatcatattcggttctactaatgaggtattttgcaaggaatttggtgatatgatgtctagggaatttgagatgtccatgattggagagttgagcttcttccttggacttcaaatcaagcaactcaaggatgggacgttcgtgagccaaaccaagtacatcaaggatctactcaagaggtttggcttggaagatgcgaagcccatcaagacacctatggcaaccaacgggcatcttgaccttgatgagggagctatgcctccccgtactcgccatagtcgtcgtgagcccacgcccgatcccgtcagtgagaatgaggattcaagcggagatgagtatgttcaaagtgatgatgacaatatggaaaatgttgagggtgatgagatagaatccgtgtatgcacaagtgtatgccaacaaagccttcgccgaacacaagtggatttcttggaggcacattggtgagacaccggagtttgagaatttgcaagagatgttccagaccgttgggattgatagaattgtcaccatgaagcaaccttttgatgaagatctcatccagcaattctatgccaccgtatgggtgtccggcaattgtgatgcaatgaagtggatgtcggggagcctccgatgctctatcaaccgccgtgaattcaaggagctcttgcacattcgcttcaacaacggggatgaccttcatgatgagcacacccacaaccccttccccattgatcacttttctcagttttatgaagaagggggaaggcacacattggaaaggtggcgggagattgccatctcaaagggaactattggacaaggaatctattatgctccctacataatgaggttgattcaaagcaagttgggacaaattggtcacaatttaaaagaacataaggagtacaagcctcgtctccaactctcctcccctagagctcctcgtgtgcgccaaccaacttttgatcaaggtgcaagctcaagtgtagtccctcctcctcctcctcatgggtatgatccaagtgcgtttttccatccacaatatgcttactttggaatgcaacccaacgagtacttcaacccggtacttggggctattaataccctaagtgaaagcattcaacgcttatccaccgggcatgaagcattacatgaggatgttcgtggcttgcgcaccgatgttggcaacttaaatacttcggtgggaagattgcatgctagggtgggtgtattggattctcgagtccaaaccttggagagtacccaagcttttgtctatcatcgccgccatgatgcttctcatccttccacttcggcgcgtcctccttctcctccacaagagtga

SEQ ID NO: 13959 - DNA, 1728 bp, Oryza sativa
  Clone ID: TFbOSC408741j.C1.o7.gm
atggggccctctgacaaggctacaacggctagttttatagccgttgcagagtaccacggtctaaccggccacacacctccgatccaatatgagatattctccttgttgcttcatgagagtgtgaatgacatgtatgggaggctcaatgtcattgtgaatgatctaaaggggcttggggaaatctacaccgaccttgaggttgctcaaaagatgcttagagctctaacggagaagtatgagaccctagtcaccatgctcatcaactccgacatgtcaaggatgacacccgcaagactcttggggaagatcaacaccaatgacatatacaagttgaagaagaaggagatggaggaagcctcaccatccaagaagtgcattgctctccaagccgaagttgaagacaagggggaagagcaagaaaggagaggaaggggctccaactcaaatagaagaagaaatagaagacccaataagattctctccaacttgagatgctttgagtgtggtgagaagggacactttgcatccaagtgcccttccaaggatgataatggagacaagtcatccaagaagaagagtgggggctacaagcttatgaagaagctcaagaaggaagggaagaagattgaggccttcattgggcagtgggactcaaatgaggagagctccgcctcatccgggtccgaagaagaaggtgatgatgatgcaaactctaagaagaagaagatggccgtggttgctatcaaggaggctccatcactctttgctccactttgtcttatggcaaagggctcttttaaggtaacatctcttactgatggtgagagtgatgatgattgtgatgatatttcctatgatgagtttgttagtatgtttgaggatctcaatacttatagtgagaaggagattgtcaagtttaaggccctaaagaaggatcatgcttctttggaagtcttgtatgaggagctaaagacctctcgtgagagactcaccatttctcatgagaagcttaaggaagctcatgacaacctcctttccactactcaacatggagctcacattgatgttgacatatcttgtgacttgcttgatgatagtgcttcttgtcatattccccatgttgcatcatctagcatttctaccgcttgtgatgatgtcacgcccggaatttctatccaaaattccaaacgcttacatcggctagggttcgcggtggaccgggtggacggcggcggttcacgagattggacggccgagatccatccatcaaaaacggacgaccaagatccatcggtccacgaccgggccacggggaacgacgacgatgacatcacctccggcggcggctcgggcgtgcatgcttgccggcgaacgacggcgcgacgacgcgaacggagggcacctacgggtagcggacggcacagcgaactcaccggtgaccaaaacggcggcggaagatcaacggacggcgacggcgtcgaggaaaaggcggcggcactcttcggcttgacgacggcgacggtgctccggcggttgacagcaacgatggaggggcggacgaggacggcgacgcgacggcgaccacgacggcggtcttcccgagcgacggcgacgactagagcgacggcggcgcacagctggagcgacggcgacgacggcggcgcgaggtctcacggggctagggcgctacggacgacggcgggcaaaggcgagggtggagatgggtag

SEQ ID NO: 13960 - DNA, 4620 bp, Oryza sativa
  Clone ID: TFbOSC413734j.C1.o11.fg
atgtcgaacgaggtgaaccacgtagggaaggctcccatgtttaatggcacaaactattccacttggaaaattaaaatgtctactcacctcaaagctatgagcttccatatttggagtattgtggatgtaggctttgcaatcaccggcacgcccttgacggagattgatcaccgcaacctccaactcaatgcccaagccatgaatgctttgttcaactctttgagccaagaagagtttgatagagtgagcaaccttgagaccgcatatgagatttggaacaagttggcgaagatccatgagggcacaagtgagtacaaggatgccaagcttcacttcctcaagatccaatatgagacattctccatgttgcctcatgagagtgtgaatgacatgtatgggaggctcaatgtcattgtgaatgatctcaaggggcttggggcaaactacaccgatcttgaggttgccaaaaagatgcttagggctctaccggagaagtatgagacccttgtcaccatgctcatcaactctgacatgtcaaggatgacaccggcaagcctcttggggaagatcaacaccaatgacatgtataagttgaagaagaaggaaatggaggaagcctcaccttccaagaagtgcattgctctccaagctgaagttgaagacaagggcaaggtgaatgacgtcaataagaacttggaagaagagattgcacttcttgctagaaggttcaatgatttcttgggaaggagaaaggagagaggaaagggctccaactcaaataggagaagaaataaaagacccaataagactctctccaacttgaggtgctttgagtgtggtgagaagggacactttgcttccaagtgcccttccaaggatgatgatggagacaagtcatcaaaaaaaaagagtggaggctacaagcttatgaagaagctcaagaaggaaggcaagaagattgaggccttcatcggggaatgggactcaaatgaggagagctccgcctcttccgggtccaaggaagaagatggtgatgatgcaagctccaagaagaagaagatggccgttgttgccatcaaggaggccccatcactcttcgctccactttgtctcatggcaaagggctcctctaaggtaacatctcttagtgatagtgagagtgatgatgattgtgatgatatttcctatgatgagcttgtgagtatgtttgaggagctccatgcttatagtgagaaggagattgtcaagttcaaggccctaaagaaggatcatgcttctttggaggttttgtatgaggagctaaagacttctcatgagagactcaccatttctcatgagaagcttaaggaagctcatgacaacctcctttccactactcaacatggagctctcattgatgttggcatatcttgtgatttgcttgatgatactctagctctagctcttgtgtatctatttgtgatgcctcacttgttgttgagaacaatgagcttaagtagcaagtggctaagctcaacaagagcttggagaggtgcttcaagggtgaactaccacaccggtgggagccattgggtgcttgatagtggatgcactcaacacatgaccggtgatagggctatgttcactacatttgaagtaggagggaatgaacaagagaaagtgacatttgtagacaatagcaaaagaaaggtaattgggttaggtaaaattgctatctccaatgatttgtcaattgataatgtctcttttgttaaatctctaaatttcaatttgctttcggttgctcaaatttgtgatcttggcttgtcatgtgctttcttcccgcaagaagttattgtttctagccttcttgacaagtcttgtgtgttcaaaggttttagatatggaaatctttactttgttgatttcaattctagtgaagcaaatttgaaaacttgtttagttgcaaaaacttctttgggttggctttggcatagaaggctagcccatgttggcatgaatcaattgagcaaactttcaaaacgtgatctagttgtgggcttgaaagatgtgaagtttgagaaagataagctttgtagtgcttgtcaagccggcaagcaagttgcatgttctcatcctactaagagtatcatgtccacatctagaccattagagctcttgcatatggatttgtttggcccaacaacctataagagcattggtggtaatagtcattgtcttgtgattgttgatgattattctcgctatacttgggtgttctttttgcatgataagtctattgttgccgagcttttcaaaaaaattgcaaaaagggcccaaaatgaatttagttgcactcttgtgaaaattagaagtgacaatggttccgagtttaagaataccaatatcgaggactattgtgatgatcttggtattaaacatgaactttccgctacctactcacctcaacaaaatggtgtagtggagaggaaaaatcgtacattgattgagatggcaaggactatgcttgatgaatatggtgtttccgattccttttgggcggaagccataaacaccgcttgccatgcaaccaataggttttatttgcatcgtctcttgaaaaatacttcctatgagctaattgttgggaggaagcctaatgttgcctattttcgagtttttggttgcaagtgttatatttaccgaaagggtgttagactaaccaaatttgaaagtcggtgtgatgaagggtttcttcttggttatgcctcaaatagcaaggcataccgggtctacaacaagaacaaaggtactgtggaagaaaccgccgatgttcaatttgatgagactaatggctcccaagaggggcacgagaatttggatgatgtaggtgatgaaggcttgataagagctatgaagaacatgtcatttggagatgtcaagcctattgaagtggaagacaagccatccacctccactcaagatgagccatctactttcgctacgccaagtcaagctcaagttgaagtggaggaggagaaggcacaagatccacctataccaccaaggatacacaccactctttccaaggatcacccaattgaccaagtgttgggtgacattagtaagggtgttcaaactctatctcgtgtcgcttcgatttgtgaacattactcgtttgtttcttgtcttgagccaaaacatgtagatgaagctctttgtgatccggattggatgaatgctatgcatgaagagctcaacaactttgcaagaaacaaggtgtggactttggttgaaagacctagagaccacaatgtcatagggacaaagtgggtctttagaaacaaacaagatgagaacgggttggtggtgagaaacaaggcaaggttggtggcacaaggtttcacacaagttgaaggtttggattttggtgaaacttttgcccccgtggcaagacttgaggctatttgcatccttcttgcatttgcatcatggtttgatataaaactatttcaaatggatgtgaaaagtgcttttctaaatggtgaaattgccgaacttgtctttgttgaacaacctcccggttttgaagatcctaaatatcctaaccatgatttcaaaattggaaaagttgacaccactcttttcacaaaaatcattggtgatgatttctttgtatgccaaatttatgttgatgacatcatattcggttctactaatgaggtattttgcaaggaatttggtgatatgatgtctagggaatttgagatgtccatgattggagagttgagctttttccttggacttcaaatcaagcaactcaaggatgggacgttcgtgagtcaaaccaagtacatcaaagatctactcaagaggtttggcttggaggatgcgaagcccatcaagacacctatggcaaccaacgggcatctcgaccttgatgagggaggtaaaccggtagatttaaagctttatcgttctatgattggtagcttgctttaccttaccgcatctaggccggatatcatgtttagtgtttgtatgtgtgcatggtttcaagccgctcctaaggagtgtcacttagtggccgtgaaaaggattctaagatatttaaagtattcctctactattggcttgtggtacccaaaaggtgctaaatttaagcttgttggctattccgattcggattatgccggttgcaaagtggatagaaatagtacatccggtagttgccaaatgcttggtagatcccttgtgtcatggtcatcgaagaaacaaaactccgtagccctctctaccgccgaggcggaatatgtttcggcgggtagttgttgtgcccaattgctttggatgaaacaaacattgttggactatggcatatccttcaccaaaaccccactcctatgtgacaatgatagtgccataaagatagccaataacccggtccaacattctagaaccaagcatattgacatacgccatcacttcctaagagaccatgttgccaagtgtgacatagtcattagccacataagaaccgaggatcaactagccgacatctttaccaagcctcttgatgaaacccgcttttgcaagttgaggaatgagttaaatgtcatagacttctctaatgtggcttga

SEQ ID NO: 13961 - DNA, 1440 bp, Oryza sativa
  Clone ID: TFbOSC415632j.C1.o3.gm
atgttgcctcatgagagtgtgaatgacatgtatgggaggctcaatgtcattgtgaatggtctcaaggggtttggggcaaactacaccgatcttgaggttgcccaaaagatgcttagggctctaccggagaaatatgagacccttgtcaccatgctcatcaactccgatatgtcaaggatgacacccgcaagcctcttggggaagatcaacaccaatgacatgtacaagttgaagaagaaggagatggaggaagcctcaccttccaagaagtgcattgctctccaagccgaagttgaagataagggcaagggcaaggtgaatgaagtcaatgaggacttggaggaagagatttcccttcttgctagaaggttcaatgatctcttgggaaggagaaaggagagagaaagtggctccaactcaaataggagaagaaatagaagacccaacaagactctctccaacttgaggtgctttgagtgtggtgagaagggacactttgcttccaagtgcccttccaaggatgatgatggagacaagtcatccaagaagaagagtggaggctacaagctcatgaagaagcttaagaaagaaggcaagaagattgaggcattcatcggggaatgggactcaaatgaggagagctccgcctcatccgggtctgaggaagaaggtggtgatgatgcaagctccaagaagaagaagatggccgttgttgccatcaaggaggctccatcactcttctctccactttgtctcatggcaaagggctcctctaaggtaacatctcttagtgatagtgagagtgatgatgattgtgatgatgtttcctatgatgagcttgtgagtatgtttgaggagctctatgcttatagtgagaaggagattgtcaagttcaaggccctaaagaaggatcatgcttcttttgaggctttggaatttgagatgtctgagttgagcttcttccttggacttcaaataaagcaactcaaggacgggacgttcgtgagccaaaccaagtatatcaaggatgtactcaataggtttggcttagaggatgcgaagcccatcaagacacctatggcaaccaacgggcatctcgaccttgatgagggagtgatgcctccccgcactcgccatggtcgtcgtgcacccactccggatcccgtgagtgagcctgaggaatcgagcggagatgagtacgctcaaagtgatgaagaggttgaggccaatgttgaaggggctagtgaggaggctagtggagatgatgacagtggaagtggagaggatgaggatgaaggaagtgatgatatgcacattgatctctccatccagtttgttgtgaacatgaggaatctatcgcagtacaccatcttgaggcaccatgatcagttttttagtcctcgggacaccccggatccccgttttcacaccgctttctag

SEQ ID NO: 13962 - DNA, 4125 bp, Oryza sativa
  Clone ID: TFbOSC421293j.C1.o7.fg
atgtcgaacgaggtgaaccatgtagggaaggctcccatgtttaatggcacaaactattccacttggaaaattaaaatgtctactcacctcaaagctatgagcttccatatttggagtattgtggatgtaggctttgctatcaccggcacgcccttgacggagattgatcactgcatcctccaactcaatgcccaagccatgaatgctttgttcaactctttgagccaagaggagtttgatagagtgagcaaccttgagaccgcatatgagatttggaacaagttggcggagatccatgagggcacaagtgagtacaaggatgccaagcttcatttcctcaagatccaatatgagacattctccatgttgcctcatgagagtgtgaatgacatgtatgggaggctcaatgtcattatgaatgatctcaaggggcttggggcaaactacaccgatcttaaggttgcccaaaagatgcttagggctctaccagagaagtatgagacccttgtcaccatgctcatcaactccgacatgtcaagcatgacaccggcaagcctcttggggaagatcaacaccaatgacatgtacaagttgaagaagaaggagatggaggaagcctcaccttccaagaagtgcattgctctccaagccgaagttgaagacaagggcaagggcaaggtgaatgaagccaatgaggacttggaggaagatattgcccttcttgctagaaggttcaatgatctcttgggaaggagaaaggagagaagaaggggctccaactcaaataggagaagaaatagaagacccaacaagactctctccaacttgaggtgctttgagtgtggtgagaagggacactttgcttccaagtgcccttccaaggatgatgatggagacaagtcatccaagaagaagagtggaggctacaaactcatgaagaagctcaagaaggaaggcaagaagattgaagccttcatcggggaatgggactcaaatgaggagagctccgcctcatccgggtccaaggaagaaggtggtgatgatgcaagctccaagaagaagaagatggctattgttgccatcaaggaggctccatcactcttcgctccactttgtctcatggcaaagggctactctaaggtaacatctcttagtgatagtgagagtgatgatgattgtgatgatgtttcctatgatgagcttgtgagtatgtttgaggagctccatgcttataatgagaaggagattgtcaagttcaaggccctaaagaaggatcatgcttctttgaatgtcttctctagctttagctcttgtgtttctatttgtgatgcctcacttgttgttgagaacaatgagcttaaggagcaagtggccaagctcaacaagagcttggagaggtgcttcaagggtaagaacactcttgacaagattttgagtgagcaacggtgcattcttaacaaggagggacttggattcattccaaagaagggtaagaaaccttctcaccgtgccactcgttttgtcaagagtaatggaaggctcatgatggtagcattgttcctagatatgtgggttcccctatactcggtggtgaactaccgcaccggtgggagccattgggtgcttgatagtggatgcactcaacacatgaccggtgatagggctatgttcaccacatttgaagtaggagggaatgaacaagagaaagtgacatttggagacaatagcaaaggaaagcttttcaaaaagtttgtaaaaagggtccaaaatgaatttaattgcactcttgtgaaaataagaagtgacaatggttccgagtttaagaataccaatatcgaggactattgtgatgatcttggtattaaacacaaactttccgctacctactcacctcaacaaaatggtgtagtggagaggaaaaattgtacattgattgagatggcaaggactatgcttgatgaatatggtgtttctgattccttttgggcggaaaccataaacaccgcttgccatgcaaccaataggctttatttgtatcgtctcttgaaaaagacttcctatgagctaattgttgggaggaagcctaatgttgcctattttcgagtttttggttgcaagtgttatatttaccgaaagggtgctagactaaccaaatttgaaagtcggtgtgatgaagggtttcttctaggttatgcctcaaatagcaaggcataccaggtctacaacaagaacaaaggtattgtggaagaaaccgccgatgttcaatttgatgaaactaatggctcccaagaggggcacaagaatttggatgatgtaggtgatgaaggcttgatgagagctatgaagaacatgtctattggagatgtcaagcctattgaagtggaagacaagccatccacctccactcaagatgagccatctacttccgctacgccaagtcaagctcaagttgaagtggaggaggagaaggcacaggaaccacctatgccaccaaggatacacaccgctctttccaaggatcatccaattgaccaagtgttgggtgacattagtaagggtgttcaaactcgatctcgtgtcgcttcgatttgtgaacattactcgtttgtttcttgtcttgagccaaaacatatgaatgctatgcatgaagagctcaacaactttgcaagaaacaaggtgtggactttggttgaaagacctagagaccacaatgtcatagggacaaagtgggtctttaggaacaaacaagatgagaacgggttagtggtgagaaacaaggcaaggttggtggcacaaggtttcacacatgttgaaggtttggactttggtgaaacttttgcccccgtggcaagacttgaggctattcgcatccttcttgcatttgcatcatgctttgacataaaactatttcaaatggatgtgaaaagtgcttttctaaatggtgaaattgccgaacttgtctttgttgaacaaccccccggttttgaagatactaaaaatcctaaccatgtttataaactctcaaaagctctttatgctttaaaacaagctcctagggcttggtatgaaagattgagagattttcttttgtcaaaggatttcaaaattgaaaaagttgacaccacccttttcacaaaaatcattggtgatgatttctttgtgtgtcaaatttatgttgatgacatcatattcggttctactaatgaggtattttgcaaggaatttggtgatatgatatctagggaatttgagatgtccatgattggagagttgagcttctttcttggacttcaaatcaagcaactcaaggatgggacgttcgtgagccaaaccaaatacatcaaagatctactcaagaggtttggcttggaggatgcgaagcccatcaagacacctatggcaaccaacgggcatctcgaccttgatgacggaggtaaaccggtagatttaaagctttatcgttctatgattggtagcttgctttaccttacagcatctaggccggatatcatgattagtgtttgcatgtgtgcacggtttcaagccgctcctaaggagtgtcacttagtggccgtgaaaaggattctaagatatttaaatcattcctctactattggcttgtggtacccaaaaggtgctaaatttaagcttgttggcaattccgactcggattatgccggttgcaaagtggatagaaagagcacatctggtagtttccaaatgcttggtagatcccttgtgtcatggtcatccaagaaacaaaactccgtagccctctctaccgccggggcggaatatgtttcggcgggtagttgttgtgcccaattgctttggatgaaacaaacattgttggactatggcatatccttcaccaaaaccccactcctatgtgacaatgatagtgccataaagatagccaataacccggtccaacactctagaaccaagcatattgacattcgccatcacttcctaagagaccatgttgccaagtgtgacatagtcattagccacataagaaccgagaatcaactagccgatatctttaccaagcctcttgatgaaacccgcttttgcaagttgaggaatgagttaaatgtcatagacttctctaatgtggcttga

SEQ ID NO: 13963 - DNA, 588 bp, Oryza sativa
  Clone ID: TFbOSC421503j.C1.o11.fg
atggcgcgacgtggggagggcggcacaacgctgaagcggcgagcacggggagggttgggtggagcgggcggaaacagcagcgtggagatggcggcgtggggagggcggcacaggggctacaccgatcttgaggttgcccaaaagatgcttaggactctaccagagaagtatgagaccctagtcaccatgctcatcaactccgacatgtcaaggatgacacctgcaagcctcttggggaagatcaacaccaatgacatgtacaagttgaagaagaaggagatggaggaagcctcaccatccaagaagtgcattgctctccaagccgaagtggaagacaagggtaagagcaaggtgaatgaagccaatgatgacttagaggaacatactgcccttctagctagaaggttcaatgatctcttgggaagaagaaagcagagaggaagggactccaactcaaatagaagaagaaatagaagacccaacaagactctttccaacttgaggtgctttgagtgtggtgagaagggacattttgcttccaagtgcccttccaaggatgatgatggagacaagtcatccaagaagtag

SEQ ID NO: 13964 - DNA, 546 bp, Oryza sativa
  Clone ID: TFbOSC4271j.C1.o1.fg
atggaggaagcctcaccttccaagaagtgcattgctctccaagctgaagttgaagacaagggcaaggtgaatgacgtcaataagaacttggaagaagagattgcacttcttgctagaaggttcaatgatttcttgggaaggagaaaggagagaggaaagggctccaactcaaataggagaagaaataaaagacccaataagactctctccaacttgaggtgctttgagtgtggtgagaagggacactttgcttccaagtgcccttccaaggatgatgatggagacaagtcatcaaaaaaaaagagtggaggctacaagcttatgaagaagctcaagaaggaaggcaagaagattgaggccttcatcggggaatgggactcaaatgaggagagctccgcctcttccgggtccaaggaagaagatggtgatgatgcaagctccaagaagaagaagatggccgttgttgccatcaaggaggccccatcactcttcgctccactttgtctcatggcaaagggctcctctaagcatttctacctcttgtga

SEQ ID NO: 13965 - DNA, 3061 bp, Oryza sativa
  Clone ID: TFbOSC5481j.C1.o1.fg
atgtcgaacgaggtgaaccatgtagggaaggcttccatgtttaatggcacaaactactccacttggaaaattaaaatgtctactcacctcaaagctatgagcttccatatttggagtattgtggatgtaggctttgatatcaccggcacacccttgacggagagtgatcaccgtaacctccaactcaatgcccaagccatgaatgccttgttcaactctttgagccaagaggagttcgatagagtgagcaaccttgagaccgcatatgagatttggaacaagttggcggagatccatgagggtacaagtgagtacaaggatgccaagcttcatttcctcaagatccaatatgagacattctccatgttgcctcatgagagtgtgaatgacatgtatgggaggctcaatgtcattgtgaatgatctcaaggggcttggggcaaactacaccgatcttgaggttgcccaaaagatgcttagagccctaccggagaagtatgagacccttgtcaccatgctcatcaactccgacatgtcaagaatgacacccgcaagcctcttggggaagatcaacaccaatgacatgtacaagttgaagaaggagatggaggaagcctcaccctccaagaagtgcgttgctctccaagccaaagttgaagacaagagcaagagcaaggtgaatgaagtcaatgaggacttgagaaaggagagaggaaggggctccaactcaaataggagaagaaatagaagacccaacaagactctctccaacttgaggtgttttgagtgtggtgagaagggacactttgcttccaagtgcccttccaaggatgatgatggagacaagtcatccaagaagaagactggaggctacaagctcatgaagaagcttaagaaggaagggaagaagattgaggctttcatcggggaatgggactcaaatgaggagagctccgtctcatccgggtccgaggaagaaggtggtgatgatgcaagctccaagaagaagaagatggccgttgttcccatcaaggaggctccatcactcttcgctccactttgtctcatggcaaagggctcctctaaggtaacatcccttagtgatagtgagagtgatgatgattgtgatgatgtttcctatgatgagcttgtgagtatgtttgaggagctccatgcttatagtgagaaggagattgtcaagttcaaggccctaaagaaggatcatgtttctttggaggtcttgtatgaggagttaaagacctctcatgagagactcaccatttctcatgagaagcttaaggaagctcatgacaacctcctttccactactcaacatggagctcacattgatgttggcatatcttgtgatttgcttgatgatagtgctacttgccatattgctcatattgcatcatctagcatttctacctcttgggatgatcttatggatatgcctagccctagctctagctctagctcttgtgtttctatttgtgatgcctcacttattgttgagaacaatgagcttaaggagcaagtggctaagctcaacaagagtttggagagatgcttcaagggtaagaacactcttgacaagattttgagtgagcaacggtgcatccttaacaaggagggacttggattcactccaaagaagggtaagaaaccttctcaccatgccactcgttttgtcaagagcaatggtaagtattgctccaagtgttgtgaggttgggcatttggtgaactaccgcaccggtgggagccattgggtgcttgatagtggatacactcaacacatgaccggtgatagggctatgttcaccacatttgaagtaggagagaatgaacaagagaaagtgacatttggagacaatagcaaaggaaaggtaattgggttagttgcaaaaacttcattgggttggctttggcataggaggctagctcatgttggcatgaatcaattgagcaaactttcaaaacgtgatctagttgtgggcttgaaagatctgaagtttgagaaagataagctttgtagtgcttgtcaagccggcaagcaagttgcaggttctcattctactaagagtatcatgtccacatctagaccattggagctcttgcatatgaatttgtttggcccaacaacctataagagcattggtggtaatagtcattgtcttgtgattgttgatgattattctcgctatacttgggtgttctttttgcatgataagtctattgttgccgagtttttcaaaaagtttgcaaaaagggcccaaaatgaatttagttgcactcttgtgaaaattagaagtgacaatggttccgaatttaagaataccaatatcgaggactattgtgatgatcttcatatcaaacacgaactttccgctacctactcacctcaacaaaatggtgtagtggaaaggaaaaatcgtacattgattgagatggcaagaactatgctagatgaatatggtgtttccgattctttttgggcggaagccataaacaccgcttgccatgcaaccaatagactttatttgcatcgtctcttgaaaaagactttctatgagctaattgttgggaggaagccaaatgtcgcctattttcgagtttttggttgcaagtgttatatttaccgaaatggtgttagactaaccaaatttgaaagtcggtgtgatgaagggtttcttctaggttatgcctcaaatagcaaggcataccgggtctacaacaagaacaaaggtattgtggaagaaaccgccgatgttcaatttgatgagactaatggctcccaagaggggcacgagaatttggatgttgtaggtgatgaaggcttgatgagagctatgaagaacatgtctattagagatgtcaagtctattgaagtggaagacaagccatccacctccactcaagatgagccatctacttccgcttcgccaagtcaagctcaagttgaagtggaggaggagaaggcacaagatccacctatgcctccaagaatacacaccgctctttccaaggatcacccaattgaccaagtgttgggtgacatta

SEQ ID NO: 13966 - DNA, 1580 bp, Oryza sativa
  Clone ID: TFbOSC6365j.C1.o1.np
agctagtgtggcacttgatcatctccgagccaggtcatcacttgttactcttggaggttgccgcctcctagacggcttgtggaggagttgcccggtgacctctccgagaagattgtggaggaggcccggcgctggctttgctatcaccggcacgctcttgatggagattgatcaccgcaacctccaactcaatgcccaagctatgaatgctttgttcaactctttgagccaagaggagttcgatagagtgagcaaccttgagactgcatatgagatttggaacaagttggcggagatccatgagggcataagcgagtacaaggatgccaagcttcatttcctcaagatccaatatgagacattctccatgttgcctcatgagagtgtgaatgacatgtatgggaggctcaatgtcattgtaaatgatctcaagggacttggggcaaactataccgatcttgaggttgcccaaaagatgcttagggctctaccagagaagtatgagacccttgtcaccatgctcatcaactctgacatgtcaaggatgacacccgcaagcctcttggggaagatcaacaccaatgacatgtacaagttgaagaagaaggagatggaggaagtctcacattccaagaagtgcattgttctacaagccgaagttaaagacaagggcaagggcaaggagagaggaagggactccaactccaataggagaagaaatagaagacccaacaagactcttcccaacttgaggtgctttgagtgtggtgagaagggacactttgcttccaagtgcccttccaaggatgatgatggagacaagtcatccaagaagaagagtggaggctacaagctcatgaagaagctcaagaaggaaggcaagaatattgaggcctttatcggggaatgggactcaaatgaggagagctccgcctcatccgggtccgaagaagaaggtggtgatgatgcaagctccaagaagaagaagatggccgttgttgccatcaaggaggctccatcactcttcgctccactttgtctcatggcaaaggactcctctaaggtagcatttcttagtgatagtgagagtgatgatgattgtgatgatgtttcctatgatgagcttgtgagtatgtttaaggagctctatgcttatagtgagaaggagattgtcaagttcaaggcccgaaagaaggatcatgcttctttggaggtcttgtatgaggagctaaagacctctcatgagagactcaccatttctcatgagaagcttaaggaagctcatgacaacctcctttccactactcaacatggagttctcattgatgttggcatatcttgtgatttgcttgatgatagtgctatttgccatattgctcatgttgtatcatctagcatttctacctcttgtgatgatcttgtggatatgcctagctctagctctagcacttgtgtttctatttgtgatgcctcacttgttgttgagaacaatgagcttaaggagcaagtggttaagctcaacagagtttggagatgtgcttcaagggtaaggacactcttgacaagattttgagtgagca

SEQ ID NO: 13967 - DNA, 3036 bp, Oryza sativa
  Clone ID: TFbOSC900219j.C1.o12.gm
atgaacagatcaaatatgcgcaacatattgaacacgtaccgaggtgacggaaagaccggttgcgtgaagacggcaaatccggcgggctcccacgaccggcggctgcctgggggaggcggcaacggcagtggtggtggctgttgcgccctcccctccgccagatccggcaagaggggattcggcgggctcccgcggccagcagctgaccggcggaggcagcagcggcggcggtggccgcaccctctccacctggccggtctgaccggctggcatcgccggtctgaccgccatgtcaaggccggctttgctatcaccggcacacccttgacggagattgatcaccgcaacctccaactcaatgcccacgccatgaatgccttgttcaactctttgtgccaagaggagttcgatagagtgagcagccttgagaccgcatatgagatttggaacaagttggtggagatccatgagggtacaagtgagtacaaggatgccaagcttcatttcctcaagatccaatatgagacattctccatgttgcctcatgagagtgtgaatgacatgtatgggaggctcaatgtcattgtaaatgatctcaaggggcttggggcaaactacaccgatcttgaggttgcccaaaagatgcttagagctctaccggagaagtatgagacccttgtcaccatgctcatcaactctgacatgtcaaggatgacacccgcaagcctcttggggaagatcaacaccaatgacatgtacaagttgaagaagaaggagatggaggaagcctcaccttccaagaagtgcattgctttccaagccgaagttgaagacaagggcaaggtcaaggtgaatgaagccaataaggacttagaggaagagattgcccttcttgctaggaggttcaatgatctcttgggaaggagaaaggagagaggaagggggtctaactccaataggcgaagaaatagaagacccaacaagactctctccaacttgaggtgctttgagtgtggtgagaaggggcactttgcttccaagtgcccttccaaggatgatgacggagacaagtcttccaagaagaagagtggaggctacaagctcatgaagaagctcaagaaggaaggcaagaagattgaggccttcatcggggaatgggactcaaatgaggagagctccgtctcatccgggtccgaggaagaaggtggtgatgatgcaagctccaagaagaagaagatggccgttgttgccatcaaggaggctccatcactcttcgctccactttgtctcatggcaaagggctcctctaaggtaacatctcttagtgatagtgagagtgatgatgattgtgatgatatttcctatgatgagcttgtgagtatgtttgaggagctccatgcttatagtgagaaggatattgtcaagttcaaggctctaaagaaggatcatgcttctttggaggtcttgtatgaggagctaaagacctcttatgagagactcaccatttctcatgagaagcttaaggaagctcatgacaacctcctttccactactcaacatggagctcacattgatgttggcatatcttgtgatttgcttgattatagtgctacttgccatattgctcatgttgcatcatctagcatttctacctcttgtgatgatcttgtggatatgcctagctctagctcttgtgtttctatttgtgatgcctcacttgttgttgagaacaatgagcttaaggagcaagtggccaagctcaacaatagtttggagaagtgcttcaagggtaagaacactcttgacaagattttgagtgagcaatggtgcatccttaacaaggagggacttggattcattccaaagaagggtaagaaaccttctcaccgtgccactcattttgtcaagagcaatggaaggctcatgatggtagcattgttgctagatttgtgggttcccctatacttggtggtgaactaccgcaccggtgggagccattgggtgcttgatagtggatgcactcaacacatgaccgggtttcttctaagttatgcctcaaatagcaaggcatactgggtctacaacaagaacaaaggtattgtagaagaaaccgccgatgttcaatttgatgagactaatggctcccaagaggggcacgagaatttggatgatgtaggtgatgaaggcttgatgatagctatgaagaacatgtctgttagagatgtcaagcctattgaagtggaacacaagccatccacctccactcaaggtgagccatctacttctgcttcgccaagtcaagctcaagttgaaatggaggaggagaaggcacaagatccacctatgccaccaaggatacacaccgctctttccaaggatcacccaattaaccaagtgttgggtgacattagtaaggatgaagctctttgtgatccggattggatgaatgctatgcatgaagagctcaacaactttacaagaaacaaggtgtggactttggttgaaagacctagagaccacaacgtcatagggacaaagtgggtctttaggaacaaacaggatgagaacgagttggtgcaactcaaggatgggacgttcgtgagccaaaccaagtacatcaaggatctactcaagaggtttggcttggaggatgcaaagcccatcaagacacctatggcaaccaacaggtatctcgaccttgatgagggagtcggctggggcaggcggtctgaccggccatataggctcggtctgaccggcctggagctggcgccggaaatgacctctgacaagcagtacacatgcctcctgctccgctcgtcagctctcccggtggacgcccgtttcatccttcattcaatggccagcgattttcttgccacgcttgcgctgaagcctggaatggatttgaccgggactgacataccaactccaggagtcagcacgccagcttcggctagagacgagagccaggaagctctcatcattctgacgggatggggcgaggcgtgtgacaggccgcctgttgccacctaa

SEQ ID NO: 13968 - DNA, 4947 bp, Oryza sativa
  Clone ID: TFbOSC401828j.C1.o6.fg
atgtccgacgctcggtctcggcgttcggacgcctcgagcactcggcgtcagcaggacgccgagctcgccgcagcagaagagcgcaggcgagcaacagctcagaccgctgcagcagcagcgagggcagccagactggcggcagcggagttggcagcagccagggcggaggcggaggcggaggcggcggaagatgcggcatgtgcggcggaggtagaggttgagaccttgcgcagcagcatcaacggctccatcgccggcgacatcaccgccgacagggagcttgaggagctggcaagaggaagggcacgggagcgggcagagcggtgggcagcagcccacctccacggcggtggcggcggtccaagggaccacgggcccgccaacgggaacccagatgggcgcgggcgtgccggcggcagcccggagcccgcacgcggccctcgcaggcagcgcggctctttctcccctgaccggcgccatggtcaccacggcgtccagacggtggtcagggactttggtcctggcggtgggtggcctaccctcaccaaaaccaactacatcgagtgggccgcagtgatgagggtgaggctccaggtgcggcacatgtgggaggcagtccggtacggcgacgtcgactacgacgaggatcggcgagcactggatgccctcatcgctgcagtcccgcccgagatgcagttctcgctttcccagaagcggactgccaaggaggcctgggacgccatcgctgcggcacgcatcggcagcgaccgcgcccgcaagtccacactgcaggcactccgcaaggagtgggagaacctagccttcaagccaggtgaggatgttgatgactttgctctccgtctcaacactctcttgcagaaaatggtgcagtacggcgacgacacctatgacgaggagagagctgtcgagaagctcttccgctgcgtccctgagaagtacaggcagatcgctcgctcgattgaatctctgctggacctctccacgatgtcgatcgaggaggcgttaggtcgcctcaaggtcgtcgatggtgatgagccacagcctctctcggggcccatcaccatcggcgggaagctccatctcactcgggagcagtgggaggcctctcagggtgacgggaggaagggggagtcatcttccccgacaggcggccgtaagccgcgcaaggcgcggggaggtgtccagctacggtgggcgcgaagacgtgccgagggtggcgcccgcagaggcgcccagggcgttgccactggcaaccacaagccggcacgagacgacgcctgccgcaactgtgtcaagcttggccattgggccaaagactgtcgacagccacgacgcggccaggcccacgtcgcacgggtggaggaggaagagccggctctgctcctagctcacgcaagcatcgagctacctccagcggcaccggccgcagcggctttcctccaccttgatgagccgaaggtactcgtctccctctgcgacggctccagcaacgacaaggctgatgggtggtacctcgacaccggcgccacccatcacatgaccggccgacgggagttcttcaccgagttcgactccagcgtccgaggctccgtcaagttcggggacgcctccggcgtggagatcaagggtgttggctccgtgaccttcaccgccaagtccggtgagcacaggctgctcaccggagtctactacatccccgcgttgaggaattctatcatcagcgtgggacagctggatgagaacggctcatgcgtgttggtcgaggacggactcatgaggatttgggatcgccgtcgtcgccttcttgccaaggtaaccagaggcactaatcgactctacatcctcagcgcgcaggtcgcacaaccagtttgcctcgccgctcgtcgggacgacgaggcatggcagtggcacgagcgcttcgggcatctccacttcgaggccctgaagcgcctcagtgccaaggagatggtgcgaggcatgccgtgccttgaccacgtggagcagctctgcgacgtctgcgtggtgacgaagcagcggcggctcccctttccccagcagacgagcttccgagccaaggagcggctcgagctcgtgcacggggacttgtgtggcccagtgacaccggccacaccaggaggacgacgctactttctactgctcgtcgacgacctctctcgctacatgtgggtgatggtcctcggcagcaagggagaggctgcggatgccatcaggcgcgcgcaggccgctgcagaggcggagtgcggccgcaagctgcgcgtgctgcgcaccgacaacggcggcgaattcacggcggctgaattcgcgtcgtactgcgctgatgagggcattcagcgccactacaccgcgccgtacagcccacagcagaacggcgtcgtcgagcggcgcaaccagacggttgtggggatggctcgggctcttctcaagcagagggggatgccggccatcttctggggggaggcggtggtgacagccgtctacatcctcaatcgctcgcctaccaaggccctcgatggcaggacaccgtacgaggcctggcatgggcacaagccggcggtctcccacctacgggtcttcggctgcctcgcgttcgccaaggagctcggccacatcggtaagctcgacgacaggagcaccccaggggtgttcatcggctacgcggagggctcgaaggcctaccgcatcctcgacccggagacacagcgtgtgcgcactgcgcgcgatgttgtgttcgacgaagggcgagggtgggtatgggacaaggcggtggacgatggttcgactccgacgtacgacgacttcaccatcgagtacgtccacttcgagggagctgggggagtaggcagcttttcatctagcgtgtctaccccagcccccgaatctccaccgactccgacaccaacacaccctcgggccacgacttcgactacgacgagctcttcgtcgacaccaccccagccagtgactccacatgctccagctccaacagccactcctccaagcacgtctactccgacgccagctcgtgttgagcgcagcccggtggagttcgctactccgctctcccacgacggggagcgcatcgacgcgtaccacgacggcgagcagctacggtaccgtacgatggaggatcttctcggcgaccagccggtgccgggactggtgcctcgcgacttagaggcgcagttgcaccttgcgtgcgacgacggtgagcctcggtcttttgcagaggccgagaaacacgcggcatggcgtgccgcgatgcagtcggagatggacgcggttcaggagaaccgcacctgggagcttgctgacctccctcgtggtcaccgcgcaatcacccttaagtgggtgttcaagctgaagagggatgaagccggagccatcgtcaagcacaaggctcgcttggtggcacgcggtttcgtgcagcaggaggggatcgactacgacgatgccttcgctcccgtggcacggatggagtccgtgcgactcctttttgcgctggctgctcaggaaggctggggcgtccatcacatggacgtcaagtcggcgtttctaaacggcgacttgaaggaggaggtctacgtgcaccagccgccgggatttgtgatccccggcaaggagggcaaggtgctacgcctgcacaaggccctctacggcttgcggcaggcaccgagggcgtggaatgccaagttggattccacgctcaaggggatgggcttcgagcaaagcccgcacgaggtggccatctaccggcggggcattggaggaaatgccttgctggtgggtgtctacgtcgacgacttggtgatcaccggcaccaaggatgcggaggtcgcggcgttcaaggaggagatgaaggccactttccagatgagtgatctggggcctctctccttctacctggggatcgaagtgcaccaggacaactccgggatcacgcttcgacagaccgcctatgccaagcgcgtcgttgagctggctgggctcaccgattgcaacccagctctcactccgatggaggagagactgaagctgagccgcgacagcacggcggaggaggtggatgctacacagtaccgacgtcttgtggggagccttcgctacctcacccacacacggccggacttggccttcttcgtcggctacgtcagtcggtttatgcagcgaccgacgacggagcaccagcaggccgtgaagaggatcatccgctacgttgcggggactctcgaccacggtctctactacccgaggtgtcctggcaaggcacacttcgtcgggtacagcgacagcgaccacgccggcgacattgacaccagcaagagcacaagcgggattctcttcttcctcggcgagtgcctcgttagctggcagtcaatcaagcagcaggtggtggccctgtccagctgcgaggccgagtacatggcggcatccgccgcttcgacccaggcgctctggcttgctcgactacttagtgatctcctcggcagagatactggagcggtggagctcagggtggatagcaagtccgctctggccctggcaaagaaccccgtttttcacgaacggagcaagcacatccgggtgagttgctgcctcgtgtgcgaccacgatggcgacgggcacccagatggggctggtgagcagagcgatgggccccaggaagttgagcgcgacgacggcgccgataagcgtgagcccggtcaggagcaggagctcggcgccggaggcgacgagcgtgaggaagccgacaacttgggtggagctgggcgcgtgagtttgcactttgcacccgccggagcagcatcgtcgacgacgagtttggcgccgtgggcgcgtacccatggcgctacggtgccggaccgtgcgcgtgctgctgctgatatgccattctcgcggttgacctag

SEQ ID NO: 13969 - DNA, 4331 bp, Oryza sativa
  Clone ID: TFbOSC10374j.C1.o1.fg
atggttgttcagaatgattgggcctatgcaacaggatgccgcgctacaagcctgagtacttgtttggtgttgagggatttgtccaggagttgcgtacgatgtcctttgtcataggatttgggactgcccctttttacgcccagattcctcatgatcgtcacgaagaaaagtgccgagtcaaagtcaccttgaacagtaatagtgaagatatcccctcagtgatgttcgaagctagaggaagaaactacatccatgcatgtcaggaggtggcaaggatcgccataggagagctccgcgatcgctacagtgatcagttggccgacactgagtatcgctaccatcctcgccaaccacagggaagtgatcgtggcagctaccttgagactgagggaattgagaatgatgctaccacaaggcatttggttgagatgctgcgggctatggatgaaacccgtgcggaggttgtgctagcagctcaagatcgtgaagatcggaatcgtggtaagatttgcaagctagaagacaaggtggatcgtttggagaaggaactagccgcgttaaagggagaagcaccaccgcagaaggccaggattcgtcttaccgcaaggaagagagctctatttgtccctcgctaccaattggcgccaaaggtccgtgtggtggaaaaagaagttaccccagccctagcggatcctccggtcgtcaacatggtgctcactcgcagcaacgggaatggccctaacaacaacaataacaacaacaacaatggagagaatcccacacttgcccaggtcctggctcaacaggcacagcttatgaacatgatgatgcagcaactccagaaccagcagaaccagggaaataaccatgcacctccccagaacaagttagcagaatttcttcgtgtgaggccgcctactttctctagcaccaccaatcctgttgaagctggtgattggctgcatgacatagagaagaagttggatttgcttcagtgcaccgatcaggagaaggtctcatttgcatcacaccagctgcatggccctgcctctgaatggtgggatcacttccgcttgaacaggactactgctgaacctatcacttggcttgaattcaccgctgctttccggaagacgcatataccatcgggagtggtgtctctcaagaaggagttcaggtcgctcacccagggatctcgctctgttacggagtatctgcacgagttcaatcgtctggctcgttatgctccggaagatgtgcgcactgatgaagagcgtcaggagaagttcttggaaggacttaatgatgagctttcttacccactcatgactggggattatcatgatttccagaagttagtggataaggctattcgccaggaggacaagtacaatcgcatggagcaaaagaaacgccggattgctcaattcaaggcacaacaggggaatagtcaaaggccgcgtcttactttaggaccccagtctatgccacagggaggttcttcgtctgttgttcgtccgcatcgtcagttcttcaaccacaatgctggcaacaacatccgcaatcaagctccacgccctgttgcagcttcgacacagcaacaacctgccaagaaggagcaaggcagcaagcccggggtgtgcttcaactgtggagacctaggacattatgctgacaagtgtccgaagccccgacgcgtgaaggttgtccctacccagagcaactctaccgcaccagcatcaaaggcccgtgtcaatcatgttgctgctgcagaagctcaaggtgctccagatgtgattttgggtacgtttcttgttaacttagttcctgcaacagtgcttttcgattctggtgcttcacattcattcttatctatgagttttgcgggaaatcatgggatggaagtagaagatcttagacgtcctttgatggttagtaccccaagtaatcaagcactctctttgcaacgtagcccctctgtcagaatagaaattcaaggagtaccatttctggccaatcttatcttgttagaatccaaagaccttgatgtcatcctagggatggactggttagccagatataaaggtgtgatagactgtgctaacagaaaagtaactctcaccagtaatgatggtcgagttgtaactgttcatgcattgtcttctgagtctttaaggtcaagactgaaccaaataactttggatgagattcctgtagtccgggagtatcctgatgtgttcccagacaatttacctggtatgccgcccaaaagggatatagagttcagaatagatttggtaccaggaacaactccgatccataagagaccttatagaatggcagccaatgagttggcagaagtcaagaggcaagtagacgatttgcttcagaaaggatacatcagaccgagttcgtctccatggggagctccgatagatcttcgatcagggtatcaccagttgagaatcaacgaggaagatatacctaagacagcttttaccactaggtatgaattgttcgaatgtactggtatgtcttttggacttaccaatgcccctgctttcttcatgaacttgatgaataaggtgtttatggaatacctagacaagtttgtggtggtctttattgatgacattcttatctactcccgaaccaaagaagagcatgaagaacatcttcgccttgcactagagaagctacgagaacatcagttgtatgccaagtttagcaagtgtgaattttggttgtctgaagtgaagttccttggtcacgtcatctcagcaggaggagttgccgtcgatcctagtaatgtggaatccgtaaccaactggaaacaaccaaagacagtttcagagattcgcagtttcctaggccttgcaggatattatcagaggttcatagagaatttttccaagattgctaagccaatgacacgattacttcaaaaggatgtgaagtacaagtggtcagaagaatgtgagcagagttttcaagagttgaagaatcgcttaatatcagctcctattttgattttacctgatccaaagaagggttttcaagtgtattgcgatgcatccaaacttggattaggctgtgttctgatgcaagatgggaaggtggttgcctatgcatctcgtcagttacgtccgcatgagaagaactaccctactcatgatcttgagttagctgcagtagttcatgcgttgaagatttggcgtcattatcttttcggtactcgtacagaggatgagcaaggaactgtatggttgggtgagagaatctgcgtccccgacaacaaagatttaaaagatgcaattctgaaagaagctcatgatactttatactccattcaccctggtagtaccaaaatgtaccaggatctcaaggaaagattttggtgggcaagtatgaagcgtgaaatcgcagaatacgtagcagtatgtgatgtttgtcagcgagtcaaggcagaacatcagaaacccgccggtttgctgcagcctttgaagattcctgaatggaagtgggaggaaatcggtatggatttcatcactggtctacccagaacgtcatcaggccatgactctatttgggtgatagtcgacagacttaccaaagtggctcatttcatcccagtaaagacaacttattctggaagtcggttggcggaattgtatatggccaggattgtgtgtttgcatggcgtccctaagaagatagtgtctgatcgaggcagtcagtttacttcaaagttttggaagaagcttcaggaagagatgggttctaagctgaactttagtactgcttatcatccgcagacagacggacaaaccgaaaggacttatgcggaattctcgtacaacaacagttatcaagctagtcttcagatggctccttacgaagcactgtatggttggaagtgccgcactccgcttttgtgggatcaaacgggagaacgtcaggttttcgggacggatatcctgagggaagcagaagaaaaggtgaaaaccattcaagaaagattgcgtgtggcccagtctcgtcataagagttatgccgacaatcgccgcagagatttgagttttgacgaaggagattatgtgtatcttcgtgtcacgcctcttcaaggagttcatcgttttcacaccaaaggaaaattggcaccgcgttttgtgggaccttataagattgtcagtagaagaggagaggttgcttatcagttgaagttacctcaatctttggcaggagtccataatgtgttccatgtgtcgcaattgaagatgtgtttaagagtacctaccgaagaaactaatcttgaacagatagaagtctaa

SEQ ID NO: 13970 - DNA, 1221 bp, Oryza sativa
  Clone ID: TFbOSC400044j.C1.o80.fg
atgctgctgcgtcttccgtgcgcgcgcggccccgcgccggcggccgccgcccggtggagacccccggggcgggcggcgcggacggcaccacgtctcggccgagggcacgccgccgcttcgtccgccgacggcagcggcgctccgagctctccgctttttgttctctgccattcccaagctctgaccctggcgttgccgccgcagtccctccactacgactacgatcctttggccgacctccttggaccagacgtcgacccgacctcatcccaaagatctttcaatgccggcgtcatcttggtgacttggctaatttggaaagagcacaatgagtctttgaggggcgtgcagtctctccggaatactgctccagttgcagagaaggggaagctgaggtcctgggttggtccaaatgggcaatactatcgtgagctgccttgccctagctgtcgaggtagaggatacactccttgcaaacagtgtgggatagacagatccagtttggactgccctatgtgcaatggcaagggcattagggagtgtgtgcaatgtgctggagagtgtgttatatggcaagaatctattgatgagcaaccatgggagaaagttcgttccagttctcccttgaaagtaaaagaggatgatgaagtcgacaaactggagataaagattaacacatcaaaaagatcaaggcgtacttacccatctccatcccctgaagttgccctgaagattagcagatctttaagaagtctgaatgctaaaacaggactgtttactaagcatatgaagattatacaccaagaccccaaattgcatgcacaaagggttgctgcaatcaaaaaaacaaaaggtactgctgctgcaagaaagcatgcatctgaaactcaaaaggcattcttcagcaatcccgagaatcggcttaagagaagcattgccatgaaaggggtgaaattcttctgcagcaaatgtgggcaagaaggtcataggagcttctattgcccaacagtgagagaaatttcaggcagagcgcatttcagatgccgattatgtgggggaaagggtcataatagccgaacatgtggaaagccaaagtcagagaatgagtgtcaacgacaacctcggcactgcagccaatgtggtgaaagggggcacaaccgtcgtaactgtcccagatccaccaccgttgaggttgaggatgtcaagatttactcagagtaa

SEQ ID NO: 13971 - DNA, 5194 bp, Oryza sativa
  Clone ID: TFbOSC401692j.C1.o10.np
attccaacgttcccggagagtccgaatttgcaggagaatattttgaggaatttcaaggccagcaaggcaactcctggtttggaatagtatattcctggtttggagatagaactgtgcagccgggattggttgttcagaatggttgggcctatgcaacaggattaggcgtagccctggtcaagctgcctatggagtggagtcatttgttcaggagttgcgtacgatgtccttcctcataggatttgagactgcccctttgtatgcccagattcctcatgatcgtgatgaagagaagtgtcgtgtcaaagtcaccttgaacagtaatcgtgaagatatcccatcggtgatgttcgaggctggagagggaagctacaatcatgcttgttaggaggtggcaaggatcgccataggagagctccgcgaaagctacaatgatcggttggccgacaccgagtaccgctaccatcctcgtcaaccccagggaagtgaccgtggcagttaccttgaacctgcagggattgagaatgatgctaccacaaggcatttggttgagatgctgtgggccatggatgagacccgcgctaaaattgtgatagcagctcaagatcgtgaagaccggaatcgcggaaagatttgcaagctggaggacaaggtggatcgtttggagaaggagctagccgcattaaaaggagaagcgccaccgcagaaggccagggttcgtcttaccgcaaggaagagagctctatttgtccctcgctaccagttggcgccaaagatggtgcttactcgcagcaacgggaatggccccaaccccaacaacaacaacaacaatgcagagaatcccacgcttgctcaagtcctggctcaacaggcacagcttatgaatctgatgatgcagcaactccagaaccagcagaaccagggaaacaaccatgcacctcccccgaataagctggcagaatttcttcgcgtgaggccgcctactttctctagcaccaccaatcctgttgaagctggtgattgcctgcacgccatagagaagaagttggacctgcttcagtgcacagatcaagagaaggtttcttttgcttcacaccagctgcatggccctgcctctgagtggtgggatcacttccgtctcaacaggactactgctgaacctatctcttggcttgagttcaccgctgctttccggaagacgcacataccatcgggagtggtgtctctcaagaagaaggagttcagggcgctcattcagggatctcgctctgtcaccgaatacttgcatgaattcaatcgtctggcccgttgtgctccagaagatgtgcgcactgatgaagagcgtcaggagaagttcttcgaaggtctgaatgatgagctttcttacccattaatgactggggattatcatgatttccagaagttagtggataaggctattcgccaggaggacaagtacaactgcatggagcagaagaaacgccgaattgctcacttcaaggctcagcaggggaatagtcagagacagcgtcttgctatgggacctcagtcaatgctagagggaggttcttagtctgttgttcgtccgcagcgtcagttcttcaacaacaatgctggcaacaacaaccgcaaccaagctccacgtcctgttgcagctctgacatagaatcagctagccaagagggagcaaggcagcaagcccggagtgtgcttcaattgtggtgacctaggacattacgctgacaagtgtccgaagccccgccgcgcgaaggttgtccctgctcagaacaactcctccgcaccagcgacaaaggctcgtgtcaatcatgttgctgctgcagaagctcaaggtgctccagatgtgattttgggtacattccctgttaactcagttcctacaacagtgcttttcgattctggtgctacgcattcctttttatctttgagttttgcgggaaatcatgggatggaagtagaagatcttagacgtcctttgatggttagtactccgagtaaccaagcactctcatcacaacgtagcccctctgtcagaacagagattcaaggagtaccatttctggccaaccttattctgttagaatccaaagatcttgatgtcatcctaggaatggactggttagccagatataaaggtgtgatagattgtgccaatagaaaagtaactctcaccagcaatgatggtcaagttgtaactgttcatgcattgccctctgaacttttaaggtcgagtctgaaccaaataactttggaagagattcctatagtacgggagtaccccgatgtgttccctgatgatttacctggtatgccgcctaaaagggatatagaattcagaatagatctggtaccaggaacaactccgatccataagagaccttatagaatggcagccaatgaattagcagaagtcaagaggcaagtagatgatttgcttcagaaaggatacatcagaccgagttcgtctccatggggagctccagtcatctttgtggaaaagaaagatcatacccagaggatgtgtgtggactatcgtgcactaaatgatgtcactatcaagaataagtacccgctgcccagaattgatgatttatttgatcagcttaaaggtgccaccgttttctccaagatcgatcttcgatcagggtatcatcagttgaggattaaagaggaggatatacctaagacggcttttaccactaagtatgggttgtttgaatgtactgttatgtcttttggacttaccaatgcccccgctttcttcatgaacttgatgaacaaggtgtttatagaatacctagacaagttcgtggtcgtctttattgatgatattctcatctattcccgaaccaatgaagagcatgaagaacatcttcgtcttgcactagagaagctgcgagaacatcagttgtatgccaaatttagcaaatgtgaattttggttgtctgaagtgaagttccttggtcacatcatctcagccggaggagttgccgttgatcctagtaatgtggaatccgtaaccaactggaaacaaccgaagacagtttcagagattcgtagttttctgggtctcgcaggttattaccggaggttcatagagaatttttccaagattgccaagcccatgacacgactgcttcagaaagatgtgaagtacaagtggtcagaagagtgcgagcagagttttcaagagttgaaaagtcgcttaatatcagctcccattttgattttgcatgatcctaagaagggtttccaagtgtattgtgatgcatctaagcttgggttaggttgtgttctgatgcaagatgggaaggtggttgcctatgcatctcgttagttacgtccgcatgagaagaactaccctactcatgatcttgagttagctgcagtggttcatgcgttgaagatttggcgtcactatctttttggtactcgtacggaggtgtacactgatcacaaaagtttgaagtatatttttatctagtcggatctaaacatgagacaacagagatggttggaactgattaaggactatgatatgggaattcattatcacccaggaaaggccaatgttgtagcagatgctctcagcaggaaaggctattgcaatgctacggaaggacgacagttgccattgaagttatgcaaggaatttgaaagattaaatttggaaattgtcagtagaggtttcgttgcagccttagaagcgaagcccactctcattgatcaagttagagaagcccaaattaatgatcctgatattcatgagatcaagaagaatatgagaagaggaaaagctatcggtttcttggaagatgagcaaggaactgtatggttgggtgagagaatctgtgtcccagacaacaaagatttgaaagatgcaatactgaaggaagctcatgatactttatactccattcaccctggtagtactaagatgtaccaagacctcaaggaaagattttggtgggcaagtatgaagcgtgagatagcagagtatgtagctgtgtgtgatgtctgttagtgagtcgaggcagaacatcagaaacccgtaggtttgttgcagcctttgaagataccagaatggaagtgggaggaaatcggcatggatttcatcactggtctacccagaacatcatcgggccatcactctatttgggtgatagtcgacaaacttaccaaaatggctcatttcatcctggtgaggacaacatattctggaagccgtttggcggaattgtatatggcaaggattgtgtgtttgcatggtgttcctaagaaaatagtatccgatcgaagtagccagtttacttcaaagttttggaagaaactttaggaagagatgggttccaagttgaacttcagtaccgcttaccatccgcagacagacggacaaactgaaagggtaaatcagattttggaagacatgttgagagcttgtgctttagacttcggtggatgttgggataagaatctgctttacgcggaattctcgtacaacaacagttatcaagctagtcttcaaatggctccttatgaagcactgtatggtcggaagtgccgcactccgcttttgtgggatcaaatgggagaacgtcaggtttttgggactgatatcctaagggaagcagaagagaaggtaaagatcattcaagaaagattgcgtgtggctcattctcgtcataagagttatgccaacaatcgccgcagagatttaagttttgaggaaggagatcatgtgtaccttcgtgtcacgcctcttcaaggggttcatcgttttcacactaaaggaaaattggcaccgcgttttgtgggaccttataagattgtcagtagaagaggagaggtcgcttatcagttggagttacctcaatccttggcaggtgtccataatgttttccatgtgtcacagttgaaaaagtgtttaagggtacccaccgaagaagctaatctggaacagatagtggtccaagaggatctgacatatattgagaaaccaatccgtatcttagagacagatgagagaagaaccaagaatcgagttatccgtttctataaggttcaatggagtaatcactcagaggaagaatctacttgggaacgagaagatgaattaaagtcagctcatccgcatcttttcgctagttcttccaaatctcgaggacgagattctgtt

SEQ ID NO: 13972 - DNA, 5198 bp, Oryza sativa
  Clone ID: TFbOSC422791j.C1.o7.np
agattccgacgtttccggagagtccgtttttgcaggagaagaatttgaagagttccaaggccagcaaggcatctcctggtttggaatggtatattcctggtttggagatagaactgtgcagccgggatggttgttcaggatggttgggcctgtgcagcatgatgccgcgcttcaagcctgagtacttgtttggtgttgagggatttgtccaggagttgcgtacgatgtcctttgccataggatttgggactgcccctttgtatgcccagattcctcatgatcgtgatgaagagaagtgccgagtcaaagtcaccttgaacagtaatagtgaagatatcccatcagtgatgttcgaagctggaggaggaaactacattcatgcatgtcaggaggtggcaaggatcgccataggagagctccgcgatcgctacagtgatcagttggccgacactgagtatcgctaccatcctcgccaaccccaaggaagagaccgtggcagctaccttgagactgaggggattgagaatgatgctaccacaaggcatttggttgagatgctgtgggctatggatgagacccgcgcggagactgtgttagcagctcaagatcgtgaagactggaatcgtggtaagatttgcaagctagaggacaaggtggatcatttggagaaggaactagccgcattgaagggagaagcaccaccgcagaaggccagggttcgtcttaccgcaaggaagagagctctattcgtccctcgctaccaattggcgccaaagatggtgttcactcgcagcaacgggaatggccccaacatcaacaataacaacaacaacaatgggaagaatcccacacttgcccaagtcctggctcaacaggcacagcttatgaacatgatgatgcagcaacttcagaaccagcagaaccagggaaataaccatgcacctccccagaacaagttagcagaatttcttcgtgtgaggctacccactttctctagcaccactaatcctgttgaagctggtgattggctgcacgccatagagaagaagttggatttgcttcagtgcactgatcaggagaaggtctcatttgcatcacaccaactgcatggccctgcctctgagtggtgggatcacttccgccttaacaggactactgctgaacctatcacttggcttgaattcaccgctgctttccggaagacgcatataccatcgggagtggtgtctctcaagaagaaggaattcaggtcgctcacccagggatctcacacggtcaccgagtatctgcacgagttcaatcgtctggctcgctatgctccggaagatgtgcgcactgatgaagagcgccaggagaggttcttggaaggacttaatgatgagctttcttacccactaatgactggggattatcatgatttccagaagttagtggataaggctattcgccaggaggacaagtacaaccgcatggagcagaagaaacgccggattgctcacttcaaggcacaacaagggaatagtcagaggccgcatcttactttaggaccccagtccatgccacagggaggttcttcgtctgttgttcgtccgcagcgtcagttcttcaacaacaatgctggcaacaacatccgcaatcaagctccacgccctgttgcagctccaacacagcaacagcctgccaagagggagcaaggcagcaagcccggggtgtgcttcaactgtggagacctaggacattacgctgacaagtgtccgaagccccgacgcgtgaaggttgtccctgcccagagcaactctaccgcaccagcatcaaaggctcgtgtcaatcatgttgctgctgcagaagctcaaggtgctccagatgtgattttgggtacgttccttgttaactcagttcctgcaacagtgcttttcgattctggtgctacacattcatttttatctatgggttttgcgggaaatcatgggatggaagtagaagatcttagacgtcctttgatggttagtaccccgagtaatcaagcactctctttgcaacgtagcccctctgttagaatagaaattcaaggagtaccatttctggccaatcttatcctgttagaatccaaagaccttgatgtcatcctagggatggactggttagccagatataaaggtgtgatagactgtgccaacagaaaagtaactctcaccaacaatgatggtcgagttgtaactgttcatgcattatcttctgaatctttaaggtcaagtctgaaccaaatagctttggaagagattcccatagaacaggaatacccggacgtgttcccggacgatttacctggtatgccgcctaaaagagatattgaattcagaatagatctggtaccaggaacaaccccgatccataagagaccttatagaatggcagccaatgaattagcagaagtcaagaggcaagtagatgatttgcttcagaaaggatacatcagaccaagttcgtctccatggggagctccagttatttttgtggaaaagaaagaccatacccagaggatgtgtgtggactatcgtgcactaaatgatgtgactatcaagaataagtacccactgcccagaattgatgatttgtttgatcagcttaaaggtgccaccgttttctccaagatagatcctcgatcagggtatcaccagttgaggattaaagaagaagatatacctaagacggcttttaccactaggtatggattgttcgaatgtactgttatgtcttttggacttaccaatgcccccgctttcttcatgaacttgatgaataaggtgtttatggaatacctagacaagttcgaggtggtctttattgatgacattcttatctactcccgaacaaaagaagagcatgaagaacatctttgccttgcactagagaagctacgagaacatcaactgtatgccaagtttagcaagtgtgaattttggttgtctgaagtgaagttccttggtcacgtcatctcagccggaggagttgccgttgatcctagtaatgtggaatccgtaaccaactggaaacaaccgaagacagtttcagagattcgcagtttcctaggcctcgcaggatattatcggaggtttatagagaatttttccaagattgctaagcccatgacacgattacttcaaaaggatgtaaagtacaagtggtcagaagaatgtgagcagagttttcaagagttgaagaatcgcttaatatcagctcctattttgatttgacctgatccaaagaagggtttccaagtgtattgcgatgcatccaaacttgggttaggttgtgttctgatgcaagatgggaaggtggttgcctatgcatctcgtcagttacgtccgcatgagaagaactaccctactcatgatcttgagttagctgccgtggttcatgcgttgaagatttggcgtcattatcttttcggtactcgtacagaggtgtacactgatcacaagagtttaaagtatatttttactcagccagatctgaacatgagacaacggagatggttggaattaattaaggattatgacatgggaattcattatcacccgggaaaggttaatgttgtagcagatgctcttagcaggaaaggctattgcaatgctacggaaggacgacagttgccattggagttatgcaaggaatttgaaagattaaatttgggaattgtcagtagaggtttcgttgcagccttagaagcaaagcccactctaattgatcaagttagagaagctcaaattaatgaccctgatattcaagaaattaagaagaatatgagaagaggaaaagctatcggtttcttggaggatgagcaaggaactgtatggttgggtgagagaatctgtgtcccagacaacaaagatttgaaagacgcaattctaaaggaagcccataatactttatactccattcaccctggtagtaccaagatgtaccaggatctcaaggaaagattttggtgggcaagtatgaagcgtgagatagcggaatatgaagctgtgtgtgatgtttgccagcaggtcaaggcagaacatcagaaacccgccgggttgttgcagcctttgaagataccagaatggaagtgggaggaaatcggtatggatttcatcactggtctacccagaacgtcatcaggccatgactctatttgggtgatagtcgacagacttaccaaagtggctcatttcatcccagtaaagacaacatattccggaagtcggttggcggaattgtatatggcaaggattgtgtgtttgcatggcgtccctaagaaaatagtgtctgatcgaggtagtcagtttacttcaaagttttggaagaagcttcaagaagagatgggttctaagctgaacttcagtactgcttatcatccgcagacagacggacaaaccgaaagggtaaatcagattttggaagacatgttgagagcttgtgctttagacttcggtggaagttgggataagaatttgccttacgccggattctcgtacaacaacagttatcaagctagtctccaaatggctccttacgaagcactgtatggtcggaagtgccacactccgcttttgtgggatcaaacgggagaacgtcaggttttcgggactgatatcctgagggaagcagaagaaaaggtgaaaatcattcaagaaggattgcgtatggctcagtctcgccataagtgttatgccgacaatcgccgcagagatttgagttttgaagaaggagattatgtgtaccttcgtgtcacgcctcttcgaggggttcatcgcttccacactaaaggaaaattggcaccgcgttttgtgggaccttataagattgtcagtagaagaggagaggttgcttatcagttggagttacctcaatctttggcaggagtccataatgtgttccatgtgtcgcaattgaaaaagtgttttagggtatctatcgaagaagctaatcttgaacagatagaagtccaagaggatctgacctatgttgagaaaccaatccttatcttggaaacagatgagagaagaaccagaaatcgagttatccgtttttgtaaagttcagtggagtaatcactcggaagaagaatcaacttgggaacgagaagatgaattgcagtcagctcatccgcatctgttcgccagttctcccgaatctcgaggacgagattctgtt

SEQ ID NO: 13973 - DNA, 1518 bp, Oryza sativa
  Clone ID: TFbOSC15750j.C1.o3.gm
atggaggcagaagattggctatgcatcatagagaagaaactgacccttgtccggatgcgcgaagccgacaaagtgatcttcacagtaaaccaactggagggaccagctggcgattggtgggatacttacaaggaagctcgggaagaagatgctggagaacccacttgggatgaattcactgcagcttttcatgagaacttcgtgcctgctgcggtgatgcgtatgaagaagaacgagttcagaaggccgcgacaaggaaacacaacggtgcaagaatatctaaaccggttcactcagttgacccgctacgcaatcggagacctcgcagatgaagaggaaaagatcgacaagttcatagaagggctgaatgatgagttgcgtgggcctatgattgggcaagatcatgagagtttccagagtttgatcaataaggtcgttaggctggaaaacgaccggaaggttgtggagcacaatcgtaagaggaggcttgccatgaaccgcccacctcaggtggcaactcagcatcctaaaggagctgcctcatcaggatggaaaccaacggtggtaacaacgaaccgtcctaccgcacatagcaacttccacaggccggttaccactcagaaccgagctcctgcaccgaatcaggccgctactggagtaatgaggccaggaagctgtttcaattgtggagagtatgggcattttgccaacaaatgtcctcatctaaacaagacacccattcgcaccggagctaatgcaatggctattcacggggctgctacccctgctggtggacgaggagttagaaagcctatgatagtacactcgcctgggggtgagacccttgatatcatattgggcatggattggttaacaaagaacaaaggaattatcgactgtagacgtagagaggttaccctgaccacgccctggggatcggatatgagagcaactatggatcaagatcctagattgactgaacgtgccggaggcatattcaccatgctacctatgaaaggaatgcccgtagtgcagcgattccccgatgtatttccagaagatttacctggaatgccaccagatcgtgacatagagttcattattgacctgatacccggaactgcccccatatcgaagagaccatatcggatgtcagtcaatgagttggaggaacttaaaaagcaaatcagagagttgcaagagaagggatttgtacgccccagttcgtcaccttggggagccccagtgttattcgtcaaaaagaaggatggtagcatgagaatgtgtgtggactaccgctcactgaacgaagtaactatcaagaacaagtatctgctaccacggattgatgaccttttcgatcaacttaaaggagctaaggtgttctctaagattgaccttcgatcaggataccaccaactgaagattaggatcggagacatacccaagaccgcgttcttaacacgctatggattgtacgagttcacagtaatgtcgtttggtttgaccaacgccccg

SEQ ID NO: 13974 - DNA, 4408 bp, Oryza sativa
  Clone ID: TFbOSC17805j.C1.o1.np
atggcaagccgtcgtcgggcaacaaccagcaacgacgaaactcagacacctgacctaaccactctggctggggttatggccacccaaactcaacttctgcaagctatcgcgaacaaccaaggcaaccgcggggggtcaagctttggagagttcatgaggaccaagccacccacattcgccacagctgaagaacctatggatgctgaagattggttgagggtcattgagaagaagctaactcttgttcgagtacgtgaggccgataaagtgatctttgcggcaaaccaattggaaggaccagccggagactggtgggacacgtacaaagaagcccgggaagaagatgctggagaaccaaactgggaggaatttaccacagccttccgtgacaacttcgtgcctgccgcggtgatgaggatgaagaagaatgagttcaagagattacggcaagggaataccacagtgcaagagtacttgaaccgtttcactcagctggcgcgctacgcaactggagatcttgccgacgaagaggaaaagattgacaaattcattgaaggcttgaatgacgagttacgcgggcccatgattggacaagaccacgatagtttccagagtttaatcaataaggtcgttaggttggagaacgaccggaaggtcatggagcacaatcgtaaaaggaggcttgccatgaaccgcccgcctcagaccgcaccccagcgtcctaaagggacaacctccttggcatggagaccaacagtggtgacaaccagtcgacctgccgcctccagcaatttccacaggccggttaccattcagaaccgcgctcctgcaccgaatcaggccgccacaggatcagtaaggccaggaagctgtttcaactgtggagagtatgggcatttcgccaataaatgtcctcatccaaacaagacacccattcgcaccggagctaatgcgacggctattcacgggaccgccacccctgctactggacgaggtctattcaggaccccgcagactaacaggaccgctaccggctttggacgcgggcaagtgaaccacgttcgagctgaagaggcccaggaagatcaaggcgtactgatgggtatgttttcactcaactccactccagttaaagttctcttcgattcaggagcatcgcattcatttatatctttgaaagcaagtcaacaacacaatttaaccagagttaaattaagacaaccaatgttagtacattcacctgggggtgagatagcggtggatacagcttgcattgacgtacccatccgccttaggatgtggtatttccctccaatcttatggtactaataccccaaactcttgatgtcattttgggtatggattggttagcaaagcatagaggagtaattgactgtggacgtagagaagttaccctgaccacaccctggggatcggatatgcgagcaaccatggatcaagatcctaggctaaccgaacgtgccggaggtatatttaccatgctacccctaaagggaatgcccgtagtgcagcgatttcctgacgtgtttccagaagatttacctggaatgccaccagatcgtgacatagagtttattattgacctgatacccggaactgcccccatatccaagagaccatatcggatgccggtcaatgagttagaagaacttaaaaagcaaatcagggagttgcaagaaaagggatttgtacgcccagttcgtcaccttggggagctccagtgctattcgtcaagaagaaggatggtagcatgagaatgtgtgtggactaccgatcattgaatgaagtaactattaagaacaagtacccactaccaaggattgatgatcttttcgatcaactcaagggagctaaggtgttttcaaagatcgaccttcgatcaggataccaccaactgaagattagaaccgaagatatccccaagacagcgttttcaacacgctatggattgtatgagttcacagtgatgtcgtttggtctaaccaatgccccagcctacttcatgaatcttatgaacaaagtattcatggattatttagataagtttgtggtagtattcattgatgacattctagtctactccaaagacgaggaagaacatgcggaacacttacgattggtgctccagaaactccgaaagcacaagttatacgcaaaattcagcaagtgcgaattttggttgaaggaagtcgcttttctgggtcacgtaatctcagccggtggagtagcagtggaccctgcaaaagtagaggccgttacagaatggaaagcacccaagtcggtgaccgaaattcggagtttcctaggcttggccggatactaccgaaggttcattgaagggttctctaagatagcccgaccaatgacacaactacttaagaaggaaaagaagtttgtatggtcagaacagtgtcaggaaagctttgagcagctcaaagaaaaactgacctcggcacctattttagttcttcccgacatcaggaaagactttgttatatattgtgatgcgtcaaggcaaggactaggaggagtactgatgcaggagggaaaagttgtggcctatgcgtcgcgacaattgcgaccatatgaagaaaactaccctacccatgacctagaactcgcaactgtggttcatacgctaaagatttggagacattatctaattggaaaccattgcgatatctacactgaccacaagagtctaaagtatatcttcacccagtcagatctcaacttgaggcaaagacgatggttagaattaatcaaggactatgatttagaggttcactatcacccaggcaaagcaaacgttgtagccgacgctctgagtcgaaagagccattgcaatcatctgagaatggaagggatggtccctgagcttaggaaggaaatagctcagctgaacctacatatagtgcctcatggacagataaacaccctggacattcaacctcttttgagagcccaaatagaagaagcccagaaggacaacgaggaggtccgagaggtgaaggaacgcttagctgcaggacgtgcaaaagaattttcaaccgacggaaaagacgttctatggtataaaaagagaatttacatacccgaacagggtggactgaggggattaattttaaaggaagctcacgagtcggcatactcattacaccccggaagtaccaaaatgtaccaggatttgaaggtgggctactggtggcccaacatgaagagagacgtggccgaatacgtagcactttgcgacgtatgccaaaaggtgaaggctgaacaccagaggccggcaggtttgttgcaacctctcaggattcccgaatggaaatgggatgagataggcatggattttattgttggattgcccaaaaccgcaacaggatatgattccatttgggtaatcgtggatcgactcaccaagacggcaagattcatccccgtcaagacaaactatagcagtgcaaaactcgccgagttgtacatgaccaggatagtgtgtcttcatggtatacctaagaagattatatctgatcgaggcacacaatttacctcacatttctgggagaaagtccatgaagccctgggaagttacctcgcatttagcaccgcttatcatccacagacagatggccagacggagagaaccaaccaggtcctggaggacatgctgagggcttgtgctctggattttagcaaggactgggagaggtgtttgccctacgccgaattctcttacaacaacagctttcaagcaagcctaaagatgtcacccaatgaggcattgtttggtcgacgatgtcgtaccccgctaatgtggtccgagactggagaacgggcggtatttggacctgacattattcaagaagccgaagaaaagattcgcttggtccgtgatcgtctaaaagtagcacaatcacgacaaaagagttacgccgatactcgaagaagaaacctggaatttaaggaaggagattacatttatctaaaggtttctccgatgaggggaacaaaaaggtttaaggttaaaggaaaactggcaccaagatatgtggggccattccagatcatcgccaggcgaggagaagtcgcatatcagttacagctaccagaatatatcgccgatgtgcaccccgtcttccatgtgtcccaattaaagaaatgcttacgagtgtctgaagaacaagctccgctggaagagattcacattagcaatgatctcacatatccagaacacccgatccggatattggatgaagcagaaaggaggactaggagcaaagtgtggcgtatgtacaaggtacaatggagtaatcacaccgaggatgaagccacctgggaaggcgaagaattcttgaggacggagtacccgcatctattcggcaattgg

SEQ ID NO: 13975 - DNA, 4209 bp, Oryza sativa
  Clone ID: TFbOSC20335j.C1.o2.fg
atggcaagccgacgttgggcaacaaccagcaatgacgaaactcagacacccgacttaaccactctggccggagttatggccacccaaactcaacttctgcaagctatcgcgaacaaccaaggcaaccgcggagggtcaagctttggagagtttatgaggaccaagccacccacattcgccacagctgaagaacctatggatgctgaagattggttaaggatcattgagaagaagctaactcttgttcgagtacctgaggccgataaagtgatctttgcggcaaaccaattggaaggaccagccggagattggtgggacatgtacaaagaagcccgagaagaagatgctggagaaccaaactgggaggaatttaccatagccttccgtgacaacttcgtgcctgccgcggtgatgcggatgaagaagaatgagttcaggagactacggcaagggaataccacagtacaagagtacctgaaccgtttcactcagctggcacgctacgcgactagagatcttgccgacgaggaggaaaagatcgacaaattcattgaaggcttgaatgacgagttacgcgggcccatgattggacaagaccacgatagtttccagagtttaatcaataaggtcgttaggctggagaacgaccggaaggtcgtggagcacaatcgtaaaaggaggcttgccatgaaccgcccgcctcagaccgcaccccagcgtcctaaagggacaaccccctcggcatggagaccaacagtggtgacaaccagtcgacctgccgcctccagcaatttccactggccggttaccattcagaatcgctctcctgcgccaaatcaggccgccactggatcagtaaggccaggaagctgtttcaactgtggagagtatgggcattttgccaataaatgtcctcatccaaacaagacacccattcgcaccggagctaatgcaacggctattcacgggactgctacccctgttgctggacgaggtctattcaggactccgcagactaacaggaccgctaccggatttggacgcgggcaagtgaaccacgttcgagctgaagaggcccaggaagatcaaggcgtactgatgggtatgttttcactcaactccactccagttaaagttctcttcgattcaggagcatcgcattcatttatatctttgaaagcaagtcaacaacacaatttaaccagagttaaactaagacaaccaatgttagtacattcacctgggggtgagatagcagtggatacagcttgcattgacgtacccatccgccttagggatgtggtatttccctccaatcttatggtgctaataccccaaactcttgatgtcattctgggtatggattggttagcaaagcatagaggaataattgactatagacgtagagaagttaccctgaccacaccctggggatcggatatgagagcaaccatggatcaagatcctaggctaaccgaacgtgttggaggtatatttaccatgctacccctaaagggaatgcccgtagtgcagcgatttcctgatgtgttcccagaggatttacctggaatgccaccagatcgtgacatagagttcattattgacctgatacccggaactgccctcatatccaagagaccatatcggatgccggtcaatgagttagaagaacttaagaagcaaattagggagctgcaagaaaagggatttgtacgccccagttcgtcaccttggggagccccagtgctattcgtcaagaagaaagatggtagcataagaatgtgtgtggactaccgctcactgaacgaagtaactatcaaaaacaagtatccactaccacggattgatgatctttttgatcaactcaaaggagctaaggtgttctctaagattgaccttcggtcaggataccaccaattgaaaattagaaccagggacatacccaaaaccgcgttctcaacacgttatggattatatgagttcactgtaatgtcgtttggtttaaccaacgctccggcatactttatgaatcttatgaacaaagtgttcatggactacttggacaaatttgtggtggtattcatcgatgatattctaatctactccaaagatgaggaagaacatgcagagcacttgcaattggtactcgagaaacttcggaagcataagttatatgcaaaattcagcaagtgtgagttctggttaaaagaagtcgcttttctaggccacgtaatctcggccggtggagtagcagtggatcctgctaaagtggaggctgtcacggaatggaaagcacccaaatctgtgactgaaattcggagttttctaggcttggctggatactaccgacggttcattaaagggttctctaagatagcccgaccaatgacacaactactcaagaaggaaaagaagtttgtgtggcaaggactaggaggagtactgatgcaggacggaaaagttgtggcctatgcgtcgcgacaattgcgaccacatgaggaaaactaccctacccatgacctagaactcgcagctgtggttcatgcgctaaagatttggagacattatctaattggaaaccattgcgatatctacactgaccacaagagtctaaagtatatcttcacccagtcagatctcaacttgaggcaaagacgatggttagaattaatcaaggactatgatttagaggttcactatcacccaggcaaagcaaacgtcgtggccgacgctctgagtcgtaagagccattgcaatcatctgagaatggaagggatggtccctgagcttagggaagaaatagctcagctgaacttacatatagtaccccgtggacagataaacaccctggacattcaacctcttttgagaacccaaatagaagaagcccagaaggacaacgaggaaatccgagaggtgaaggaacgcttagctgcaggacgtgcaaaggaattttcaaccgacgaaaatgatgttctatggtataaaaagagaatttacgtacccgaacagggtggactgaggggattaattttaaaggaagctcacgaatcggcttattcattacaccccggaagtaccgaaatgtaccaggatttgaaggagggctactggtggcccaacatgaagagagatgtggccgaatacgtagcactctgcgacgtatgccagaaggtgaaggctgaacaccagaggccggcagtatgtcttcatggtgtacctaagaaaattatatctgatcggggcacactgtttacctcacatttctgggagaaagtccatgaagccgtaggaagttacctcgcatttagcaccgcttatcatccacagacagatggccagacggagagaaccaaccaggtcctggaggacatgctgagggcttgtgctatggattttagcaaggactgggagagatgtttgccctacaccgaattctcctacaacaacagctttcaagcaagcctaaagatgtcacccaatgaggcattgtttggtcgaagatgtcgtaccccgctaatgtggtccgagactagagaacgggcggtatttggacctggcattattcaagaagccgaagaaaaggttcgcttgatccgtgaccgtctaaaagtggcacaatcacgacagaagatttacgccgacacccgaagaagaatcctggagtttaaggaagcagattacgtttatctaaaggtttctccgatgaggggaacaaaaaggtttaaggtcaaaggaaaactggcaccaaaatatgtgggaccattccagatcatcgccaggcgaggagaagttgcatatcagttacagttaccagagaatatcgcggatgtgcacccagtcttccatgtgtctcagctaaagaaatgtttacgaatgccggaagagcaagctccgctggaagagattcacattagcaatgatctcacatatccagaacacccgatccggatattggatgaagccgaaaagaggactaggagcaaagtgtggcgtatgtacaaggtacaatggagcaatcatactgaggatgaagccacctgggaaagtgaagaatttttgaggacggaatacccgcatctattcgaaaactggtatgaaatctcgggacgagcattatttaaggggaagcgggagatgaagcctcggaggatccctatgcctactaccaggagggagatgaagacgatggcgttcagtaggtcttag

SEQ ID NO: 13976 - DNA, 3666 bp, Oryza sativa
  Clone ID: TFbOSC20639j.C1.o2.fg
atggcaagccgacgtcgggcaacaaccagcaatgacgaaactcagacacccgacttaaccactcttgctggagttatggccacccaaactcaacttctgcaagctatcgcgaacaaccaaggcaaccgcggaaggtcaagctttggagagtttatgaggaccaagccacccacattcgccacagctgaagaacctatggatgctgaagattggttaaggatcattgagaagaagctaactcttgttcgagtacgtgaggccgataaagtgatctttgcggcaaaccaattggaaggaccagccggagattggtgggacacgtacaaagaagcccgagaagaagatgctgtagaaccaaactgggaggaatttaccacagccttccgtgacaacttcgtgcctgccgcagtgatgcggatgaagaacaatgagttcaggagactacagcaagggaataccacagtacaagagtacctgaaccgtttcactcagctggcgcgctacgcgactagagatcttgccgacgaggaggaaaagatcgacaaattcattgaaggcttgaatgacgagttacgcgggcccatgattggacaagaccacgatagtttccagagtttaatcaataaggtcgttaggttggagaacgaccggaaggtcgtggagcacaatcgtaaaaggaggcttgccatgaaccgctcgcctcagaccgcaccccagcgtcctaaagggacaacctcctcggcatggagaccaacagtggtgacaaccagtcgacctgccgcctccagcaatttccacaggccggttaccattcagaaccgcgctcctgcaccgaatcaggccgccactggatcagtaaggcctggaagctgtttcaactgtggagagtatgggcatttcgccaataaatgtcctcatccaaacaagacacccatttgcaccggagctaatgcaacggctattcacgggactgctacccctgccgttggacgaggtctattcaggactccgcagactaacaggaccgctaccggatttggacgcgggcaagtgaaccacgttcgagctgaagaggcccaggaagaccaaggcgtactgatggaagatttacctggaatgccaccagatcgtgacatagagttcattattgacctgatacccggaactgcccccatatccaagagaccatatcggatgccggtcaatgagttagaagaacttaaaaagcaaattagggagttgcaagaaaagggatttgtacgccccagttcgtcaccttggggagccccagtgctattcgtcaagaagaaagatggtagcatgagaatgtgtgtggactaccgctcactgaacgaagtaactatcaaaaacaagtatccactaccacggattgatgatctcttcgatcaacttaagggagctaaggtgttttcaaagattgaccttcggtcaggataccaccaattgaaaattagaaccggggacatacccaaaaccgcgttctcaacacgctatgggttatatgagttcaccgtaatgtcgtttggtttaaccaacgctccggcatactttatgaatcttatgaacaaagtgttcatggactacttggacaaatttgtggtggtattcatcgatgatattttaatctactccaaagatgaggaagaacatgcggaacacttgcgattggtactcgagaaacttcggaagcataagttatatgcaaaattcagcaagtgtgagttctggttaaaagaagtcgcttttctaggccacgtaatctcggccggtggagtagcagtggatcctgctaaagtggaggctgtcacggaatggaaagcacccaaatctgtgactgaaattcggagttttctaggcttggctagatactaccgaaggttcattgaagggttctctaagatagcccgaccaatgacacaactactcaagaaggaaaagaagtttgtgtggtcagagcagtgtcaggaaagctttgagcagctcaaagaaaagctgacctcggcgcctattttagttcttcccgacatcaggaaagactttgttatatattgtgatgcttcaaggcaaggactaggaggagtactgatgcaggacggaaaagttgtggcctatgcgtcgcgacaattgcgaccacatgaggaaaactaccctacccatgacctagaactcgcagctgtggttcatgcgctaaagatttggagacattatctgattggaaaccattgcgatatctacactgaccacaagagtctgaagtatatcttcacccagtcagatctcaacttgaggcaaaggcgatggttagaattaatcaaggactatgatctagaggttcactatcacccaggcaaagcaaacgttgtggccgacgctctgagtcgtaagagccattgcaattatctgagaatggaagggatggtccctgagcttagggaggaaatagctcagctgaacctacctcgtgggcagataaacaccctggacattcaatctcttttgagaacccaaatagaagaagcccagaaggacaacgaggaaatccgagaggtgaaggaacgcttagctgcaggacgtgcaaaggaattttcaaccgacgaaaaagatgtcctatggtataaaaagaggatttacgtacccgaacagggtggactgaggggattaattttaaaggaagctcacgaatcggcatattcattgcaccccggaagtacgaagatgtaccaagatctgaaggaaggatactggtggcccaacatgaagagagatgtggcggaatacgtagcactctgtgatgtgtgccaaaaggtgaaggctgagcatcagcgaccggcaggcttgctgcaaccccttaggattcccgaatggaaatgggatgagacagatggccagacggagagaaccaaccaggtcctagaagacatgctgagggcttgtgctctggattttagcaaggactgggagagatgtttgccctacgccgaattctcctacaacaacagctttcaagcaagcctaaaaatgtcacccaatgaggcattgtttggtcgacgatgtcgtaccccgctaatgtggtccgagactggagaacaggcggtatttgggcctgacattattcaagaagccgaagaaaaggttcgcttgatccgtgaccgtctaaaagtagcacaatcacgccaaaagagttatgccgacacccgaagaagaaacctggaatttaaggagggagattacgtttatctaaaggtttccccgatgaggggaacaaaaaggtttaaggtcaaaggaaaactggcaccaagatatgtggggccattccagatcatcgccaggcgaggagaagttgcatatcagttacagttaccagagaatatcgcggatgtgcacccagtcttccatgtgtctcagctgaagaaatgtttacgagtgccggaagagcaagccccgctggaagagattcacattagcaatgatctcacatatccagaacacccgatccggatattggatgaagccgaaaagaggactaggagcaaagtgtggcgtatgtacaaggtacaatggagcaatcacactgaggatgaagccacatgggaaagcgaagaattcttgaggacggagtacccacatctattcgaaaactggtaa

SEQ ID NO: 13977 - DNA, 3894 bp, Oryza sativa
  Clone ID: TFbOSC400179j.C1.o9.fg
atggcaagccgacgtcgggcaacaaccagcaatgacgaaactcagacacccgacttagccactctggccggagttatggccacccaaactcaacttctgcaagctatcgcgaacaaccaaggcaaccgcggagggccaagctttggagagtttatgaggaccaagccacccacattcgccacagctgaagaacctatggatgctgaagattggttaaggatcattgagaagaagctaactcttattcgagtacgtgaggccgataaagtgatctttgcggcaaaccaattggaaggaccagccggagactggtgggacacgtacaaagaatcccgagaagaagatgctggagaaccaaactgggaggaatttaccacagccttccgtgacaacttcgtgcctgccgcagtgatgcggatgaagaagaatgagttcaggagactacggcaagggaataccacagtacaagagtacctgaaccatttcactcagctggcgcgctacgcgactagagatcttgccaacgaggaggaaaagatcgacaaattcattgaaggcttgaatgacgagttacgcgggcccatgattggacaagaccacgatagtttccagagtttaatcaataaggtcgttaggttggagaacgaccggaaggtcgtggagcacaatcgtaaaaggaggcttgccatgaaccgcccgcctcagaccgcaccccagcgtcctaaagggacaacctcctcggcatggagaccaacagtggtgacaaccagtcgacctgccgcctccagtaatttccacaggccggttaccattcagaaccgcgctcctgcaccgaatcaggccgccactggatcagtaaggccaggaagttgtttcaactgtggagagtatgggcatttcgccaataaatgtcctcatccgaacaagacacccattcgcaccggagctaatgcaacggctattcacgggactgctacccctgctgctggacgaggtctattcaggactccgcagactaacaggaccgctaccgaatttggacgcgggcaagtgaaccacgttcgagctgaagaggcccaggaagaccaaggcgtactgatgggagcatcgcattcatttatatctttgaaagcaagtcaacaacacaatttaatcagagttaaactaagacaaccaatgttagtacattcacctgggggtgagatagcagtggatacagcttgcattgacgtacccatccgccttcgggatgtggtatttccctccaatcttatggtgctaataccccaaactcttgatgtcattctgggtatggattggttagcaaagcatagagggataattgactgtagacgtagagaagttaccctgaccacaccctggggatcggatatgagagcaaccatggatcaagatcctaggctaaccgaacgtgccggaggtatatttaccatgctacccctaaagggaatgcccgtagtgcagcgatttcctgatgtgttcccagaagatttacctggaatgccaccagatcgagacacagagttcattattgacctgatacccggaactgcccccatatccaagagaccatatcggatgccggtcaatgagttggatgaacttaaaaagcaaattagggagttgcaagaaaagggatttgtacgccccagttcgtcaccttggggagccccagtgctattcgtcaagaagaaagatggtagcatgagaatgtgtgtggactaccgctcactgaacgaagtaactatcaaaaacaagtatccactaccacggattgatgatctttttgatcaactcaaaggagctaaggtgttctctaagattgaccatcggtcaggataccaccaattgaaaattagaaccggggacatacccaaaactgcgttctcaacacgctatggattatatgagttcaccgtaatgtcgtttggtttaaccaacgctccggcatactttatgaatcttatgaacaaagtgttcatggactacttggacaaatttgtggtggtattcatcgatgatattctaatctactccaaagatgaggaagaacatgcggaacacttgcgattggtactcgagaaacttcggaagcataagttatatgcaaaattcagcaagtgtgagttctggttaaaagaagtcgcttttctaggccacgtaatctcggccggtggagtagcagtggatcctgctaaagtggaggctgtcacagaatggaaagcacccaaatctgtgactgaaattcggagttttctaggcttggctggatactaccgacggttcattgaagggttctctaagatagcccgaccaatgacacaactactcaagaaggaaaagaagtttgtgtggtcagaacagtgtcaggaaagctttgagcagctcaaagaaaagctgacctcggcgcctattttagttcttcccgacatcaggaaagacttcgttatatattgtgatgcgtcaaggcaaggactaggaggagtactgatgcaggacggaaaagttgtggcctatgcgtcgcgacaattgcaaccacatgaggaaaactaccctacccgtgacctagaactcgcagctgtggttcatgcgctaaagatttggagacattatctgattggaaaccattgcgatatctacactgaccacaagagtctaaagtatatcttcacccagtcagatctcaacttgaggcaaaggcgatggttagaattaatcaaggactatgatctagaagttcactatcacccaggcaaagcaaacgttgtggccgacgctctgagtcgtaagagccattgcaatcatctgagaatggaagggatgatccctgagcttagggaggagatagctcagctgaacctacatatagtacctcgtggacagataaacaccctggacattcaacctcttttgagaacccaaatagaagaagcccagaaggacaacgaggaagtccgagaggtgaaggaacgcttagctacaggacgtgcaaaggaattttcaaccgacgaaaaagatgttctatggtataaaaagagaatttacgtacccgaacagggtggactgaggggattaattttaaaggaagctcacgaatcggcatattcattgcaccccggaagtaccaagatgtaccaagatctgaaggaaggatactggtggcccaacatgaagagagatgtggcggaatacatagcactctgtgacgtgtgccaaaaggtgaaggctgagcatcagcgaccggtaggcttgctgcaaccccttaggattcccgaatggaaatgggatgagataggtatggattttattgttggattgcccaaaaccgcaacaggatatgattccatttgggtgatcgtggatcgactcaccaagacggcgagattcattcccgttaagacaaattatagcagtgctaagctagccgagttatacatgaccaggatagtatgtcttcatggtgtacctaagaaaattacatctgatcggggcacacagtttacctcacatttctgggagaaagtccatgaagccctaggaagttacctcgcatttagcacagcttatcatccacagacagatggccagacagagagaaccaaccaggtcctggaggaaatgctgagggcttgtgctctggattttagcaaggactgggagagatgtttgccctacgccgaattctcctacaacaacagctttcaagcaagcctaaagatgtcacccaatgaggcattgtttggtcgacgatgtcgtaccctgctaatgtggtccgagactggagaacaggcggtatttggacctgacattattcaagaagccgaagaaaaggttcgcttgatccgtgaccgtctaaaagtagcacaatcatga

SEQ ID NO: 13978 - DNA, 3093 bp, Oryza sativa
  Clone ID: TFbOSC400477j.C1.o39.fg
atggagaccaacagtggtgacaacgcctccagcaatttccacaggccggttaccattcagaaccgagctcctgcaccaaatcaggccgccactggaccagtaaggccaggaagctgtttcaactgtggggagtatgggcatttcgccaacaaatgcccccatccaaacaagacacctattcgcaccggagctaatgcaacgactattcacggaactgctacccctgctgctggacgaggagcatcgcattcatttatatctctgaaagcaagtcaacaacacaaattaaccagagttaaactaaggcaaccaatgttagtacattcacctgggggtgaaatagccgtggacacagcttgcattgatgtacctattcgccttagggatgtggtgtttccctccaaccttatggttttgataccacagacccttgatgtcatattgggtatggattggttagcaaagcatagaggagtaattgactgtagacgtagagaagttaccctgaccacaccctggggatcggatatgagagcaaccatggatcaagatcctaggctaaccgaacgtgccggaggtatatttaccatgctacccctaaagggaatgcccgtagtgcagctatttcctgatgtgttcccagaagatttacctggaatgccaccagatcgtgacatagagttcattattgacctgatacccggaactgcccctatatccaagagaccatatcggatgctggtcaatgagttagaagaacataaaaagcaaattagggagttgcaagaaaagggatttgtacgccccagttcgtcaccttggggagccccagtgctattcgtcaagaagaaggatggtagcatgagaatgtgtgtggactaccgctcactgaacgaagtaactatcaaaaacaagtatccactaccacggattgatgatctttttgatcaactcaaaggagctaaggtgttctctaagattgaccttcgattaggataccaccaattgaaaattaggaccggggatatacccaaaaccgcgttctcaacacgctatggattatatgagttcaccgtaatgtcgtttggtttaaccaacgccccggcatactttatgaatcttatgaacaaagtgttcatggactacttggaaaaatttgtggtggtattcatcgatgatattctaatctactccaaagatgaggaagaacatgcggaacacttgcgattggtactcgagaaacttcggaagcataagttatatgcaaaattcagcaagtgtgagttctggttaaaagaagtcgcttttctgggtcacgtaatctcagccggtggagtagcagtggaccctacaaaagtggaggccgttacggaatggaaagcacccaagtcggtgaccgaaattcagagttttctaggcttggctggatactaccgaaggtttatcgaggggttctctaagatagcccgacccatgacacaactactcaagaaggaaaagaagtttgtgtggtcagaacagtgtcaggaaagctttgagcagctcaaagaaaagctgacctcggcgcctattttagttcttcccaacatcaggaaagactttgttatatattgtgatgcatcaaggcaaggactaggaggagtactgatgcaggacggaaaggttgtggcctatgcgtcacgacaattgcgaccacatgaggaaaattaccctacctatgacctagaactcgcagctgtggttcatgcgctaaagatttggagacattatctgatcggaaaccattgcgatatctacactgaccacaagagtctgaagtatatcttcacccaatcagatctcaacttgaggcaaaagcgatggttagaattaatcaaggactatgatctagaggtaaacaccctggacattcaacctcttttgagaacccagatagaggaagcccagaaggacaacggagagatccaggaggtgaaggaacgcatggccactggtcatgtgaaagaattctcaatggatgagaagaaaacactgtggtataaaaagagaatctacgtacctgaacagggtggactgaggggattaattttaaaggaagctcatgaatcggcatattcattgcaccccggaagtacgaagatgtaccaagatctgaaagaaggatactggtggcccaacatgaagagagatgtgaaggaatacgtagcactctgtgacgtgtgccaaaaggtgatcgtggatcgactcaccaagatggcgaggttcatccctgttaagacaaattacagcagtgccaagctagccgagttatacatgaccaggataacagatggccagacggagagaaccaaccaggtcctggaggacatgctgagagcttgtgcgttggactttagcaaagacggggagagatgtttgccctacgccgaattctcctacaacaacagctttcaagcaagcctaaagatgtcacccaatgaggcattgtttggtcgacgatgtcgtaccccgctaatgtggtccgagactggagaacgggcggtatttggagctgacattattcaagaagccgaagaaaaggtttgcttgatccgtgaccgtttaaaagtagcacaatcacgacaaaagagttacaccgacacccgacgaagaaacctggaatttaaggaaggagattacgtttatctaaaggtttctccgataaggggaataaaaaggtttaaggtcaaaggaaaactggcaccaagatatgtgggaccattccagatcatcgccagacaaggagaagttgcataccagttacagctaccagaaaatatcgccgatgtgcacccagtctttcatgtgtctcagttaaagaagtgcttgcgagtgccggaagaacaagctacgttggaagaaattcatattagcaatgatctcacgtatccagaacacccagtccggatattggatgaagctgaaaagaggactagaaccaaagtgtggcatatgtacaaggtacaatggagtaatcacactgaggatgaagccacttgggaaagcgaagaatttttgaggacggaatacccgcatctgttcgagaactggtaa

SEQ ID NO: 13979 - DNA, 4483 bp, Oryza sativa
  Clone ID: TFbOSC400603j.C1.o12.np
atgggcgtaccccgctcagagggatacgtcattgagctacaccggctgatgaggcgtctgcgataccccagatttccgatctaccgagtgagacaatgtggatctgtttgggaggctcgggtcgaggttcacacgctagttccttcggagttagactacagcttcccgacacgccaccgtcgcgacttgccggagaccgcgatgcaggatgcagcacgggaggccttcctccgacttagctctatccaccgagctgagttggcgagtactgagtttgctcaccacccgtttcgagaggagagcaactccgtctgcacagttcaggacacaccttgctgctacaacccgatagtgacccgactgtcacgatgggctgaggtagtagacgacttttacgaggaggctctgttagagatcgacgaccagcagaggcgtgtgggagagttagagaccgaggtgactgacctcacagcgcagcagcttcagttggaggaggagcaccaggcttggggcagtgagatagactcactgaaggcacagctccagccgggttccagtttggagactccgatccaggtcgactccgagacagaggggaccgacaccgagccagagaccgagccagacatcactgacccttcagaggatgagactcttgttcctcgcatcaccttcctcggaggacctcgcaccctcagcactgcccgcaagagcacacgacctccgggcaagaagcccaagccagatccagaggccactacttccgagccgtggggactcagggtcattgagaagaagctaactcttgttcgagtacgggaggccgataaagtgatctttgaggcaaaccaattggaaggaccagccggagactggtgggacacatacaaagaagcccgagaagaagatgctggagaaccaaactgggaggaatttaccacagccttccgtgacaacttcgtgcctgccgcggtgatgcggatgaagaagaatgagttcaggagactacggcaagggaataccacagtacaagagtacctgaaccgtttcactcagctggcgcgctacgcgactggagatcttgccgacgaggaggaaaagatcgacaaattcattgaaggcttgaatgacgagttgcgcgggcccatgattggacaagaccacgatagtttccagagtttaatcaataaggtcgttaggctggaaaacgaccggaaggtcgtggagcacaatcgcaaaaggaggcttgccatgaaccgcccgcctcagcccgtaccctagcgtcataaagggacaacctcctcagtatggagaccaacagtggtgacaaccaatcgtcctaccgcatccagcaatttccacaggctgattaccatccagaaccgagctcctgcaccgaatcaagccgccactggatcagtaagactaggaagttgtttcaactgtggagagtatgggcattttgctaataaatgtcctcatccaaacaagacacccatttgcaccggagctaatgcaacggctattcacgggactgctacccctgctgctggacgaggtctattcgggactccgcagactaacaggaccactaccggatttggacgcgggcaagtgaaccatgttcgagctgaagaggcccaggaagaccaaggcgtactgatgggtatgttttctatcaactccactccagttaaagttctcttcgattcaggagcatcgcattcatttatatctttgaaagtaagtcaacaacacaatttgaccagagttaaattaagacaaccaatgttagtacattcacctgggggtgagatagcagtggatacagcttgcattgatgtacccatccgccttagggatgtggtatttccctccaatcttatggtgctgatgccccaaactcttgatgtcatattgggtatggattggttaacaaagcataggggagtaatcgactgtagacgtagagaagttaccctgaccacaccctggggatcggatatgagagcaaccatggatcaagatcctagactaaccgaacgtgccggaggcatatttaccatgctaccccaaaaaggaattcccgtagtgcagcgatttcctgatgtgttcccagaagatttacctggaatgccaccagatcgtgacatagagttccttattgacctgatacccggaactgcccccatatccaagagaccatatcggatgccggtcaatgagttggaggaacttaaaaagcaaattagagagttgcaagaaaagggatttgtacgccccagttcgtcaccttggggagccccagtgctattcgtcaagaagaaagatggtagcatgaggatgtgtgtagactaccgttcactgaacgaagtaactatcaaaaacaagtatccactaccacggattgatgatctttttgatcaactcaaaggagccaaggtgttctctaagattgaccttcgatcaggataccatcaattgaagattaggaccggggatatacctaagaccgcgttctcaacgcgttatggattgtatgaattcacagtgttgtcgtttggattaaccaacgccccgggcatattttatgaatcttatgaataaagtgttcatggattacctggacaaatttgtggtagtattcatcgatgatattttaatctactccagagatgaggaagaacatgcggaacacttgcgattggtactcgagaaacttcggaagcataaattatatgcaaagtttagtaaatgtgagttctggttaaaagaagtcgcttttctaggccacgtaatctcagccggtggagtagcagtggatcctgctaaagtggaggccgttacggaatggaaagcacccaaatctgtgactgaaattcggagttttctaggcttggccggatactaccgaaggtttactgaaggattatctaagatagcccgaccaatgagacaactactcaagaaggaaaagaagtttgtatggtcagaacagtgtcaggaaagctttgagcagctcaaagaaaagctgacctcggcacctattctagttcttcccgacatcaggaaagactttgttatatattgtgatgcgtcaaggcaaggactaggaggagtactgatgcaggacggaaaggttgttgcctatgcgtcgcgaaaactgcgaccacacgaggaaaattaccctacccatgacctagaactcgcagctgtggttcatgcgctaaagatttggagacattatctaattggaaaccattgcgatatctacactgaccacaagagtctgaagtatattttcacccagtcagatctcaacttgaggcaaaggcgatggttggaattaatcaaggattatgacttggaggttcactatcacctcggcaaggcaaacgtggtggccgacgctttgagtcggaagagccattgcaatcatctgaggacggaaggaatggctcctgagcttaaggaggaaatagcccaactaaacctacatatagaagctcacgaatcagcatattcattgcaccccggaagtacgaagatgtaccaagatctgaaggacggttactggtggcccaacatgaagagagatgtggcagaatacgtagcactctgtgacgtgtgccagaaggtgaaggctgagtaccagagaccggcagaccgactcaccaagacagcgagattcattcccgttaagacaaattatagcagtgccaagctagtcgagttatacatgaccaggatagtgtgtcttcatggtatacctaagaggattatatctgatcgaggcacacagtttacctcgcatttctgggagaaagtacatgaagccctaggaagttaccttgcgtttagcacagcttatcacccacaaacagatggccagacagagagaacaaaccaggtcttggaggacatgctgagagcttgtgcattggattttagcaaagactgggagagatgtttgccctacaccgaattctcctacaacaacagtttccaagcaaacctaaagatgtcgccaaatgaggcattatttggtcgacgatgtcgcaccccgctaatgtggtccgagactggagaacgggcggtatttggacctgacattatccaagaagccgaagaaaaggttcgcttgatccgtgaccgtttaaaggtggcacaatcacgacaaaagagttacaccgacacccgaagaagaaacctagaatttaaggaaggagattacgtctatctaaaggtttctccgatgagagctccaccgttctcccctctcctcactccatctccccctcctctgcctcttccccttctccacgcgccgccgtcgtcgtgccgccgcgtcgctgcctttgagccgccgcgccgccgccctcgtgctgtcgtgccgccgcattcgtgccaccgcgccaccgcctcagtgtgccgcgccgtgcgccgtcgtcgccgccgccgccgtcggtgagctgctgccccc

SEQ ID NO: 13980 - DNA, 4413 bp, Oryza sativa
  Clone ID: TFbOSC400800j.C1.o10.fg
atggcaagccgacgtcgggcaacaaccagcaatgacgaaactcagacacccgacttaaacactctggccggaattatggccacccaaactcaacttctgcaagctatcgcgagcaaccaaggcaaccgcggagggtcaagctttggagagtttatgaggaccaagccacccacattcgccacagctgaagaacctatggatgctgaagattggttaaggatcattgagaagaagctaactcttgttcgagtacgtgaggccgataaggtgatctttgcggcaaaccaattggaaggaccagccggagattggtgggacacgtacaaagaagcccgagaagaagatgctggagaaccaaactgggaggaatttaccacagccttccgtgacaactttgtgcctgccgcggtgatgcggatgaagaagaacgagttcaggaaactacggcaagggaataccacagtacaagagtacctgaaccgtttcactcagctggcgcgctacgcaactagagatcttgccgacgaagaggaaaagatcgacaaattcattgaaggcttgaatgacgagttacgcgggcccatgattggacaagaccacgatagtttccagagcttaatcaataaggtcgtcaggctggagaacgaccggaaggtagtggagcacaatcgtaaaaggaggcttgccatgaaccgcccgcctcagaccgccccccagcgtcctaaagggacaaccccctcagcatggagaccaacagtggtgacaaccagtcgacctgccgcctccagcaatttccacaggccggttaccattcagaaccgcgctcctacaccgaatcaggccgccactggatcagtaaggccagggagctgcttcaactgtggagagtatgggcatttcgctaataaatgtcctcatccaaacaagacacccattcgtaccggagctaatgcaacggctattcacggtactgctacccctgctgctggacgaggtctattcaggactccgcagactaacaggaccgctaccggatttggacgcgggcaagtgaaccatgttcgagctgaagaggcccaggaagaccaaggcgtactgatgggtatgttttcactcaactccactccagttaaagttctcttcgattcaggagcatcgcattcatttatatctttgaaagcaagtcaacaacacaatttaaccagagttaaattaagacaaccaatgttagtacattcacctgggggtgagatagcagtggatacagcttgcattgacgtacccatccgccttagggatgtggtatttccctccaatcttatggtgctaataccccaaactcttgatgtcattttgggtatggattggttagcaaagcatagaggagtaattgactgtagacgtagagaagttaccctgaccacaccctggggatcggatatgagagcaaccatggatcaagatcctaggctaaccgaacgtgccggaggtatatttaccatgctacccctaaagggaatgccaatagtgcagcgatttcctgatgtgttcccagaagatttacctggaatgccaccagatcgtgacatagagttcattattgacctgatacccggaactgcccccatatccaagagaccatatcggatgccggtcaatgagttagaagaacttaaaaagcaaatcagggagttgcaagagaagggatttgtacgccccagttcgtcaccttggggagcccaagtgttgtttgttaaaaagaaagacggtagcatgagaatgtgtgtagactaccgatcactgaacgaagtaactatcaaaaataagtatccactaccacggattgataacctcttcgaccaacttaagggagctaaggtgttttcaaagatagaccttcgatcaggataccaccaactgaagattaggaccgaggatatccccaaaaccgcgttttcaacacgctatgggttgtatgaattcacagtaatgtcgtttggtctaaccaatgccccagcatacttcatgaatcttatgaacaaagtattcatggaatacttggataagtttgtggtggtattcattgatgacattctgatctactccaaagatgaggaagaacatgcggaacacttacgattggttctccagaaacttcggaagcataagttatatgcaaaattcagcaagtgcgagttctggttaaaagaagtcgcttttctaggccacgtaatctcggccggtggagtagcagtggatcctgctaaagtggaggctgtcacggaatggaaagcacccaaatctgtgactgagattcggagttttctaggcttggctagatactaccgaaggttcattgaagggttctctaagatagcccgaccgatgacacaactactcaagaaggaaaagaagtttgtatggtcagaacaatgtcaggaaagctttgaacagcttaaagaaaagctgacctcggcacctattttagttcttcccgacatcaggaaagactttgttatatattgtgatgcgtcgaggcaaggactaggaggagtactgatgcaggacggaaaagtggtggcctatgcgtcgcgacaattgcgaccacatgaggaaaactaccctacccatgacctagaactcgcagctgtggttcatgcgctaaagatttggagacattatctgattggaaaccattgcgatatctacactgaccacaagagtctaaagtatatcttcacccagtcagatctcaacttgaggcaaaggcgatggttagagttaatcaaggactatgatttagaggttcattatcacccaggcaaagcaaacgttgtggccgacgctctgagtcgtaagatccattgcaatcatctgagaatggaagggatggtccctgagcttagggaggaaatagctcagctgaacctacatatagtaccccgtggacagataaacaccctggacattcaacctcttttgagaacccaaatagaagaagcccagaaggacaacgaggaagtccgagaggtgaaggaacgcttagctgcaggacgtgcaaaggaattttcaaccgacgaaaaagatgttctatggtataaaaagagaatttacgtacccgaacagggtggactgaggggattaattttaaaggaagctcacgaatcggcatattcattgcaccccggaagtacgaagatgtaccaagatctgaaggaaggatactggtggcccaacatgaagagagatgtggccgaatacgtagcactctgtgacgtatgccagaaggtgaaggctgaacaccagaggccggcaggtttgttgcaacctctcaggattcccgaatggaaatgggatgagataggtatggactttattgttggattgcccaaaaccgcaacaggatatgattccatttgggtgatcgtggatcgactcaccaagacggcgagattcattcccgttaagacaaattatagcagtgctaagctagccgagttatacatgaccaggatagtatgtcttcatggtgtaccaaagaaaattatatctgatcggggcacacaatttacctcacatttctgggagaaagtccatgaagccctaggaagttatctcgcatttagcacagcttatcatccacagacagatggccagacggagagaaccaaccaggtcctggaagacatgctgagggcttgtgctctggattttagcaaggattgggagagatgtttgccctacgccgaattctcctacaacaacagctttcaagcaagcctaaagatgtcacccaacgaggcgttgtttggtcgacgatgtcgtaccccgctaatgtggtccgagacgggagaacgggcggtatttggacctgacattattcaagaggccgaagaaaaggttcgcttgatccgcgaccgtctaaaaatagcacaatcacgacaaaagagttacgccgacacccgaagaagaaacctggaatttaaggagggagattacatttatctaaaggtttctccgatgaggggaacaaaaaggtttaaggtcaaaggaaaactggcaccaagatatgtgggaccattccagatcatcgccaggcgaggagaagttgcatatcagttacagttaccagagaatatcgcggatgtgcacccagtcttccatgtgtctcagctaaagaaatgtttacgagtgccggaagagcaagctccgctggaagaggttcacattagcaatgatctcacatatccagaacacccgatccggatattggatgaagccgcaaagaggactaggagcaaagtgtggcgtatgtacaaggtacaatggagcaatcacactgaggaggaagccacctgggaaagtgaagaatttttgaggacggaatacccgcacctattcgaagactggtaa

SEQ ID NO: 13981 - DNA, 4266 bp, Oryza sativa
  Clone ID: TFbOSC401478j.C1.o74.fg
atggcaagccgacgtcgggcaacaaccagcaatgacgaaactcagacacccgacttaaacactctggccggaattatggccacccaaactcaacttctgcaagctatcgcgaacaaccaaggcaaccgcggagggtcaagctttggagagtttatgaggaccaagccacccacattcgccacagctgaagaacctatggatgctgaagattggttaaggatcattgagaagaagctaactcttgttcgagtacgtgaggccgataaagtgatctttgcggcaaaccaattggaaggaccagccggagattggtgggacacgtacaaagaagcccgagaagaagatgctggagaaccaaactgggaggaatttaccacagccttccgtgacaactttgtgcctgccgcggtgatgcggatgaagaagaatgagttcaggagactacggcaagggaataccacagtacaagagtacctgaaccgtttcactcagctggcgcgctacgcaactagagatcttgccgacgaggaggaaaagatcgacaaattcattgaaggcttgaatgatgagttacgcgggcccatgattggacaagaccacgatagtttccagagtttaatcaataaggtcgttaggttggagaacgaccggaaggtcgtggagcacaatcgtaaaaggaggcttgccatgaaccgcacgcctcagaccgcaccccagcgtcctaaagggacaacctcctcggcatggagaccaacagtggtgacaaccagtcgacctgccgcctctagcaatttccacaggccggttaccattcagaaccgcgctcctgcaccaaatcaggccgccactggatcagtaaggccaggaagctgtttcaactgtggagagtatgggcatttcgccaataaatgtccacatccaaacaagacacccattcgcaccggaactaatgcaacggctattcacgggactgctacccctgctgctggacgaggtctattcaggaccccgcagactaacaggaccgctacaggatttggacgcgggcaagtgaaccacgttcgagccgaagaggcccaggaagaccaaggcgtactgatgggtatgttttcactcaactccactccagttaaagttctcttcgattcaggagcatcgcattcatttatatctttgaaagcaagtcaacaacacaatttaaccagagttaaactaagacaaccaatgttagtacactcacctgggggtgagatagcagtggatacagcttgcattaacgtacccatccgccttagggatgtggtatttccctccaatcttatggtgctaataccccaaactcttgatgtcattttgggtatggattggttagcaaagcatagaggagtaattgactgtagacgtagagaagttaccctgaccacaccctggggatcggatatgagagcaaccatggatcaagatcctaggctaaccgaacgtgccggaggtatatttaccatgctacccctaaagggaatgccagtagtgcaacgatttcctgatgtgttcccagaagatttacctggaatgccaccagatcgtgacatagagttcattattgacctgatacccggaactgcccccatatccaagagaccatatcggatgccggtcaatgagttagaagaacttaaaaagcaaatcagggagttgcaagagaagggatttgtacgccccagttcgtcaccttggggagccccagtgttgtttgttaaaaagaaagacggtagcatgagaatgtgtgtagactaccgatcactgaacgaagtaactatcaaaaataagtatccactaccacggattgatgacctcttcgaccaacttgagggagctaaggtgttttcaaagatagaccttcgatcaggataccaccaactgaagattaggaccgaggatatccccaaaaccgcgttttcaacacgctatgggttgtatgaattcacagtaatgtcgtttggtctaaccaatgccccagcatacttcatgaatcttatgaacaaagtattcatggattacttggataagtttgtggtggtattcattgatgacattctgatctactccaaagatgaggaagaacatgcggaacacttacgattggttctccagaaacttcggaagcataagttatatgcaaaattcagcaagtgcgagttctggttaaaagaagtcgcttttctaggccacgtaatctcggccggtggagtagcagtggatcctgctaaagtggaggctgtcacggaatggaaagcacccaaatctgtgactgaaatttggagttttctaggcttggctggatactaccgacggttcattgaagggttctctaagatagcccgaccaatgacacaactactcaagaaggaaaagaagtttgtgtggtcagaacagtgtcaggaaagctttgagcagctcaaggaaaagctgacctcagcgcctattttagttcttcccgacatcaggaaagactttgttatatattgtgatgcgtcaaggcaaggactaggaggagtactgatgcaggacggaaaagtggtggcctatgcgtcgcgacaattgcgaccacatgaggaaaactaccctacccatgacctagaactcgcagctgtggttcatgcgctaaagatttggagacattatctgattggaaaccattgcgatatctacactgaccacaagagtctaaagtatatcttcacccagtcagatctcaacttgaggcaaaggcgatggttagaattaatcaaggactatgatttagagataaacaccctggacattcaacctcttttgagaacccaaatagaagaagcccagaaggacaacgaggaagtccgagaggtgaaggaacgcttagctgcaggacgtgcaaaggaattttcaaccaacgaaaaagatgttctatggtataaaaagagaatttacgtacccgaacagggtggactgaggggattaattttaaaggaagctcacgaatcggcatattcattgcaccccggaagtacgaagatgtaccaagatctgaaggaaggatactggtggcccaacatgaagagagatgtggccgaatacgtagcactctgcgacgtatgccagaaggtgaaggctgaacaccagaggccggcaggtttgttgcaacctctcaggattcccgaatggaaatgggatgagataggtatggattttattgttggattgcccaaaaccgcaacaggacatgattccatttgggtgatcgtggatcgactcaccaagacggcgagattcattcccgttaagacaaattatagcagtgctaagctagccgagttatacatgaccaggatagtatgtcttcattgtgtaccaaagaaaattatatctgatcggggcacacaatttacctaccatttctgggagaaagtccatgaagccctaggaagttatctcgcatttagcacagcttatcatccacagacagatggccagacggagagaaccaaccaggtcctggaagacatgctgagggcttgtgctctggattttaacaaggattgggagagatgtttgccctacgccgaattctcctacaacaacagctttcaagcaagcctaaagatgtcacccaacgaggcattgtttggtcgacgatgtcgtaccccgctaatgtggtccgagactggagaacgggcggtatttggacctgacattattcaagaggccgaagaaaaggttcgcttgatccgcgaccgtctaaaaatagcacaatcacgacaaaagagttacgccgacacccgaagaagaaacctggaatttaaggagggagattacgtttatctaaaggtttctccgatgaggggaacaaaaaggtttaaggtcaaaggaaaactggcaccaagatatgtgggaccattccagatcattgccaggcgaggagaagttgcatatcagatacagttaccagagaatatcgcggatgtacacccagtcttccatgtatctcagctaaagaaatgtttacgagtgccagaagagcaagctccgctggaagaaattcacattagcaatgatctcacatatccagaacacccgatccggatattggatgaagccgaaaagaggactaggagcaaagtgtggcatatgtacaaggtacaatggagcaatcacactgaggatgaagccacctgggaaagtgaagaatttttgaggacggaatacccgcacctattcgaagactggtaa

SEQ ID NO: 13982 - DNA, 4740 bp, Oryza sativa
  Clone ID: TFbOSC401834j.C1.o7.fg
atgggcgtaccccgctcggagggatacgtcattgagctgcatcagttgatgaggcgtctacggtaccccagatttccgatctaccgagtgagacagtgtggacccgtttgggaggtcctggtcgaggttctcacacgagttccgtcagagtcagactacagctttccgacacgccactgtcacgacttaccggagaccgcgatgcaggatgcagcctgggaggccttcctccaacttagctctatccaccgagctgagttggcaatagacgacttctacgaggaggctctgttagagatcgacgaccagcagaggcgtgtaggagagttagagaccgaggtgactgacctcacagtgcagcagcttcagctagaggaggagcaccaggcttggggcagtgagataaacttactgaaggcacagcttcaggtccacggcgaccagttccagcagctatctgatcagtacaacgatcgccgtgggatgatggatacacttgaggagcagttgagagagagtcaggagcatgttagccagctggaggagcagcttcgagcagccacggtcaacaccacaggagcttctacttccacagcagtagggcgtgaccgctacttcttcctcaccccgccgtacccacccgcgttccacgctcttctgggagagctgggttctagcatggagactccgatccaggtcgactccgagacggaggggactgacaccgagccagagatagagccagacatcactgatccttcggaggacgagactcctgttccccgcatcacctttatcggaggccctcgcaccctcagcaccgcccacaagagcacccgacccccgggtaagaagcccaagccagatccagaggccactacctccgagccgtggggactcagcaatgaagagacccaagcacccgacctaaccaccctggccggagtcatggctgctcaaacccaacttctgcaagccatcgcaaataatcaaggcaaccgtggaggatcaagctttggggaattcatgagaactaagccacccacgttcgctacagctgatgaacctatggaggctgaagattggttaaggattattgagaagaagctgacccttgttcgagtacgtgaagccgataaagtgatctttgcggcgaaccaattggaagaagcccgagaagaagatgctggagaaccaaactgggaggaatttaccacagccttccgtaacaacttcgtgcctgccgcggaccacgataatttctacagtttaatcaataaggtcgttagaatggaaaacgaccggaaggttgtggagcacaatcgcaaaaggaggtttgccatgaaccgcctgtctcaggccgcaccccagcgtcctaaaggaacaacctcctcagtatggagaccaacagtggtgacaaccaatcgtcttgccgcatctagcaatttccataggccggttaccattcagaaccgagctcctgcgccgaatcaggccgccactggatcagtgaggccaggaagctgtttcaactgtggagagtatgggcatttcgccaacaagtgcccccatccaaaaaagacaccagttcgtactggagctaatacaacggctattcacgggactactacccctgccgctggacgaggtctattcaagactccgcaaactaacaggaccgctaccggatttggacgcgggcaggtgaaccacgttcgggccgaagaggcccaggaagaccagggcgtactgatgggtatgttttctatcaactccactccagttaaagttctcttcgattcaggagcatcgcattcatttatatctttgaaagcaagccaacaacacaagttgaccagagttaaactaaggcaaccaatgttagtacattcacctgggggtgagatagccgtggatacagcttgcattgatgtacccattcgccttagggatgtggtatttccctccaaccttatggtgctgatacctcaaactctttatgtcgtattgggtatggattggttaacaaagcatagaggagtaatcgactgtagacgtagagaagttaccctgaccacaccctggggatcggatatgagagcaactatggatcaagatcctagactggctgaacgtgccgaaggcatattcaccatgctacccatgaagggaatgcccgtagtgcagcgattccccgatgtgtttctagaagatttacctggaatgccactagatcgtgacatagagtttattattgacctgatacccggaactgcccccatatccaagagaccatatcggatgccggtcaatgagttggaggaacttaaaaagcaaatcagagagttgcaggagaagggatttgtacgtcccagttcgtcaccttggggagccccagtgttattcgtcaggaagaaagatggtagcatgaggatgtgtgtagactaccgctcactgaacgaagtcactatcaaaaacaagtatccattaccacgaatcgatgatctttttgatcaactcaaaggagctaaggtgttctctaagattgaccttcgatcaggataccaccaattgaaaattaggaccgagaatatacccaagaccgcgttctcaacgcgctatggattgtatgagttcacagtaatgtcgtttggattaaccaatgccccggcatactttatgaatcttatgaacaaagtgttcatggattacttggacaaatttgtggtagtattcatcgatgatattttaatatactccaaggatgaggaagagcatgcggagcacttgcgattggtactcgagaaattacggaagcataagttatatgcaaaatttggcaagtgtgagttctggttgaaggaagtcgcttttctaggccacgtgatctcagccggtggagtagcagtggatcctgctaaagtggaggccgttacggaatggaaggcacccaaatcggtaactgaaattcggagttttctaggtttggccggatactatcgaaggaaagactttgttatatattgtgatgcatcaaggcaagggctaggaggagtactgatgcaggacggaaaggttgtggcctatgcattgcgacaattgcgaccacatgaggaaaattaccctactcatgacctagaactagcagccgtggttcatgcgctaaagatttggagacactacttgattggaaaccattgcgatatctacattgaccacaagagtctgaagtatattttcacccagtcagatctcaacttgaggcaaaggcgatggctggaattaatcaaggactatgatctagaggttcactaccaccccggcaaagcaaacgttgtggccgacgctttgagtcgtaagagccattgcaatcatctgagaatggaaggaatggctcccgagcttaaagaggaaatagcccagctgaacctacatatagtacctcatgggcagataaacaccctggatattcaacctcttttgagaacccaaatagaagaagctcagaaggacaacgaagaaatccaagaggtgaaggaacgcttagctgcagggttcgcaaaggaattttcgaccgatgagaaagacgtcttgtggtacaaaaagaggatctatgtacccgaacggggtggactgagaggattaatcttaaaggaagctcacgaatcggcatattcattgcaccccggaaatacgaaaatgtaccaggatctaaaggaaggatactggtggcccaacatgaagagagatgtggcagaatacgtagcgctctgtgacgtatgccaaaagaccgcaacggggtatgattccatttgggtgatcgtggatcgacttaccaagacggcgaggttcattcccgtcaagacaaattatagcggtgccaagctcgccgagttgtacatgaccaggatagtatatcttcatggtgtgcctaagagaattgtatccgatcgaggcacacagtttacctcgcatttctgggaaaaagtacatgaaaccctaggaagttatcttgcttttagcacagcttatcatccacagacagatggccagacggagaggacaaaccaggtcctggaggacatgctgagagcttgtgcattggatttcagcaaagactgggagagatgtttgccctacgccgaattctcctacaacaacagctttcaagcaagcctaaagatgtcacccaatgaggcattgtttggtcgacgatgtcgaaccccactgatgtggtccgagacatgtgaacgggcggtatttggacctgacattatcaaagaggccaaagaaaaggttcgcctgattcgagaccgtctaaaagtggcacaatcacgacagaagagttacgccgacacccgaaaaagaaacctggaatttaaggaaggagattacgtttatctaaaggtttctccgatcaggggaacaaaaaggtttaaggtcaaaggaaaactagcgccaagatatgtgggaccttttcaaatcacggctagacgaggagaagtcgcatatcagttacagctaccagagaatatcgctgatgtgcacctagtcttccatgtgtctcaattaaagaaatgcttacgagtgccagaagaacaagctccgttggaagaaattcacattagcaatgatctcacgtatccagaacacccagtccggatattggatgaagcagaaaagaggactaggaacaaagtatggcgtatgtacaaggtacagtggagtaatcacacttag

SEQ ID NO: 13983 - DNA, 4413 bp, Oryza sativa
  Clone ID: TFbOSC410570j.C1.o1.fg
atggcaagccgacgtcgggcaacaaccggcaatgacgaaactcagacgcccgacctaaacactctggccggaattatggccacccaaactcaacttctgcaagctatcgcgagcaaccaaggcaaccgcagagggtcaagctttggagagtttatgaggaccaagccacccacattcgccacagctgaagaacctatggatgctgaagattggttaaggatcattgagaagaagctaactcttgttcgagtacgtgaggccgataaggtgatctttgcggcaaaccaattggaaggaccagccggagattggtgggacacgtacaaagaagcccgagaagaagatgccggggaaccaaactgggaggaatttaccacagccttctgtgacaactttgtgcctgccgcggtgatgcggatgaagaagaacgagttcaggagactacggcaagggaataccacagtacaagagtacctgaaccgtttcactcagctggcgcgctacgcaactggagatcttgccgacgaagaggaaaagatcgacaaatttattgaaggcttgaatgacgagttacgcgggcccatgattggacaagaccacgatagtttccagagcttaatcaataaggtcgtcaggctggagaacgaccggaaggtagtggagcacaatcgtaaaaggaggcttgccatgagccgcccgcctcagaccgccccccagcgtcctaaagggacaaccccctcagcatggagaccaacagtggtgacaaccagtcgacctgccgcctccagcaatttccacaggccggttaccattcagaaccgcgctcctacaccgaatcaggccgccactggatcagtaaggccagggagctgcttcaactgtggagagtatgggcatttcgctaataaatgtcctcatccaaacaagacacccattcgtaccggagctaatgcaacggctattcacggtactgctacccctgctgctggacgaggtctattcaggactccgcagactaacaggaccgctaccggatttggacgcgggcaagtgaaccatgttcgagctgaagaggcccaggaagaccaaggcgtactgatgggtatgttttcactcaactccactccagttaaagttctcttcgattcaggagcatcgcattcatttatatctttgaaagcaagtcaacaacacaatttaaccagagttaaattaagacaaccaatgttagtacattcacctgggggtgagatagcagtggatacagcttgcattgacgtacccattcgccttagggatgtggtatttccctccaatcttatggtgctaataccccaaactcttgatgtcattttgggtatggattggttagcaaagcatagaggagtaattgactgtagacgtagagaagttaccctgaccacaccctggggatcggatatgagagcaaccatggatcaagatcctaggctaaccgaacgtgccggaggtatatttaccatgctacccctaaagggaatgccagtagtgcagcgatttcctgatgtgttcccagaagatttacctggaatgccaccagatcgtgacatagagttcattattgacctgatacccggaactgcccccatatccaagagaccatatcggatgccggtcaatgagttagaagaacttaaaaagcaaatcagagagttgcaagagaagggatttgtacgccccagctcgtcaccttggggagccccagtgttgtttgttaaaaagaaagacggtagcatgagaatgtgtgtagactaccgatcactgaacgaagtaactatcaaaaataagtatccactaccacggattgatgacctcttcgaccaacttaagggagctaaggtgttttcaaagatagaccttcgatcaggataccatcaactgaagattaggaccgaggatatccccaaaaccgcgttttcaacacgctatgggttgtatgaattcacagtaatgtcgtttggtctaaccaatgccccagcatacttcatgaatcttatgaacaaagtattcatggaatacttggataagtttgtggtggtgttcattgatgacattcttatctactccaaagatgaggaagaacatgcggaacacttaagattggttctccagaaactccgaaagcacaagttatacgcaaaattcagcaagtgcgaattttggttgaaggaagtcgcttttctgggtcacgtaatctcagccggtggagtagcagtggaccctgctaaagtggaggctgtcacggaatggaaagcacccaaatcggtgactgagatccggagttttctaggcttggctggatactaccgaaggttcattgaagggttctctaagatagcccgaccaattacacaattactcaagaaggaaaagaagtttgcatggtcggaacagtgtcaagaaagctttgagcagctcaaagaaaagctgacctcagcacctattttagttcttcccgacatcaggaaagactttgttatatattgtgatgcgtcgaggcaaggactaggaggagtactgatgcaggagggaaaagtggtggcctatgcgtcgcgacaattgcgaccacatgaggaaaactaccctacccatgacctagaactcgcagctgtggttcatgcgctaaagatttggagacattatctgattggaaaccattgcgatatctacactgaccacaagagtctaaagtatatcttcacccagtcagatctcaacttgaggcaaaggcgatggttagaattaatcaaggactatgatttagaggttcattatcacccaggcaaagcaaacgtcgtagccgacgctctgagtcgtaagagccattgcaatcatctgagaacggaagggatggtccctgagcttagggaggaaatggcgcagctgaacctacatatagtaccccgtggacagataaacaccctggatattcaacctcttttgagaacccaaatagaagaagcccagaaggacaacgaggaagtccgagaggtgaaggagcgcttagctgtaggacgtgcaaaggaattttcaaccgacgaaaaagatgttctatggtataaaaagagaatttacgtacccgaacagggtggactgaggggattaattttaaaggaagctcacgaatcggcatattcattgcaccccggaagtacgaagatgtaccaagatctgaaggaaggatactggtggcccaacatgaagagagatgtggccgaatacgtagcactctgcgacgtatgccagaaggtgaaggctgaacaccagaggccggcaggtttgttgcaacctctcaggattcccgaatggaaatgggatgagataggcatggattttattgttggattgcccaaaaccgcaacaggatatgattccatatgggtgatcgtggatcgactcaccaagacggcaagattcatccccgtcaagacaaactatagcagtgcaaaactcgccgagttgtacatgaccaggatagtgtgtcttcatggtatacctaagaggattatatctgatcgaggcacacagtttacctcacatttctgggagaaagtccatgaagccctaggaagttacctcgcatttagcaccgcttatcatccacagacggatggccagacggagagaaccaaccaggtcctggaggacatgctgagggcttgtgctttggattttagcaaggactgggagagatgtttgccctacgccgaattctcctacaacaacagctttcaagcaagcctaaagatgtcacccaatgaggcattgtttggtcgacgatgtcgtaccccgctaatatggtccgagactggggaacgggcggtatttggacctgacatcattcaagaagccgaagaaaaggttcgtttgatccgtgaccgtctaaaagtagcacagtcacgacaaaagagttacgccgacactcgaagaagagacctggaatttaaggaaggagattacgtttatctaaaggtttctccgatgaggggaacaaagaggtttaaggttaaaggaaaactggcaccaagatatgtggggccattccagatcatcgccaggcgaggagaagttgcatatcagttacaactaccagagaatatcgccgatgtgcacctagtcttccatgtatcccaattaaagaaatgcttacgagtgtcggaagaacaagctccgctggaagagattcacattagcaatgatctcacatacccagaacacccgattcggatattagatgaagcagaaaagaggactaggagcaaagtgtggcgtatgtacaaggtacaatggagtaatcacactgaggatgaagccacctgggaaagcgaagaattcttgaggacggagtacccgcatctattctacaactggtaa

SEQ ID NO: 13984 - DNA, 5076 bp, Oryza sativa
  Clone ID: TFbOSC416395j.C1.o15.fg
atggagaggacgacggaggatgatgagaggccgacggttcctctgctggagcctaagccggcgagcaacgaggaggaagaagaggttggatcggtgaggcggcgagtggtggaggagaacaagaagctgtgggtggtggcgggtccttccatctgcgcccgcttctcctccttcggcgtcaccgtcatcagccaggcgttcatcggacacatcgggggtaccgagctcgccgcctacgccctcgtctccaccgtcctcatgcgcttcagcaatggcatcctgcttggcatggcgagcgcattagaaacattgtgtggacaatcatatggcgccaagcaatatcacatgttgggtgtctatctacaacgctcatggctagttctcttctgttgtgcagtcatccttctcccggtctatatcttcacaactccactcctgattgctctcggtcaagatcctgagatctctgccgtcgctggcaccatctctctatggtacatccccgtaatgttctcttacatatgggcattcatgctccaaatgtacctacaagcgcagagcaagaacatgattgtcacttaccttgccttcctcaatcttgggattcacctcttcttgtcatggctcctaacagtcaagttccaacttggtcttgctggggtcatgggatccatggtcatctccttttggatccctgtgtttggccaactcgcttttgtcttctttggtggttgccctctaacatggacagggttctcatcctctgcttttactgatcttggtgctattatgaagctttcgttatcgtctggagtgatgctttgtttagaattgtggtacaacaccatattggtgctcctcactggttatatgaagaatgcagaggttgctcttgatgctctttctatatgccttgcatacatatttactgaaagtaaggcagtagcagatgaagtcgctgatcttgctccccttctagctttctccattttgttgaatagtgttcaaccagtgctctcaggtgtcgctatcggatcgggttggcaaagtgtagttgcctatgttaatgttacatcgtactacttgattggtatccctcttggtgcaatactaggctatgtgctaggatttcaagcaaagggcatttggatcggcatgcttcttggaacactagtccagactcttgtgcttctattcatcacacttaggaccaattggaaaaaacagctgggttccagtttggagactccgatccaggtcgactccgagacagaggggaccgacaccgagccagagatcgagccagacatcactgatccttcagaggatgagacccctgttccccgcatcaccttcctcggaggccctcgcaccctcagcactgctcgcaagagcacacgacctccgggcaagaggcccaagctagatccagagatggcaagccgacgttgggcgtcaaccagcaatgaagaaactgagacacctgacctaaccaccctggccggagttatggccacccaaacccaacttttgcaagccattgcaaataaccaaggcaaccgctgtggatcaagctttggagagtttatgaggaccaagccacccacattcgccacagctgaagaacctatggatgctgaagattggttaaggatcattgagaagaagctaactcttgttcgagtacgtgaggccgataaagtgatctttgcggcaaaccaattggaaggaccagccggagactcgtgggacacatacaaaggagcccgagaagaagatgctggagaaccaaattgggaggaatttaccacagccttccgtgacaacttcgtgcctgccgcggtgatgctgatgaagaagaatgagttcaggagactacggcaagggaataccacagtacaagagtacctaaaccgtttcactcagctagcgcgctacgcgactagagatcttgccgacgaggaggaaacgatcgacaaattcattgaaggcttgaatgacgagttgcgcgggcccatgattggacaagaccacgatagtttccagagtttaatcaataaggccgccactggaccagtaaggccaggaagctgtttcaactgtggggagtatgggcattttgccaacaaatgcccccatccaaacaagacacctattcgcaccggagctaatgcaacggctattcacgggactactacccctgctgttagacgaggtctattcaggactccgcagactaacaggaccgctaccggatttggacgcgggcaagtgaaccacgttcgagctgaagaggcccaggaggaccaaggcgtgctaatgggtatgttttcactcaactccactccagttaaagttctcttcgattcaggagcatcgtatttatttatatctctgaaagcaagtcaacaacacaatttaaccagagttaaactaaggcaaccaatgttagtacattcacctgggggtgaaatagccgtggacacagcttgcattgacgtacctattcgccttagggatgtggtgtttccctccaaccttatggttttgataccacaaactcttgatgtcattttggctatggattggttagcaaagcatagaggagtaattgactgtagacgtagagaagttaccctgaccacaccctggggatcggatatgagagcaaccatggatcaagatcctaggctaaccgaacgtgtcggaggtatatttaccatgctacccctaaagggaatgcccgtagtgcagcgatttcctgatgtgttcccagaagatttacctggaatgccaccaaatcgtgacatagagttcattattgacctgatacccggaacggcccccatatccaagagaccatatcggatgccggtcaatgagttagaagaacttaaaaagcaaattagggagttgcaagaaaagggatttgtacgccccagttcgtcaccttggggagccccagtgctatttgttaagaagaaagacggtagcatgagaatgtgtgtagactaccgatcactgaacgaagtaactattaagaacaaatacccactaccaaggattgatgatctcttcgatcaacttaagggagctaagatgttttcaaagatagaccttcgatcaggataccaccaactgaagattaggaccgaggatatccccaaaaccgcgttatcaacacgctatgggttgtatgaattcacagtaatgtcgtttggtctaaccaatgccccagcatacttcatgaatcttatgaacaaagtattcatggactacttggataagtttgtggtggtattcatcgatgacattctgatctactccaaagatgaggaagaacatgcggaacacttacgattggtactccagaaactccgaaagcacaagttatacgcaaaattcagcaagtgcgaattttggttgaaggaagtcgcttttctgggtcacgtaatctcagccggtggagtagcagtggaccctgcaaaagtggaggccgttatggaatggaaagcacccaagtcggtgaccgaaattcggagttttctaggcttggttggatactaccgaaggtttatcgaggggttctcaaagatagcccggccaatgacacaactactcaaaaaggagaagaagtttgtgtggtcagaacagtgccaggaaagctttgagcaactcaaagagaagctgacatcggcacctattctagttcttcccgacatcaggaaggactttgttatatattgtgatgcatcaaggcaaggactaggaggagtactgatgcaggatggaaaggttgtggcctatgcgtcgcgacaattgcgaccacatgaggaaaactaccctacccatgacctagaactcgcagctgtggttcatgcgctaaatatttggagacattatctgattggaaaccattgcgatatctacaccgaccacaagaatctgaagtatatcttcacccagtcggatctgaacttgaggcaaagacggtggctggaattaatcaaggactacgatctcgagatttggagacattatctgattggaaaccattgcgatatctacaccgaccacaagagtctgaagtatatttttatccagtcggatctgaacttgaggcaaagacggtggctggaattaatcaaggactacgatctcgaggttcactatcaccccggcaaagcaaacgttgtggccgacgccttgagccgtaagagccattgcaatcatttggaaatggaagggatggcacctgagcttaaagaggaattggcccagctaaatctacatatagtgcctcgagggcaggtaaacaccctggacattcaacctcttctgagaacccaaatagaagaggctcagaaagacaacgaggaaatccgagaggtgaaggaacgtctagctgcaggatttgcaaaggaattttcaaccgacgagaaggatgtcctatggtataaaaagaggatttatgtacccaaacagggtggactgaggggattaattctaaaggaagctcacgaatcggcatattcattgcaccccggaagtacaaaaatgtaccaggatctgaaggaagtatactggtggcccaacatgaagagagatgtggcagaatacgtagcactctgtgacgtgtgccagaagaccgcaacaggatatgattccatttgggtgatcgtggatcgactcaccaagacggcgaggttcatccccgttaagacaaattacagcagtgccaagctagcagagttatacatgaccagaatagtatgtcttcatggtgtacctaagaggattatatctgatcgaggcacacagtttacctcacatttctgggagaaagtccatgaagccctaggaagttaccttgcgtttagcacagcttatcatccacagacagatggccagacggagagaaccaaccaggtcctagaggacatgctgagagcttgtgcgctggattttagcaaggactgggagaggtgtttgccctacgccgagttctcctacaacaacagctttcaagcaagcctgaagatgtcccccaatgaagcattgtttggtcgacgatga

SEQ ID NO: 13985 - DNA, 4257 bp, Oryza sativa
  Clone ID: TFbOSC420750j.C1.o6.fg
atggcaagccgacgtcgggcaacaaccagcaatgacgaaactcagacacccgacttaaccactctggccggagttatgaccacccaaacccaacttctgcaagctatcgcgaacaaccaaggcaaccgcggagggtcaagctttggagagtttatgagaaccaagccacccacattcgccacagctgaagaacctatggatgctgaagattggttaaggatcattgagaagaagctaactcttgttcaagtacgtgaagccgataaagtgatctttgcggcaaaccaattggaaggaccaaccggagactggtgggacacgtacaaagaagcccgagaagaagatgctggagaaccaaactgggaggaatttaccacagccttccgtgacaacttcgtgcctgccgcggtgatgaggatgaagaagaatgagttcaggagactacggcaagggaataccacagtacaagagtacctgaaccgtttcactcagctggcgcgctacgcgactagagatcttgccgacgaggaggaaaagatcgacaaattcattgaaggcttgaatgacgagttacgcgggcccatgattggacaagaccacgatagtttccagagtttaatcaataaggtcgttaggttggagaacgaccggaaggtcgtggagcacaatcgtaaaaggaggcttgccatgaaccgctcgcctcagaccgcaccccagcgtcctaaagggacaaccccctcggcatggagaccaacagtggtgacaaccagtcgacctgccgcctctagcaattttcacaagccggttaccattcagaaccgcgctcctgcaccgaatcaggccgccactggatcagtaaggccagggagctgtttcaactgtggagagtatgggcatttcgccaataaatgtcctcatccaaacaagacacccattcggaccggagctaatgcaacggctaatcacgggactgctacccctgctgctggacgaggtctattcaggactccgcagactaacaggaccgctaccggatttggacgcgggcaagtgaagcacgttcgagctgaagaggcccaggaagaccaaggcgtactgatgggtatgttttcactcaactccactccagttaaagttctcttcgattcaggagcatcgcattcatttatatctttgaaagcaagtcaacaacacaatttaatcagagttaaactaagacaaccaatgttagtacattcacctgggggtgagatagcagtggatacagcttgcattgacgtacccatccgccttagggatgtggtatttccctccaatcttatggtgctaataccccaaactcttgatgtcattttgggtatggattggttagcaaagcatagaggagtaattgactgtagacgtagagaagttaccctgaccacaccctggggatcggatatgagagcaaccatggatcaagatcctaggctaaccgaacatgccggaggtatatttaccatgctacccctaaagggaatgcccgtagtgcagcgatttcctgatgtgttcccagaagatttacctggaatgccaccagatcgtgacatagagttcattattgacctgatacccggaactgcccccatatccaagagaccatatcggatgccggtcaatgagttagaagaaattaaaaagcaaattagggagttgcaagagaagggatttgtacgccccagttcgtcaccttggggagccccagtgttatttgttaaaaagaaagacggtagcatgagaatgtgtgtagactaccgatcactgaacgaagtaactattaaaaacaagtatccactaccaaggattgatgatctcttcgaccaacttaagggagctaaggtgttttcaaagatagaccttcgatcaggataccaccaactgaagattaggaccgaggatatccccaaaaccgcgttttcaacacgctatgggttgtatgaattcacagtaatgtcgtttggtctaaccaatgccccagcatacttcatgaatcttatgaacaaagtattcatggattacttggataagtttgtggtggtattcatcgatgacattctgatctactccaaagatgaggaagaacatacggaacacttacgattggttctccagagactccgaaagcacaagttatacgcaaaattcagcaagtgcgaattttggttgaaggaagtcgcttttctgggtcacgtaatctcagccggtggagtagcagtggaccctgctaaagtggaggctgtcacggaatggaaagcacccaaatctgtgactgaaattcggagttttctaggcttggctggatactaccgacggttcattgaagggttctctaagatagcccgaccaatgacacaactactcaagaaggaaaagaagtttgtatggtcagaacagtgtcaggagagctttgagcagctcaaagaaaagctgacctcggcgcctattttagttcttcccgacatcaggaaagacttcgttatatattgtgatgcgtcaaggcaaggactaggaggaatttggagacattatctgattggaaaccattgcgatatctacactgaccacaagagtctgaagtatatcttcacccagtcagatctcaacttgaggcaaaggcgatggttagaattaatcaaggactatgatctagaggttcactatcacccaggcaaagcaaacgttgtggccgacgctctgagtcgtaagagccattgcaatcatctgagaatggaagggatggtccctgagcttagggaggaaatagctcagctgaacctacatatagtgcctcatggacagataaacaccctggacattcaacctcttttgagaacccaaatagaagaagcccagaaggacaacgaggaaatccgagaggtgaaggaacgcttagctgcaggacgcgcaaaggaattttcaaccgacgaaaaagatgttctatggtataaaaagagaatttacgtacccgaacagggtggactgcgaggattaatcctaaaggaggctcacgaatcggcatactcattacaccccggaagtaccaaaatgtaccaggatttgaaggagggctactggtggcccaacatgaagagagatgtggccgaatacgtagcactctgcgacgtatgccagaaggtgaaggctgaacaccagaggccggcaggtttgttgcaacctctcaggattcccgaatggaaatgggatgagataggtatggattttattgttggattgcccaaaatcgcaacaggatatgattccatttgggtgatcgtggatcgactcaccaagacggcgagattcattcccgttaagacaaattatagcagtgctaagctagccgagttatacatgaccaggatagtatgtcttcatggtgtacctatgaaaattatatctgatcggggcacacagtttacctcacatttctgggagaaagtccatgaagccctaggaagttacctcgcatttagcacagcttatcatccacagacagatggccagacggagagaaccaaccaggtcctggaggacatgctgagggcttgtgctctggattttagcaaggactgggagagatgtttgccttacgccgaattctcctacaacaacagctttcaagcaagcctaaagatgtcactcaatgagtcattgtttggtcgacgatgtcgaaccccactaatgtggtccgagactggagaacgggcggtacttggacctgacattattcaagaagccgaagaaaaggttcgcttgatccgcgaccgtctaaaagtagcacaatcacgacaaaagagttacgccgacacccgaagaagaaacctggaatttaaggagggagattacgtttatctaaaggtttctccgatgaggggaacaaaaaggtttaagatcatcgccaggcgaggagaagttgcatatcagttacagttaccagagaatatcgcggatgtacacccagtcttccatgtgtctcagctaaagaaatgtttacgagtgccagaagagcaagctccgctggaagagattcacattagcaatgatctcacatatccagaacacccgatccggatattggatgaagccgaaaagaggactaggagcaaagtgtggcgtatgtacaaggtacaatggagcaatcacactgaggatgaagccacctgggaaagtgaagaatttttgaggacggaatacccgcacctattcgaagactggtaa

SEQ ID NO: 13986 - DNA, 3225 bp, Oryza sativa
  Clone ID: TFbOSC900173j.C1.o6.fg
atggcaagccgacgtcgggcaacaaccagcaatgacgaaacccagacacctgacctaaccaccctggccggagttatggccacccaaacccaactcctgcaagccattgcaaataaccaaggcaaccgtggcggatcaagctttggagagtttatgaggaccaagccacccacattcgccagagctgaagaaccaatggatgctaaagattggttaaggatcattgagaagaagctaactcttgttcgagtacgtgaggccgataaagtgatctttgcggcaaaccaattggaaggaccagtcggagactggtgggacacatacaaggaagcccgagaagaagatgctggagaaccaaactgggaggaatttaccacagacttccgtgacaacttcgtgcctgccgcggtgatgcggatgaagaagaatgagttcaggagactacggcaagggaataccacagtacaagagtacctgaactgtttcactcagctggcgcgctacgcgactagagatcttgccgacgaggaggaaaagatcgacaaattcattgaaggcttaaatgacgagttgcgcgggcccatgattggacaagaccacgataaaaacgaccggaaggtcgtggagcacaatcgtaaaaggaggcttgccatgaaccgcccgccccagaccgcaccccagcgtcctaaaggggcaacctcttcggcatggagaccaacagtggtgacaaccagtcgacctgccacctccagcaatttccacaggccggttaccattcaaaaccgagctcctgcaccgaatcaggccgccactggatcagtaaggccaggaagctgtttcaactgtggagagtatgggcatttcgccaataaatgtcctcatccaaacaagacacccattcgcaccggagctaatgcaacggctattcatgggactgctactcctgctgctggacgaggtctattcaggactccgcagactaacaggaccgctaccggatttggacgcgggcaagtgaaccacgttcgagctgaagaggcccaggaagaccaaggcgtgctgatgggtatgttttcactcaacttcactccagttaaagttctcttcgattcaggagcatcgcattcatttatatctctgaaagcaagtcaacaacacaatttaaccagagttaaactaaggcaaccaatgttagtacattcacctgggggtgaaatagccgtggacacagcttgcattgatgtacctattcgccttagggatgtggtgtttccctccaaccttatggttttgataccacagacccttgatgtcatattgggtatggattggttagcaaagcatagaggagtaattgactgtagacgtagagaagttaccctgatcacaccctggggatcggatatgagagcaaccatggatcaaaatcctaggctaaccgaacgtgccggaggtatatttaccatgctacccctaaagggaatgcccgtagtgcagcgatttcctgatgtgttcccagaagatttacctggaatgccaccagatcgtgacatagagttcattattgacctgatacccgcaactgcccccatatccaagagaccatatcggatgccagtcaatgagttaaaagaacttaaaaagcaaattagggagttgcaagaaaagggatttgtacgccccagttcgtcaccttggggagccccagtgctatttgttaagaagaaagacggtagcatgagaatgtgtgtagactatcgatcactgaaagaagtaactattaagaacaagtacccactaccaaggattgatgatctcttcgaccaacttaagggagctaaggtgttttcaaagataaaccttcgatcaggataccaccaactgaagattaggaccgaggatatccccaaaaccgcgttttcaacacgctatgggttgtatgaattcacagtaatgtcatttggtctaaccaatgccccagcatacttcatgaatcttatgaacaaagtattcatggattacttggataagtttgtggtggtattcatcgatgacattctgatctactccaaagatgaggaagaacatgcggaacacttacgattggttctccagaaactccgaaagcacaagttatacgcaaaattcagcaagtgcgaatttcggttgaaggaagtcgcttttctgggtcacgtaatctcagccagtggagtagcagtggaccctgcaaaagtggaggctgttacggaatggaaggcacccaagtcggtgaccgaaattcggagttttctaggcttggccggatactaccgaacgtttatcgaggggttctcaaagatagcccggccaatgacacaactactcaaaaaggagaagaagtttgatctgaaggaaggctactggtggcccaacatgaagagagatgtggccgaatacgtagcactctgcgacatatgccagaaggtgaaggctgagcaccagaggccggcaggtttgttgcaacctctcaggatttccgaatggaaatgggatgagataggtatggatttcattgttggattgcccaagactgcaacaggctttcaagcaagcctgaagatgtcccccaatgaagcattgcttggtcgacgatgccggacgccgctgatgtggtctgagacaggtgaacgggcggtatttggacctgacatcatcaacgaggccgaagagaaggttcgcctaattcgagaccgtctaaaagtgacacaatcacggcagaagagttacgctgacacccgaagaagggatctagaatttaaaaaaagagattacgtgtatctcaaagtttctccgatgaggggaacaaaaaggtttaaggttaagggaaaactagcaccaagatatgggggaccctttcaaatcacggctagaagaggagaagtcgcatatcagttacagctaccagagaatatcgctgatgtgcacccagtcttccatgtgtcccaattaaagaaatgcttaccagtgccggaagaacaagctccgctggaagagattcacattagcaacgatctcacgtatccagaacacccgatccggatattggatgaagtagaaaagaggactaggagcaaagtgtggcgtatgtacaaggtacaatggagtaatcacactgaggatgaagccacctgggaaagcgaagaattcttgaggacggagtacccgcatctattcgaaaactggtaa

SEQ ID NO: 13987 - DNA, 4287 bp, Oryza sativa
  Clone ID: TFbOSC900324j.C1.o13.fg
atggcaagccgacgtcgggcaacaaccagcaatgacgaaactcagacacccgacttaaacactctggccggaattatggccacccaaactcaacttctgcaagctatcgcgagcaaccaaggcaaccgcggagggtcaagctttggagagtttatgaggaccaagccacccacattcgccacagctgaagaacctatggatgctgaagattggttaaggatcattgagaagaagctaactcttgttcgagtacgtgaggccgataaggtgatctttgcggcaaaccaattggaaggaccagccggagattggtgggacacgtacaaagaagcccgagaagaagatgctggagaaccaaactgggaggaatttaccacagccttccgtgacaactttgtgcctgccgcagtgatgcggatgaagaagaacgagttcaggagactacggcaagggaataccacagtacaagagtacctgaaccgtttcactcagctggcgcgctacgcaactagagatcttgccgacgaagaggaaaagatcgacaaattcattgaaggcttgaatgacgagttacgcgggcccatgattggacaagaccacgatagtttccagagcttaatcaataaggtcgtcaggctggagaacgaccggaaggtagtggagcacaatcgtaaaaggaggcttgccatgaaccgcccgcctcagaccgccccccagcgtcctaaagggacaaccccctcagcatggagaccaacagtggtgacaaccagtcgacctgccgcctccagcaatttccacaggccggttaccattcagaaccgcgctcctacaccgaatcaggccgccactggatcagtaaggccagggagctgcttcaactgtggagagtatgggcatttcgctaataaatgtcctcatccaaacaagacacccattcgtaccggagctaatgcaacggctattcacggtactgctacccctgctgctggacgaggtctattcaggactccgcagactaacaggaccgctaccggatttggacgcggagttaaattaagacaaccaatgttaatacattcacctgggggtgagatagcagtggatacagcttgcattgacgtacccatccgccttagggatgtggtatttccctccaatcttatggtattaataccccaaactcttgatgtcattttgggtatggattggttagcaaagcatagaggagtaattgactgtagacgtagagaagttaccctgaccacaccctggggatcggatatgagagcaaccatggatcaagatcctaggctaaccgaacgtgccggaggtatatttaccatgctacccctaaagggaatgccagtagtgcagcgatttcctgatgtgttcccagaagatttacctggaatgccaccagatcgtgacatagagttcattattgacctgatacccggaactgcccccatatccaagagaccatatcggatgccggtcaatgagttagaagaacttaaaaagcaaatcagggagttgcaagagaagggatttgtacgccccagttcgtcaccttggggagccccagtgttgtttgttaaaaagaaagacggtagcatgagaatgtgtgtagactaccgatcactgaacgaagtaactatcaaaaataagtatccactaccccggattgatgacctcttcgaccaacttaagggagctaaggtgttttcaaagatagaccttcgatcaggataccaccaactgaagattaggaccgaggatatccccaaaaccgcgttttcaacacgctatgggttgtatgaattcacagtaatgtcgtttggtctaaccaatgccccagcatacttcatgaatcttatgagcaaagtattcatggattacttggataagtttgtggtggtattcattgatgacattctgatctactccaaagatgaggaagaacatgcggaacacttacgattggttctccagaaacttcggaagcataagttatatgcaaaattcagcaagtgcgagttctggttaaaagaagtcgcttttctaggccacgtaatctcggccggtggagtagcagtggatcctgctaaagtggaggctgtcacggaatggaaagcatccaaatctgtgactgaaattcagagttttctaggcttggctggatactaccgacggttcattgaagggttctctaagatagcccgaccaatgacacaactattcaagaaggaaaagaagtttgtgtggtcagaacagtgtcaggaaagctttgagcagctcaaggaaaagctgacctcagcgcctattttagttcttcccgacatcaggaaagactttgttatatattgtgatgcgtcaaggcaaggactaggaggagtactgatgcaggacggaaaagtggtggcctatgcgtcgcgacaattgcgaccacatgaggaaaactaccctacccatgacctagaactcgcagctgtggttcatgcgctaaagatttggagacattatctgattggaaaccattgcgatatctacactgaccacaagagtctaaagtatatcttcacccagtcagatctcaacttgaggcaaaggcgatggttagaattaatcaaggactatgatttagaggttcactatcacccaggcaaagcaaacgttgtagccgacgctctgagtcgtaagagccattgcaatcatctgagaatggaagggatggtccctgagcttagggaggaaatagctcagctgaacctatatatagtgcctcatggacagataaacaccctggacattcaacctcttttgagaacccaaatagaagaagcccagaaggacaacgaggaggtccgagaggtgaaggaacgcttagctgccggacgtgcaaaagaattttcaaccgacgaaaaagatgttctatggtataaaaagagaatttacgtacccaaacagggtggactgaggggattaattttaaaggaagctcacgaatcggcatactcattacaccccggaagtaccaaaatgtaccaggatttgaaggagggctactggtggcccaacatgaagagagatgtggccgaatacgtagcactctgcgacgtatgccagaaggtgaaggctgaacaccagaggccggcaggtttgttgcaacctctcaggattcccgaatggaaatgggatgagataggtatggattttattgttggattgcccaaaaccgcaacaggatatgattccatttgggtgatcgtggatcgactcaccaaaacggcaagattcattcccgtcaagacaaactatagcagtgcaaaactcgccgagttgtacatgaccaggatagtgtgtcttcatggtatacctaagaggattatatctgatcgaggcacacagtttacctcacatttctgggagaaagtccatgaagccctaggaagttatctcgcatttagcacagcttatcatccacagacagatggccagacggagagaaccaaccaggtcctagaagacatgctgagggcttgtgctctagattttagcaaggactgggagagatgtttgccctacgctgaattctcctacaacaacagctttcaagcaagcctaaagatgtcacccactgaggcattgtttggtcgacgatgtcgtaccccgctaatgtggtccgagactggagaacgggcggtgtttggacctgacattattcaagaagccgaagaaaaggttcgcttgatccgtgaccgtctaaaagtagcacaatcacgacaaaagagttacgccgacactcgaagaagaaacctggaatttaaggagggagattacgtttatctaaaggtttctccgatgaggggaacaaaaaggtttaaggtcaagggaaaactggcaccaagatatgtggggccattccagatcaccgccaggcgaggagaagttgcatatcagttacagttaccggagaatatcgcggatgtgcacccaatcttccatgtatcccaattaaagaaatgcttacgagtgccggaagaacaagctccgctggaagagattcacattagcaatgatctcacatatccagaacacccgattcggatattggatgaagcagaaaagaggactaggagcaaagtgtggcgtatgtacaaggtacaatggagtaatcacactgaggatgaagccacctgggaaagcgaagaattcttgaggacggagtacccgcatctattcgaaaactggaattgtggaatcaaatttatatgggaaatactctaa

SEQ ID NO: 13988 - DNA, 4284 bp, Oryza sativa
  Clone ID: TFbOSC100949j.C1.o4.fg
atggcgttggttccggcgggagccgcagcggatccggcgagggggagctcagggagtgcgttctcctacccacaactcacggcgacgaattacaccagctggtgcattcgcgttcaggcaatgatggaggaccagggcgtgtgggacgccatcgagccggcggccggggtggccgtcgacccaagaagggacaagaagtcgaagtcccatctgctgcagtccctcccggaggacttgctgatgcaggtggcaaagaagagatcggcaaaggaagtgtgggattgcttgaagacaaggttcgtgggcgcggaccgcgttcgcgaagcgcgcctgcagacgttgaagggtgaatttggtgccatggtgatggagccgggggaaactctggatcagtacgcgggccgcatcaccgcgatgagcgtgcgtcactcggtgttgggctcgacactgagtgattccgcgatagtgaagaagctgttcgacacggtgccagagaaattcatcagcctcgtcgcaggtattgagcagttttatgagattgataatatgccatttgaggaggcggtgggtcgtctcaaggcctacgaagaacgagttcgcaagaagaaggcggccgctggtggtgtcaccgccgacggtcaagtacttctcactcaggcggagtgggaggcgcgtttcaggaaggacggcagcgagtcgtcttcgccgcagaaaaacaaacctcccagcgacaggggaaaccgtgcccagggcggacgcggtcgcggcagagggcacggtggaggtggtggacgcggcagcgcgccgcggaacagtggcgctggtggctctggcggcggtggccgtgacaagagccacatcaagtgctacaactgcgaagaattcggccactactccacccagtgccctcatcccaagaagaagaaggtggaggcccatctcgcgcaaaccgacgacgcaaaccctgcattgttactggcggtgaccgaagacgagccggcgagcgggctggtcgtacacgaggagcgtgtgtggccgcagctgctgttggctgacagcggagcagccaccggggacatctggttcctggacaatggggcaagcaaccacatgacgggtgatcgtgctaagttcagagatctagacgtatcaatcaccgggagcgtcaagttcggggacgcctcaactgtgaaaattcaggggaaagggtctatcctgttctcctgcaagaatggggatcaatggctgctgcaggatgttttttatatccctagtctgtgttgcaacatggtgagcttgggccagctcacagaaacggggcacagagtggtgatggatgaagatgtgctcgaggtgttcgacaaaagtcccctgcggctggttatgcgggtgaggcgcacccctaatcggctgtaccggatcgagctgaagctagccactccggtgtgcctgctgacaaggatggatgagccagcatggctctggcatgcacggcttgggcatgtcaatttccaggcgatgaagctgttggctgacaagggcatggctggtggcatcccggcgatcacacatccaaaccagctctgtcaggcatgtctggttgcaaagcagataaggcagccgtttcccgcaacggcgaacttcagggcggaggagccgctcgagttgctccacattgatttatgtggaccgatcaccccgacaactatggccggtaatcgttactttatgctaattgttgatgatttctcacggtggatgtggatgttcgtgatcaaaacgaaggaccaggcactagaggctttcaccaagttcaagccgctggccgagaacacggccgggcggcgcatcaagacgctgagatcggatcgcggtggcgaattcctgtcgggcgaattcgcgcagttgtgcgagcaggcgggcatccagcggcatctgacggcgccatactcaccccagcaaaacggggtggtggaacgccgaaatcgttcggtaatggcgatggcacgatctctgatgaaagggatgtcagtgccgggcaggttttggggggaggcggtgcgccatgcggtgtatctcctcaaccggctaccgacgaaggcgatgggcgatcggaccccgttcgaggcatggacggggcgcaagccgcagctgggacacctgcgggtgtttgggtgcatagcacacgccaagatcacgacgcccaaccagaagaaacttgatgaccggagcgcgccgtatgtgtatctcggcgtggaaaaaggcagcaaggcgcaccgcctgttcgacccgcgttgtgggcgtatccatgtaagtcgtgatgtcatttttgaagaaaatgtaccttggcaatggagtgtagtcgcaggggagcaaaactctaccgagttcacggtggaggaggatggagttgatgcaccgccggcaggagcgccggcctacccagtaccgcggtaccgggcgccatccccggcagtcccgcaatcgcctccggcaagcccggtaggggcgtcatcgtcattgccgacttcgccccagtcatcaccgagctctacaccgccttcaacacctgctaccggctctgccgggccggtggcgtcaccaggttccggcggcgaccttagaagcgatgagggtcccgtccggttcaggagtcttgaagatatcatgcgggaggcaccccgcgtggacctggtggaggatgaacacgatggggacgcgctgcttgcagagatggaggagccatcgagctaccgcgaggcagctggccagccggcatgggagaacgccatggcacaggagctgcaggcgattgagaagaattcaacatgggctctcactgcattgccggcaggacacaaacccattggcctcaagtgggtgtacaagctgaaaaagaacactgccggcgaagtaatcaagcacaaggctcgtttggttgcaaagggctatgttcagcgtcaaggggtggattttgaagaggtgttcgcgccagtggcgcggcttgacacagttcgtgtcatcctggctatcgcagctgatcggcggtgggaagtgcaccacctcgacgtcaaatcggcgttcttgaatggcgatcttgaagaagaagtgtacgtagcccagccagagggttttgtgaaacgaggagaagaacacttggtgctcaggctgagcaaggcgctctatggattgcgccaggccccgcgggcgtggaacacgcgtctcgacaagtgcttgaaagaactcggttttgcacggtgcacgcaggagcaggccgtgtatactagaggaaaggggcaagctggtgtaatcgttggtgtgtatgttgatgacttgattgtcacaggagaaaatccacatgagatagccatgttcaagcagcagatgatgggggaatttgagatgagtgatctcggtcttctctcttactatctggggatagaagtaattcagggggagaatgggattgctatcaagcaagctgcgtatgcgaagaagattctgtctcagtttggtatgcagggatgtaatcccacctcaatccccatggagccacggtcgctgctgcacaaggatgctgatggaaatccaattgatgcgaccgagtaccggcgtgtcatcgggtgcctgcgatacttgttacacaccaggccggatctgtcctacgccgttggcgtggcgagcaggttcatggagcggccgacaacgatgcatctcaaggcggtcaagatgatactcagatatctaaaggggacgctggactctggtctggtgtttgcaagcggcagtggctcgttggacatcacgggtttcactgacagtgacttggcaggtgacatggatgaccgtcggagcaccggcggcatggcgttctatgtgaacagcagcttggtgtcttggtgttctcaaaagcagaagacagtggcgctctcgtcttgcgaggcagagttcatggcggccactgcagcagcatgtcacgcgctctggcttagggcgttgctgagcgagatgatgggtactgaagcaaagcgggtgaaactttttgttgacaacaagtcggcgatcgccttgatgaagaatcctgtgttccacgggaggagcaagcatattgatacccgctaccatttcattcgtgaatgtgttgagagtgggcagattctgattgagttcgttcgttctgaggagcagcgagcagatgcaatgacaaagggactgccggcggcgaagctggcgactgcacggcacctgttgggtgtgcgtgatctcaggccacgccaagactaa

SEQ ID NO: 13989 - DNA, 4284 bp, Oryza sativa
  Clone ID: TFbOSC24132j.C1.o4.fg
atggcgttggttccggcgggagccgcagcggatccggcgagggggagctcagggagtgcgttctcctacccacaactcacggcgacgaattacaccagctggtgcattcgcgttcaggcaatgatggaggaccagggcgtgtgggacgccatcgagccggcggccggggtggccgtcgacccaagaagggacaagaagtcgaagtcccatctgctgcagtccctcccggaggacttgctgatgcaggtggcaaagaagagatcggcaaaggaagtgtgggattgcttgaagacaaggttcgtgggcgcggaccgcgttcgcgaagcgcgcctgcagacgttgaagggtgaatttggtgccatggtgatggagccgggggaaactctggatcagtacgcgggccgcatcaccgcgatgagcgtgcgtcactcggtgttgggctcgacactgagtgattccgcgatagtgaagaagctgttcgacacggtgccagagaaattcatcagcctcgtcgcaggtattgagcagttttatgagattgataatatgccatttgaggaggcggtgggtcgtctcaaggcctacgaagaacgagttcgcaagaagaaggcggccgctggtggtgtcaccgccgacggtcaagtacttctcactcaggcggagtgggaggcgcgtttcaggaaggacggcagcgagtcgtcttcgccgcagaaaaacaaacctcccagcgacaggggaaaccgtgcccagggcggacgcggtcgcggcagagggcacggtggaggtggtggacgcggcagcgcgccgcggaacagtggcgctggtggctctggcggcggtggccgtgacaagagccacatcaagtgctacaactgcgaagaattcggccactactccacccagtgccctcatcccaagaagaagaaggtggaggcccatctcgcgcaaaccgacgacgcaaaccctgcattgttactggcggtgaccgaagacgagccggcgagcgggctggtcgtacacgaggagcgtgtgtggccgcagctgctgttggctgacagcggagcagccaccggggacatctggttcctggacaatggggcaagcaaccacatgacgggtgatcgtgctaagttcagagatctagacgtatcaatcaccgggagcgtcaagttcggggacgcctcaactgtgaaaattcaggggaaagggtctatcctgttctcctgcaagaatggggatcaatggctgctgcaggatgttttttatatccctagtctgtgttgcaacatggtgagcttgggccagctcacagaaacggggcacagagtggtgatggatgaagatgtgctcgaggtgttcgacaaaagtcccctgcggctggttatgcgggtgaggcgcacccctaatcggctgtaccggatcgagctgaagctagccactccggtgtgcctgctgacaaggatggatgagccagcatggctctggcatgcacggcttgggcatgtcaatttccaggcgatgaagctgttggctgacaagggcatggctggtggcatcccggcgatcacacatccaaaccagctctgtcaggcatgtctggttgcaaagcagataaggcagccgtttcccgcaacggcgaacttcagggcggaggagccgctcgagttgctccacattgatttatgtggaccgatcaccccgacaactatggccggtaatcgttactttatgctaattgttgatgatttctcacggtggatgtggatgttcgtgatcaaaacgaaggaccaggcactagaggctttcaccaagttcaagccgctggccgagaacacggccgggcggcgcatcaagacgctgagatcggatcgcggtggcgaattcctgtcgggcgaattcgcgcagttgtgcgagcaggcgggcatccagcggcatctgacggcgccatactcaccccagcaaaacggggtggtggaacgccgaaatcgttcggtaatggcgatggcacgatctctgatgaaagggatgtcagtgccgggcaggttttggggggaggcggtgcgccatgcggtgtatctcctcaaccggctaccgacgaaggcgatgggcgatcggaccccgttcgaggcatggacggggcgcaagccgcagctgggacacctgcgggtgtttgggtgcatagcacacgccaagatcacgacgcccaaccagaagaaacttgatgaccggagcgcgccgtatgtgtatctcggcgtggaagaaggcagcaaggcgcaccgcctgttcgacccgcgttgtgggcgtatccatgtaagtcgtgatgtcatttttgaagaaaatgtaccttggcaatggagtgtagtcgcaggggagcaaaactctaccgagttcacggtggaggaggatggagttgatgcaccgccggcaggagcgccggcctacccagtaccgcggtaccgggcgccatccccggcagtcccgcaatcgcctccggcaagcccggtaggggcgtcatcgtcattgccgacttcgccccagtcatcaccgagctctacaccgccttcaacacctgctaccggctctgccgggccggtggcgtcaccaggttccggcggcgaccttagaagcgatgagggtcccgtccggttcaggagtcttgaagatatcatgcgggaggcaccccgcgtggacctggtggaggatgaacacgatggggacgcgctgcttgcagagatggaggagccatcgagctaccgcgaggcagctggccagccggcatgggagaacgccatggcacaggagctgcaggcgattgagaagaattcaacatgggctctcactgcattgccggcaggacacaaacccattggcctcaagtgggtgtacaagctgaaaaagaacactgccggcgaagtaatcaagcacaaggctcgtttggttgcaaagggctatgttcagcgtcaaggggtggattttgaagaggtgttcgcgccagtggcgcggcttgacacagttcgtgtcatcctggctatcgcagctgatcggcggtgggaagtgcaccacctcgacgtcaaatcggcgttcttgaatggcgatcttgaagaagaagtgtacgtagcccagccagagggttttgtgaaacgaggagaagaacacttggtgctcaggctgagcaaggcgctctatggattgcgccaggccccgcgggcgtggaacacgcgtctcgacaagtgcttgaaagaactcggttttgcacggtgcacgcaggagcaggccgtgtatactagaggaaaggggcaagctggtgtaatcgttggtgtgtatgttgatgacttgattgtcacaggagaaaatccacatgagatagccatgttcaagcagcagatgatgggggaatttgagatgagtgatctcggtcttctctcttactatctggggatagaagtaattcagggggagaatgggattgctatcaagcaagctgcgtatgcgaagaagattctgtctcagtttggtatgcagggatgtaatcccacctcaatccccatggagccacggtcgctgctgcacaaggatgctgatggaaatccaattgatgcgaccgagtaccggcgtgtcatcgggtgcctgcgatacttgttacacaccaggccggatctgtcctacgccgttggcgtggcgagcaggttcatggagcggccgacaacgatgcatctcaaggcggtcaagatgatactcagatatctaaaggggacgctggactctggtctggtgtttgcaagcggcagtggctcgttggacatcacgggtttcactgacagtgacttggcaggtgacatggatgaccgtcggagcaccggcggcatggcgttctatgtgaacagcagcttggtgtcttggtgttctcaaaagcagaagacagtggcgctctcgtcttgcgaggcagagttcatggcggccactgcagcagcatgtcacgcgctctggcttagggcgttgctgagcgagatgatgggtactgaagcaaagcgggtgaaactttttgttgacaacaagtcggcgatcgccttgatgaagaatcctgtgttccacgggaggagcaagcatattgatacccgctaccatttcattcgtgaatgtgttgagagtgggcagattctgattgagttcgttcgttctgaggagcagcgagcagatgcaatgacaaagggactgccggcggcgaagctggcgactgcacggcacctgttgggtgtgcgtgatctcaggccacgccaagactaa

SEQ ID NO: 13990 - DNA, 4587 bp, Oryza sativa
  Clone ID: TFbOSC400181j.C1.o4.fg
atgtccgacgctcggtctcggcgttcggtcgcctcgagcactcagcgtcagcaggacgccgagctcgccgcagcagaagagcgcaggcgagcaacggctcagaccgctgcagcagcagcgagggcggccagactggcggcagcggagttggcagcagccagggcggaggcggaggcggaggcggcggaagatgcggcacgtgcggcggaggtagaggttgagaccttgcgcagcagcatcaacggctccatcgccggcgacatcaccgccgacagggagcttgaggagctggcaagaggaagggcacgggagcgggcagagcggtgggcagcagcccacctccacggcggtggcggcggcccaagggaccgcgcgcccgccgacgggaacccagacgggcgcgggcgtgccggcggcagcccggagcccacacgtggccctcacagacagcgcggctctcccctgaccggcgccatggtcaccacggcgtccagacggtggtcagggactttggtcccggcggtgcggcacatgtgggaggcagtccggtacggcgacgtcgactacgacgaggatcggcaggcactggatgccctcatcgctgcagtcccgcccgagatgcagttctcgctttcccagaagcggactgccaaggaggcctgggacgccatcactacggcacgcatcgacagcgaccgcgcccgcaagtccacactgcaggcactccgcaaggagtgggagaacctggccttcaagccaggtgaggatgttgatgactttgctctccgtctcaacactctcttgcagaaaatggtgcagtacggcgacgacacctacgacgaggagagagctgtcgagaagctcttccgctgcgtccctgagaagtacaggcagatcgctcgctcgatcgaatctctgctggacctctccacaatgtcgatcgaggaggcgttaggtcgcctcaaggtcgtcgatggtgatgagccacagcctctctcggggcccatcaccatcggcgggaagctccatctcactcgggagcagtgggaggcctctcagggtgacgggaggaagagggagtcatcttccccgacaggcggccgtaagccgcgcaaggcgcggggaggtgtccagctacggtgggcgcgaagacgtgccgagggtggcgcccgcagaggcgcccagggcgttgccaccggcaaccacaagcaggcacgagacgacgcctgccgcaactgtggcaagcttggccattgggccaaagactatcgacagccacgacgcggccaggcccacgtcgcacaggtggaagaggaagagccggctctgctcctggctcacgcaagcatcgagctacctccagcggcaccggccgcagcggctttcctccaccttgatgagccgaaggtactcgtctccctctgcaacggctccagcaacgacaaggctgatgagtggtacctcgacaccggcgccacccatcacatgaccagccgacgggagttcttcaccgagttcgactccggcgtccgaggctccgtcaagttcggggacgcctccggcgtggagatcaagggtgttggctccgtcaccttcaccgccaagtccggtgagcacaggctgctcaccggaatctactacatccccgcattgaggaattctatcatcagcgtgggacagctggatgagaacggctcacgcgtgttggtcgaggacggactcatgaggatttgggatcgccgtcgtcgccttcttgccaaggtaaccagaggcactaatcgactctacatcctcagcgcgcaggtcgcacaaccagtttgcctcgccgctcgtcgggacgacgaggcgtggcagtggcacgagcgcttcgggcacctccacttcgaggccctgaagcagctcagtgccaaggagatggtgcgaggcatgccgtgccttgaccacgtggagcagctctgcgacgtttgcgtggtgacgaagcagcggcggctcccctttccccagcagacgagcttccgagccaaggagtggctcgagctcgtgcacggggacttgtgtggcccagtgacaccggccacaccaggaggacgacgttacttcctgctgctcgtcgacgacctctcccgctacatgtgggtgatggtcctcggcagcaagggagaggctgcggacgccatcaggcatgcgcaggctgctgcagaggcggagtgcggccgcaagctgcgcgtgctgcgcaccgacaacggcggcgaattcacagcggctgaattcgcgtcgtactgcgctgatgagggcattcagcgccactacaccacgccgtacagcccgcagcagaacggcgttgtcgagcggcgcaaccagacggttgtggggatggctcgggccctcctcaagcagagggggatgccggccatcttctggggggaggcggtggtgacggcagcctacatcctcaaccgctcgcctaccaaggccctcgatggcaggacaccgtacgaggcttggcatgggcgcaagccggcggtctcccatctgcgggtcttcggctgcctcgcgttcgccaaggagcttggccacatcggcaagctcgacgacaggagcaccccaggggtgttcatcggctacgcggagggctcgaaggcctaccgtatcctcgaccccggagacacagcgtggcgagggtgggtatgggacaaggcggtggacgatggttcgactccgacgtacgacgacttcaccgtcgagtacatccacttcgagggagctgggggagtaggcagctcttcttcaccgagcgtgtctaccccagccctcgaatctccaccgactccgacaccaacacaccctcgggccacgacttcgactacgacgagctcttcgtcgacaccaccccagccagtgactccacatgctccagcaccaacagccactcctccaagcacgtctactccgacgccagctcgtgttgagcgcagcccagtggagttcgctactccgctctcccacgacagggagcgcatcgacgcgtaccacgacggcgagcagctacggtaccgtacgatggaggatcttctcggcgaccaaccggtgccaggactggtgcctcgcgacctagaggcgcagttgcaccttgcgtgcgacgacggtgagcctcggtcttttgcagaggccgagaaacacgcggcatggcgtgccgcgatgcagtcggagatggacgcggttcaggagaaccgcacctgggagcttgctgacctccctcgtggtcaccgagcgatcacccttaagtgggtgttcaagctgaagagggatgaagccggagccatcgtcaagcacaaggctcgcttggtggcacgcggtttcgtgcagcaggaggggatcgactacgatgatgccttcgctcccgtggcacggatggagtccgtgcgactccttcttgcgctggctgctcaggaaggctggggcgtccatcacatggacgtcaagtcggcgtttctgaacggcgacttgaaggaggaggtctacgtgcaccagccgccgggatttgtgatccccggcaaggagggcaaggtgctacgcctgcacaaggccctctacggcttgcggcaggcaccgagggcgtggaatgccaagttggattccacgctcaaggggatggcttcgagcaaagcccgcacgaggcggccatctactggcggggcaatggaggaaatgccttgctggatgcggaggtcgcggcgttcaagtgaggagatgaaggccaccttccagatgagtgatctggggcctctctccttctacctggggatcgaagtgcaccaggacgactccgggatcacgcttcgacagaccgcctacgccaagcgcgtcgttgagctgcctgggctcaccgattgcaacccagctctcactccgatggaggagagactgaagctgagccgcgacagcacggcggaggaggtggatgctacacagtaccggcgtcttgtggggagccttcgctacctcacccacacacggccggacttggccttctccgtcggctacgtcaatcggttcatgcagcgaccgacgacggagcaccagcaggctgtgaagaggatcatccgctacgttgcggggactctcgaccacggtctctactacccgaggtgtcctggcaaggcacacttcgtcgggtacagcgacagcgaccacgccggcgacatcgacaccagcaagagcacgagcgggattctcttcttcctcggcaagtgcctcgttagctggcagtcagtcaagcagcaggtggtggccctgtccagttgcgaggccgaagacactggaacggtggagctcagggtggatagcaagtccgctctggccctggcaaagaaccccgtttttcacgaacggagcaagcacatccgggtgaggtaccacttcatccaaagctacttggaggaagggagcatcaaggcgagctacatcaacaccaaggaccagcttgcggacttgctcaccaagcctcttgggaggatcaagttcctcgagctctactccaggatcgggatggcccaacttccccacaagacgacgcacaagacttag

SEQ ID NO: 13991 - DNA, 4410 bp, Oryza sativa
  Clone ID: TFbOSC407196j.C1.o1.np
atggcaagccgacgtcgggcgtcaactagcaatgaagaaactcagacacctgacctaaccaccctggccggagttatggccactcaaacccaacttctgcaagccattgcgaataaccaaggcaactacggcggatcgagctttggagagtttatgaggaccaagccacccacattcgccacagctgaagaacctatggatgctgaagattggttaaggatcattgagaagaagataactcttgttcgagtacgtgaggccgataaagtgatctttgcggcaaatcaattggacggaccagccggagaccggtgggacacatacaaagaagcccgagaagaagatgctggagaaccaaactgggaggaattcaccacagccttccttgacaacttcgtgcctgccgcggtgatgcggatgaagaagaatgagttcaggagactatggcaagggaataccacagtacaagagtacctgaaccgtttcactcagctggcgcgctacgcgactagagatcttgccgacgaggaggaaaagatcgataaattcattaaaggcttgaatgacgagttgcgcgggcccatgattcgacaagaccacgatagtttccagagtttaatcaataaggtcgttaggctggaaaacgaccggaaggtcgtggagcacaatcgtaaaaggaggcttaccatgaaccgcccgcctcagaccgcaccccagcgtcctaaagggacaacctcctcggcatggagaccaacagtggtgacaaccagtcgacctaccgcctccagcaatttccacaggccggttaccattcagaaccgagctcctgcaccaaatcaggccaccactggatcagtaaggccggaaagctgtttcaactgtggagagtacgggcatttcgccaacaaatgcccccatccaaacaagacacctattcgcaccggagctaatgcaacggctattcacgggactgctacccctgctgctggacgagatctattcaggactccgcagactaacaggaccgctaccggatttggacgcgggcaagtgaaccacgttcgagctgaagaggcctaggaagaccaaggcgtactgatgggtatgttttcactcaactccactccagttaaagttctcttcgattcaggagcatcgcattcatttatatctctgaaagcaagtcaacaacacaatttaaccagagttaaactaaggcaaccaatgttagtacattcacctaggggtgaagtagccgtggacacagcttgcattgacgtacctattcgccttagggatgtggtgtttccctccaaccttatggttttgataccacagacccttgatgtcatattgggtatggattggttagcaaagcatagaggagtaatcgactgtagacgtagagaagttaccctgaccacaccctggggatcggatataagagcaaccatggatcaagatcctagactaactgaatgtgccggaggtatatttaccatgctaccccaaaaaggaatgcccgtagtacagcgatttcccgatgtattcccagaagatttacctggaatgccaccagatcgtgacatagagttcatcattgacctgatacccggaactgcccccatatccaagagaccatatcggatgccagtcaatgagttggaggaactcaaaaagcaaatcagagagttgcaagagaagggatttgtacgccccagttcgtcaccttggggagccccagtgttattcgttaagaagaaggatggtagcatgaggatgtatgtggactaccgctcactgaatgaagtaactatcaagaacaagtacccactaccacagattgatgatctttttgatcaactcaaaggagctaaggtgttctctaagattaaccttcgatcaggataccaccaattgaaaattaggaccggggatatacccaagaccgcgttctcaacgcgctatggattgtatgagttcacagtaatgtcgtttgggttaaccaacgccccggcatactttatgaatcttatgaacaaagtgttcatggattacttggacaaattcgtggttgtattcatcgatgatatcctgatctactccaaagatgaggaagaacatgcggaacacttgcgattggtactcgagaaacttcggaagcataaattatatgcaaagtttagtaaatgtgagttctggttaaaagaagtcgcttttctaggccacgtgatctcagccggtggagtagcagtggaccctgctaaagtggaggccgttacggaatggaaggcacccaaatctgtgactgaaattcagagttttctaggcttggccggatactatcggaggttcattgaggggttctctaagatagcccgacctatgacacaactactcaagaaagaaaagaagtttgtgtggtcagaacagtgtcaaggaagctttgagcagctcaaagaaaagctgaccttggcacctattctagttctctctgacaataggaaagactttgttatatattgtgatgcatcaaggcaaggactaggaggagtactgatgcaggacggaaaggttgtggcctatgcgtcgcgacaattgtgaccacatgaggaaaactaccctatccatgacctagaacttgcagctgtggtccatgcgctaaagatttggagacattatctgattggaaatcattgcgatatctacactgaccacaagagtttgaagtatattttcacccagtcagatctcaacttgaggcaaaggcgatggctggaattaatcaaggattatgatctagaggttcactatcacctaggcaaagcaaacgttgtggccgacgctctgagtcgtaagaaccattgcaatcatctaagaatggaagggatggcccctgaacttaggaaggaaatagcccagctgaacctacatatagtatctcgtggacagataaacaccctggacattcaacctcttttgagaacccagatagaggaagcctagaaggacaacggtgagatccaggaggtgaaggagcgcatagccactggtcgtgcgaaagaattctcaatggatgagaaggaaatactgtggtataagaagagaatctacgtacccgaacagggtggactgaggggattaattttaaaggaagctcacgaatcggcatattcattgcaccccggaagtacgaagatgtaccaagatctgaaggaaggatactggtggcccaacatgaagagagatgtggcagaatacgtagcactctgtgatgtgtgccaaaaggtgaaggctgagcatcagcgaccggtaggtttgttgcaaccccttaggattcccgagtggaaatgggatgagataggtatggattttgttgttggattgcccaagaccgcaacaggatatgattccatctaggtgatcgtggatcgactcaccaagacagcgagattcatccccgtcaagacaaattatagcagtgccaagctagccgagttatacatgaccaggatagtatgtcttcatggtgtacctaagaggattatatctgatcgaggcacacagtttacctcgcatttctgggagaaagtacatgaagccctaggaagttaccttgtgtttagcacagcttatcacccacaaacagatggccagacagagagaaccaaccaggttctagaggacatgttgagagcttgtgcattggattttagcaaagactgggagagatgtttgccctacgccgaattctcctacaacaacagcttccaagcgagcctaaagatgtcgtcaaatgaggcattatttggtcgacgatgtcgcaccccattaatgtggaccgagacaggtgaacaggtggtatttggacctgacattatcaaagaagctgaagaaaaggttcgcctgattcgagaccgtctaaaagtagcacaatcacgacagaagagttacgccgacacccgaagaagaaacctggaatttaaggaaggagattacgtttatctaaaggtttctccgatgaggggaacgaaaaggtttaaggtcaaaggaaaactagcaccaagatatgtgggaccttttcaaatcatcgctagacgaggagaagttgcctaccagttacagctacccgaaaatatcgccgatgtgcacccagtcttccatgtgtctcagttaaagaagtgcttacgagtaccggaggaacaagctccgttggaggaaattcatattagcaatgatctcacgtatccagaacacccagtctagatattggatgaagcagaaaagaggactaggaccaaagtgtggcatatgtacaaggtacaatggagtaatcatactgaggatgaagccacctgggaaagcgaagaattcttgaggacggaatacccgcatctattcgaaacctga

SEQ ID NO: 13992 - DNA, 3015 bp, Oryza sativa
  Clone ID: TFbOSC101460j.C1.o3.fg
atggccccatccaactcttacgatgatgctatgaagcctgagaggttcaatggagccgcagcccggatgatgtactggctcactgctttggatttgttttcggtcatcactgaccaggagccgcagccaggcgagttctttcctggggctattccatatgctgatttttaccagaccaggaactttaattgtgtgggtagaattttgagcatgctttccgataaattctatgatatctacatgcatcatacctctgctcgtgtattgtgggaaactctagagaagaagtacagtgttccagatgctggaaaagatctgtacttggttgaaaaataccatgacttcaagatgaccaatggaaagtctatggtagagcaaacccaggaactccagcttctagtgggggagctcaaccatagtaagattgctctccctgacaagtttcaggtgggaatggtgattgcaaagctcccaccctcgtggagagattttgctactgctctcaaacatcgcagggaggaaatgactatggatgacctagttgcttccctggacgttgaagagaaagcccgtgcaaaggatgctccattggttaatgaagattataactctagagtgaatctcactgatacacatcagagaaggaacaagaagaacccaaaagagaacaacagtggcatgaagccaagaggaaagattgacaaaggcaacggcaagaaaaatggcaaaggtccgatgagttgcttcgagtgcggcaagcctggccactttgctaggaattgtcgttacaagaaaagaaatgagaaagtccagaaggacaagtctgatgatcagactgatgccaaggtcaatatggttattgacgaagctgaagttgcaagaacaaaagatgaagcttttgagcatttcaaaatttttaaagcagaggctgagaatcagcttgatttgaaaattaaaattttgaggtctgacagaggaggagaatacttatcaattgaattctctaagtttcatcaagaacatggaatcatccatgaaaccacccctccgtattcaccccaatcaaatggggtagttgaaaggaagaatcgtactctcactgatttagtgaatgcaatgctcagcaattcaggtcttccaaacaatatgtggggtgaagctctgtacacagcatgctttgtgctgaatcgtgttcctgcaaaaggaacagaagtaaatatacctgttgtcaagaagagaaagctcggacctaagaccgtcgattgcgtgttcataggatatgcacagaacagtccagcttatcgtttcctggtagttaaatctgaaactacagaagttcgtgaaaatactgtgatggaatcatgtgacgcgacctttttcgaagatacatttccactgaaggtaaaatctccaagttctgaacctatttctgttgaacctagaattagcattttgtcagatgattcccttaatttaaggaggagcaagagatcacgaactgagaaaatgtttggtgaagattttatcatataccttgtcaatgatgtgcccagtactctgtcagaagcatttgcatctgctgaagctgcatactggaaggaagcagtgcaaagtgagatggactctatcctctctaatgacacttgggaaatcacacacttgcctcaaggctgtagggccataggctgcaagtggattttcaaaaagaaactgaaacctgatggaactattgacaagttcaaagccaggttggtcgcaaaggggtacacacaaagacagggagaagattactttgatacattttctccagtggctcgcatgcctacaattcgtgctcttgtagcactggctgctgcatatggctataaaatccatcaaatggatgttaaaaccgccttcctcaacggagagttagaggaagaaatatacatgcagcaaccggatggtttcgtcattcctggacaagaagataaagtgtgtaaacttgagaagtccttgtatggactgaaacaggccccaatgcaatggcatgaaaaattcgacaaaacattgatctctgctggattcactgttaatgatgctgacaaatgtgtatattccaggtttgatggagatatagatttgggtgaagccaaagtaattctgaacattaaaattcaggaaaaggacaaaggttttgaactcaatcagtcacactatgtggagaagcttttgcatcgttttggtcattttaatagcaaatctgcagctactccctatgatccttgtttaaaattgcataaaaatcaaggtcatggtcttgaccaagtgaagtttgcacaaataattgggtctttaatgtatcttgcaaatactactcgtcctaacatttcatatgcagttagcaggctgagcaggtattcgagcaaacctgattcaaatcattggcatgctctagaatgtgttctaaggtatttgaaagggaccataaatcaaggtttgttttactctggtttcccagctgtgctggagggttatagtgatgcaaattggatcacttattctaatgaaatgaaatcaacgagtggttttgtttttactcttggtggagctgccatatcgtggaagtctgcaaaacagactatattaacacgatccaccatggaagcggaactagtagcattggagactgcttgttgcgaagctgaatggcttagggaactattgatggatattccaatagtagaaaaaccaattcctgcagtgctcttgtattgtgacaatcaagctgtgatagctaaagttacaagcaagaaagaaaacatgaaatcttctagacatgtgaagaggagactaaagtctgttagagacttgaggaatactggtgtagttacatttgactatatcaagacagaaaagaatttggctgatccattcacaaaaggattagcacgaaagccaatactagagttgtcgaaagggatggggctgaggcctgccaatgaattattgacagtggcaacccaacctgtttga

SEQ ID NO: 13993 - DNA, 4203 bp, Oryza sativa
  Clone ID: TFbOSC400798j.C1.o12.fg
atggcgacggcgacaggcggcgatggcgacgtcggcgcggcggcaggcgacggcgcgacgggacgactgagtctaaccttgagctctatgatgtacccgaacgtggaggaatgcaaaggatggacaaggttgtcaccacctgccgcctacctcactttccttggagcacacaacaaacgaagagcaaggtttagggcttggacacgtgatcgtgcactagaagaagcacttatgccaaggcgtcgcacgagctccccgcgctgttggtcggtgtcgccgagcgagcgcactcctggaggttccggcggccgcgcttcgggcagcggcgggaaggacagcgggctggttatacaccgcgtggtcaaggagtcaggatcgtctgcgaactatccggttctcacgaagacgaattacaatgactgggcattgctcatgaagatcaagttgcaggcacgttgcctgtgggacgctgtcgaacgtggccgcgctgccgttgagctgcacgaggatcagatggcgcttgatgcgatctatagtgcggttccacccgagatgatctcgatcttggcgacgaaggcatcggcgaaggaggcatgggactgcatcaagacaatgcgcgtcggtgacaaccgcatccgcaaggccagcgcacaacgggtgcgtacggagtacgagaggatcgcattccgggacggcgagtcggtggaggagttcgccatgtggcttactagtgtcgtcaaccaactcgccacccacggtgatcccgagcccgatgacaaggttgtcgagaagtatctgcacgtcgcccgaccgaggtttagccaactggcggccgaggattaccagaccccgccatcctcccaaaacaccgatggcaagctctacctaaccgaagaagaatggctggagcaccacaaaaaggagcaggaggcgaaacgctctggcgccggttccagcggacgtaacaagcgccgcggcggaaaggggtgcatcggcggtggctcggatgggtccacctcctcgccggcacgcagggatgacaaatgtcgtaactgcggcaagctcagccattgggctaaggagtgccggagcaagcctaagcacgaagaccaggcccatgtggcccaagacgacaagcccacgctcatgctcctgactgggggctacgtcgaaaccgcaggctccatgttgccgccaccaccgccacgcgcgacgccggcgcctcagcgcgtctgcgttgagctcgtcgagaagaaggtgttcgctgggttagatcatgaagcagaccgcgaccagcgcagctggatcatggactccggtgtgtcaaaccatatggcgggttgccgagcggccttctccgacctcgacactggcatcaccggcaacgtttggcttggggatggctcgatcatccctatcgaggggtgcggcatggtgttgttcgcctgcaagaatggagaacaccgcaccctcgccaacacgtactttctgccgcggctcgccgccaacattgtcagcatcggccaactcgacgaaaccagcttccaagtattggttgaggatggcatcatgcgcgtccgcgacaagcagcggcgcctactcgcccgaatccctcggagcccagggcgcttgtacgtgctcgacatcatccttgcgcggccagtttgcctgacagcgcgcgccggcgaagacgcgtggcattggcacgctcggttcgggcacatcaactttactgtgctgaagaaaatgagtagggagaccctggtacgtggattgccattgttgacgcaggtcgatcaggtttgcgaggcgtgtctcgccgggaagcatcgacgggcgccgttcccacgacgggcgctgtctcgctctagcaagcccctgcaactcctccacggcgatctctgcggcccgatctcaccagtgacgccgagtgggaaccgctacttccttctcctcatcgatgactacagccgcttcatgtggatcaagctccttccctcgaaggacgccgaaccggccaccatcaagcagatacaagcggctgccgagaggaagtcggggaagcggcttcgtgcactacgcatgcaccgaggaggcgagtacaccgccggacacttcaacgagtattgggccgagctcggactgcgtcgagaactcacagcgctgtattcgccacagcagaacggcgtcgtcgagcgccggaaccaatcggtggtgggcacggcgaggagcatgttaaaggcgaaagggctcccaggtcatcatcgaagagaatcggcgaaaaactccatacgagctatggaacggcggttcgccggcggttcatcatcttcgtacatttgggtgtgtgggccatgtgaagaactcgatgacaggagtaaacccatgattttcgtgggctacgagccaggatcaaaggcgtactgcgcctacaaccccgtgacgcgacaggtgcacatctcccgcaatatcgtgttcgacgaggaggctcagtggaggtgggacggccaggctgaaacgggcgtcgacaccgacttcgtcatcgagtacaccaccgtgcagcagtcagatgcggcgccaccttccccagctgcggcaccaccatcgccaggctcgccgttccgcaccatcgacaacgtgcttggcccagcaacaccacaaggacaggcggtacgggagttcgatgaggatctcctgatggtctctgcggaagagccggcgtcattcgatgaagcagagcaacatcagtgctggcgacatgcaatgatcgaggagatcaagtccattgaagccaacaacacttggcgtctcgccgacgggccgtcgcgtcagtgcccgattggactcaaatgggtcttcaagacgaagaaagacgttgctggcaacatcaccaggtacaaggcgtatctcgtggcgaaaggctacgtgcagcggcaggggattgacttcgacgaggtgttcgcgctggtggcgcggctcgagtctgttcgactgctgttggcacacgcggccccgcgcgcgtggtatgctaagctcgacgcgtccctgctggctctaggcttccatcaaagctcgtcagagcacgccgtgtacttccgagccacgggcgcacgccggctggtcgtcggcgtgtacgtcgatgatctcgtcatcaccggtggtgactccgccgagctcgagcagttcaaggacgagatgaagggcacgttccagatgagcgatctcgggttgttgaaatattacctcggattggaggtgaatcagactgaagatggcatcactgtgtgccaacgggcatacgctgagaagatattggagatggctgggatgagcagcaccaatcccagcctcacccccatggaatcacgcctcaagctcagtaagtcgagtgccgcaccagctgttgatgcaactgattataggcggatcgtgggatcactgcgatacttggtaaattcgcggtcagatttggcgttcttggtgggatatgtcagccggtttatggagaagcccaccaccgagcacatggcagctgtgaagcgtgtgttgaggtacattgctggcactaccaactatggctgtcaataccgaaggaagaaggatgccgtgtgcctcgttggctacagcgacagtgatcttgcaggcgatgttgatagccgtaagagcacaacaggagttctcttctttctcggggataatttgatcacctggcagtctcagaagcaaaaggtcgtcgctctatcgtcctatgaagcggagtacattgcggcgacgactgttgcgtgccaaggtgtgtggctggcgcttctccttgctgagctcaggggagaagaagggagcgccatcacactgaaggttgacaaccagtctgcaattttgcttagcaagaacttgtgtttcacaatcgtagcaaacatattgacactaggtatcatttcattcgggagtgtgtcgaggaagcgcatgagccccaacgtgtggaagccaattggaatcgaaaacccggatacggaaatgaaatcgaatattatcgaatacagatacagaaggaatacgaaactgaacgaatatggcaatgaagatttgctggagagagaaagcgctatctctgatctcgccgggcacaaactcgaggaggaagactaccctgttgtcgactatgagtcagaccttcagaccgccatatcgaaaacagttagatag

SEQ ID NO: 13994 - DNA, 3090 bp, Oryza sativa
  Clone ID: TFbOSC410421j.C1.o8.fg
atggccccatccaactcttacgatgatgctatgaagcctgagaggttcaatggagccgcagcccggatgatgtactggctcactgctttggatttgttttcggtcatcactgaccaggagccgcagccaggcgagttctttcctggggctattccatatgctgatttttaccagaccaggaactttaattgtgtgggtagaattttgagcatgctttccgataaattctatgatatctacatgcatcatacctctgctcgtgtattgtgggaaactctagagaagaagtacagtgttccagatgctggaaaagatctgtacttggttgaaaaataccatgacttcaagatgaccaatggaaagtctatggtagagcaaacccaggaactccagcttctagtgggggagctcaaccatagtaagattgctctccctgacaagtttcaggtgggaatggtgattgcaaagctcccaccctcgtggagagattttgctactgctctcaaacatcgcagggaggaaatgactatggatgacctagttgcttccctggacgttgaagagaaagcccgtgcaaaggatgctccattggttaatgaagattataactctagagtgaatctcactgatacacatcagagaaggaacaagaagaacccaaaagagaacaacagtggcatgaagccaagaggaaagattgacaaaggcaacggcaagaaaaatggcaaaggtccgatgagttgcttcgagtgcggcaagcctggccactttgctaggaattgtcgttacaagaaaagaaatgagaaagtccagaaggacaagtctgatgatcagactgatgccaaggtcaatatggttattgacgaagctgaagttgcaagaacaaaagatgaagcttttgagcatttcaaaatttttaaagcagaggctgagaatcagcttgatttgaaaattaaaattttgaggtctgacagaggaggagaatacttatcaattgaattctctaagtttcatcaagaacatggaatcatccatgaaaccacccctccgtattcaccccaatcaaatggggtagttgaaaggaagaatcgtactctcactgatttagtgaatgcaatgctcagcaattcaggtcttccaaacaatatgtggggtgaagctctgtacacagcatgctttgtgctgaatcgtgttcctgcaaaaggaacagaagttactccatatgaactatggaaaggcagaaaaccaaatctgaattttctgaaagtgtgggggtgccttgccaaggtaaatatacctgttgtcaagaagagaaagctcggacctaagaccgtcgattgcgtgttcataggatatgcacagaacagtccagcttatcgtttcctggtagttaaatctgaaactacagaagttcgtgaaaatactgtgatggaatcatgtgacgcgacctttttcgaagatacatttccactgaaggtaaaatctccaagttctgaacctatttctgttgaacctagaattagcattttgtcagatgattcccttaatttaaggaggagcaagagatcacgaactgagaaaatgtttggtgaagattttatcatataccttgtcaatgatgtgcccagtactctgtcagaagcatttgcatctgctgaagctgcatactggaaggaagcagtgcaaagtgagatggactctatcctctctaatgacacttgggaaatcacacacttgcctcaaggctgtagggccataggctgcaagtggattttcaaaaagaaactgaaacctgatggaactattgacaagttcaaagccaggttggtcgcaaaggggtacacacaaagacagggagaagattactttgatacattttctccagtggctcgcatgcctacaattcgtgctcttgtagcactggctgctgcatatggctataaaatccatcaaatggatgttaaaaccgccttcctcaacggagagttagaggaagaaatatacatgcagcaaccggatggtttcgtcattcctggacaagaagataaagtgtgtaaacttgagaagtccttgtatggactgaaacaggccccaatgcaatggcatgaaaaattcgacaaaacattgatctctgctggattcactgttaatgatgctgacaaatgtgtatattccaggtttgatggagatatagatttgggtgaagccaaagtaattctgaacattaaaattcaggaaaaggacaaaggttttgaactcaatcagtcacactatgtggagaagcttttgcatcgttttggtcattttaatagcaaatctgcagctactccctatgatccttgtttaaaattgcataaaaatcaaggtcatggtcttgaccaagtgaagtttgcacaaataattgggtctttaatgtatcttgcaaatactactcgtcctaacatttcatatgcagttagcaggctgagcaggtattcgagcaaacctgattcaaatcattggcatgctctagaatgtgttctaaggtatttgaaagggaccataaatcaaggtttgttttactctggtttcccagctgtgctggagggttatagtgatgcaaattggatcacttattctaatgaaatgaaatcaacgagtggttttgtttttactcttggtggagctgccatatcgtggaagtctgcaaaacagactatattaacacgatccaccatggaagcggaactagtagcattggagactgcttgttgcgaagctgaatggcttagggaactattgatggatattccaatagtagaaaaaccaattcctgcagtgctcttgtattgtgacaatcaagctgtgatagctaaagttacaagcaagaaagaaaacatgaaatcttctagacatgtgaagaggagactaaagtctgttagagacttgaggaatactggtgtagttacatttgactatatcaagacagaaaagaatttggctgatccattcacaaaaggattagcacgaaagccaatactagagttgtcgaaagggatggggctgaggcctgccaatgaattattgacagtggcaacccaacctgtttga

SEQ ID NO: 13995 - DNA, 3228 bp, Oryza sativa
  Clone ID: TFbOSC900212j.C1.o7.fg
atggatggaggaggtggtcacactcacgccagggcgcgctatctggtggagaagaaagcctcatgtggagtaacagtttccatggccccatccaactcttacgatgatgctatgaagcctgagaagttcaatggtaatcactttgagcgctggcaaacccggataatgtactggctcactgctttggatttgttttcggtcatcactgaccaggagccgcagccaggcgagttctttcctagggctgtgccatatgctgatttttaccagaccaggaactttaattgtgtgggtagaattttgagcatgctttccgataaattctatgatatctacatgcatcatacctctgctcgtgtactgcgggaaactctagagaagaagtacagtgttccagatgctggaaaagatctgtacttggttgaaaaataccatgacttcaagatgaccaatggaaagtctgtggtagagcaaacccaggaactccagcttctagtgggggagctcaaccatagtaagattgctctccctgacaagtttcaggtgggaatggtgattgcaaagctcccaccctcgtggagagattttgctactgctctcaaacatcgcatggaggaaatgactatggatgacctagttgcttccctggacgttgaagagaaagcccgtgcaaaggatgctccattggttaatgaagatgataactctagagtgaatctcactgatacacatcagagaaggaacaagaagaacccaaaagagaacaacagtggcatgaagccaagaggaaagatcgacaaaggcaacggcaagaaaaatggcaaaggtccgatgagttgcttcgagtgcggcaagcctggccactttgctaggaattgtcgttacaagaaaagaaatgagaaagtccagaaggacaagtctgatgatcagactgatgccaaggtcaatatggttattgacgaagctaaagttgcaaggtgcgtttcgaacatgtctcaaaaatttgataagtgtcaacctgtagattggtgggttgacactggagcaactattcatgaacagcaaggaggccgttctgtgattggtcttgagagcaagtccagggtgctgggtagtggtcgagtggatctgaagctttcttcaagaaaagttctgaccctacacaatgtgctcttcgtaccagcagcgaaagcaaatttgattagtatgaatggaattttgactaaaggaggtagacggtacttcattacttttattgatgattgctctaagtactgctatgtttatctcttaagaacaaaagatgaagcttttgagcatttcaaaatttttaaagcagaggctgagaatcagcttgatttgaaaattaaaattttgaggtctgacagaggaggagaatacttatcaattgaattctctaagtttcatcaagaacatggaatcatccatgaaaccacccctccgtattcaccccaatcaaatggggtagctgaaaggaagaatcgtactctcactaatttagtgaatgcaatgctcagcaattcaggtcttccaaactatatgtggggtgaagctctgtacacagcatgttttgtgctgaatcgtgttcctgcaaaaggaacagaagttactccatatgaactatggaaaggcagaaaaccaaatctgaattttctgaaagtgtgggggtgccttgccaaggtaaatatacctgttgtcaagaagagaaagctcggacctaagaccgtcgattgcgtgttcataggatatgcacagaacagtctagcttatcgtttcctggtagttaaatctgaaactacagaagttcgtgaaaatactgtgatggaatcacgtgacacgacctttttcgaagatacatttccactaaaggtaaaatctccaagttctgaacctatttctgttgaacctagaattagcatttcgtcagatgattcccttaatttaaggaggagcaagagatcacgaactgagaaaacgtttggtgatgattttatcatataccttgtcgatgatgtgcccagtactctgtcagaagcatttgcatctgctgaagctgcatactggaaggaagcagtgcaaagtgagatggactctatcctctctaatggcacttgggaaatcacacacttgcctcaaggctatagggccataggctatagggccataggctgcaagaaactgaaacctgatggaactattgacaagttcaaagccaggttggtcgcaaaggggtacacacaaagacagggagaagattactttgatacattttctccagtggctcacatgcctacaattcgtgctcttgtagcactggctgctgcatatggctataaaatccatcaaatggatgttaaaaccgccttcctcaacggagagttagaggaagaaatatacatgcagcaaccggatggtttcgtcattcctggacaagaagataaagtgtgtaaacttgagaagtccttgtatggactgaaacaggccccaatgcaatggcatgaaaaattcgacaaaacattgatctctgctggattcactgttaatgatgctgacaaatgtgtatattccaggtttgatggagatataggtgtcatactctgtctttatgttgatgatattttaatccttggtacaaatctgaatatcatctctgaaatcaaaagctatttatcaaataaatttgatatgaaagatttgggtgaagccaaagtaattctgaacattaaaattcagaaaaaggacaaaggttttgaactcaatcagtcacactatgtggagaagcttttgcatcgttttggtcattttaatagcaaatctacagctactccctatgatccttgtttaaaattgcataaaaatcaaggtcagggtcttgaccaagtgaagtttgcacaaataattgggtctttaatgtatcttgcaaatactactcgtcctaacatttcatatgcagttagcaggctgagcaggtattcgagcaaacctgattcaaatcattggcatgctctagaacgtgttctaaggtatttgaaagggaccatgaatcaaggtttgttttactctggtttcccagctgtgctggagggttatagtgatgcaaattggatcactgattctgatgaaatgaaatcaacgagtggttttgtttttactcttggtggagctgccatatcgtggaagtctgcaaaacagactatattaacatga

SEQ ID NO: 13996 - DNA, 4650 bp, Oryza sativa
  Clone ID: TFbOSC401668j.C1.o29.fg
atgtccgacgctcggtctcggcgtttggtcgcctcgagcactcggcgtcagcaggacgccgagctcgccgcagcagaagagcgcaggcaagcaacggctcagaccgctgcagcagcagcgagggtggccagactggcggcagcggagttggcagcagccagggcggaggcggaggcggaggcggcggaagatgcggcacgtgcggcggaggtagaggttgagaccttgcgcagcagcatcaacggctccattgccggtgacatcaccgccgacagggagcttgaggagctggcaagagaaagggcacgggagcgagcagagcggtgggcagcagcccacctccacggcggcggcggcggcccaagggaccgcgcgcccgccgacgggaacccagacgggcgcaggcgtgccggcggcagcccggagctctcacgcggccctcgcaggcagcacggctctctctcccctgaccggcgccatggtcaccacggtgtccagacggtggttagggactttggtcccggcggtgggtggcctaccctcaccaaaaccaactacatcgagtgggccgcggtgatgagggtgaggctccaggtgcggcacatgtgggaggcagtccggtacggtgacgtcgactacgacgaggatcggcgggcactggatgccctcatcgctgcagtcccgcccgagatgcagttctcgctttcccagaagcggactgccaaggaggcctgggacgccatcgctgcggcacgcatcggcagcgaccgcgcccgcaagtccacactgcaggcactccgcaaggagtgggagaacctggccttcaagccaggtgagaatgttgatgactttgctctccgtctcaacactctcttgcagaaaatggtgcagtacggcgacgacacctacgacgaggagagagctgtcgagaagctcttccgctgcgtccctgagaagtacagacagatcgctcgctcgatcgaatctctgctggacctctccacgatgtcgatcgaggaggcgttaggtcgcctcaaggtcgtcgatggtgatgagccacagcctctctcggggcccatcaccatcggcgggaagctccatctcactagggagcagtgggaggcctctcagggtgacgggaggaagggggagtcatcttccccgacaggcggccgtaagccgcgcaaggcgcggggaggtgtccagctacggtgggcgcgaagacgtgccgagggtggcgcccgcagaggcgcccagggcgttgccaccggcaaccacaagccggcacgagacgacgcctgccacaactgtggcaagcttggccattgggccaaagactatcgacagccacgacgcggccaggcccacgtcgcacgggtggaggagaaagagccggctctgctcctggctcacgcaagcatcgagctacctcaagcggcaccggccgcagcggctttcctccaccttgatgagccgaaggtactcgtctccctctgcaacggctccagcaacgacaaggctgatgggtggtaccttgacaccggcgccacccatcacatgaccggccgacgggagttcttcaccgagttcgactccagcgtccgaggctccgtcaagttcggggacgcctccggcgtggagatcaagggtgttggctccgtcaccttcaccgccaagtccggtgagcacaggctgctcaccggagtctactacatccccgcgttgaggaattctatcatcagcgtgggacagctggatgagaacggctcacgcgtgttggtcgaggacggactcatgaggatttgggatcgccgtcgtcgccttcttgccaagataaccagaggcactaatcgactctacatcctcagcgcgcaggtcgcacaaccagtttgcctcgccgctcgtcgggacgacgaggcgtggcagtggcacgagcgcttcgggcacctccacttcgaggccctgaagcagctcagtgccaaggagatggtgcgaggcatgccgtgccttgaccacgtggagcagctctgcgacgtctgcgtggtgacgaagcagcggcggctcccctttccccagcagacgagcttccgagccaaggagcggctcgagctcgtgcacggggacttgtgtggcccagtgacaccggccacaccaggaggacgaccaagggaggctgcggacgccatcaggcatgcgcaggctgctgcagaggcggagtgcggccgcaagctgcgcgtgctgcgcactgacaacggcggcgaattcacggcggctgaattcgcgtcgtactgcgctgatgagggcattcagcgccactacaccgcgccgtatagcccacagcagaacggcgtcgtcgagcggcgcaaccagacggttgtggggatggctcgggctcttctcaagcaaagggggatgccggccatcttctggggggaggcggtggtgacagccgtctacatcctcaatcgctcgcctaccaaggccctcgatggcaggacaccgtacgaggcttggcatgggcacaagccggcggtctcccacctacgggtcttcggctgcctcgcgttcgccaaggagcttggccacatcggtaagctcgacgacaggagcaccccaggggtgttcatcggctacgcggagggctcgaaggcctaccgcatcctcgacccggagacacagcgtgtgcgcacagtgcgcgacgtagtgttcgacgaagggcgagggtgggtatgggacaaggcggtggatgatggttcgactccgacgtacgacgacttcaccatcgagtacgtccacttcgagggagctgggggagtaggcagctcttcttcaccaagcgtgtctaccccaatccccgagcctccaccgactccaacaccaacacaccctcgggccacgacttcgactacgacgagctcttcgtcgacaccaccccagccggtgtccccacgcgctccagcaccaatagccactcctccgggcacgtctactccgacgccagctcgtgttgagcgcagcccggtggagttcgctactccgctctcccacgacggggagcgcatcgacgcgtatcacgacggcgagcagctacggtaccgtacgatggaggatcttctcggcgaccagccggtgccgggactggtgcctcgcgacctagaggcgcagttgcaccttgcgtgcgacgacggtgagcctcggttttttgcagaggccgagaaacacgcggcatggcgtgctgcgatgcagtcggagatggacgcggttcaggagaaccgcacctgggagcttgctgacctccctcgtggtcaccgcgcaatcacccttaagtgggtgttcaagctgaagagggatgaagccggagccatcgtcaagcacaagactcgcttggtggcacgcggtttcgtgcagcaggaggggatcgactacgacgatgccttcgctcccgtggcacggatggagtccgtgcgactccttcttgcgctggctgctcaggaaggctggggcgtccatcacatggacgtcaagtcggcgtttctaaacggcgacttgaaggaggaggtctacgtgcaccagccgccgggatttgtgatccccggcaaggagggcaaggtgctacgcctgcacaaggccctctacggcttgcggcaggcaccgagggcgtggaatgccaagttggattccacgctcaaggggatgggcttcgagcaaagcccgcacgaggcggccatctaccggcggggcaatggaggaaatgccttgctggtgggtgtctacgtcgacgacttggtgatcaccggcaccaaggatgcggaggtcgcggcgttcaaggaggagatgaaggccaccttccagatgagtgatctggggcctctctccttctacctggggatcgaagtgcaccaggacaactccgggatcacgcttcgacagaccgcctacgccaagcgcgtcgttgagctggctgggctcaccgattgcaacccagctcactccgatggaggagagactgaagctgagccgcgacagcacgacggaggaggtggatgctacacacgaccgacgacggagcaccagcaggctgtgaagaggatcatccgctacgttgcggggactctcgaccacggtctctactacccgaggtgtcctggcaaggcacacttcgtcgggtacagcgacagcgaccacgccggcgacatcgacaccagcaagagcacgagcgggattctcttcttcctcggcgagtgcctcgttagctggcagtcggtcaagcagcaggtggtggccctgtccagctgcgaggccgagtacatggcggcatccgccgcttcgacccaggcgctctggcttgctcgactgcttggtgatctcctcggcagagacactggagcagtagagctcagggtggacagcaagtccgctctggccctggcaaagaaccccgtttttcacgaacggagcaagcacatctgggtgaggtaccacttcattcaaagctacttggaggaagggagcatcaaggcgagctacatcaacaccaaggaccagcttgcggacttgctcaccaagcctcttgggaggatcaagttcctcgagctctgctccaggatcgggatggcccaactttcccacaagacgacgcacaagacttag

SEQ ID NO: 13997 - DNA, 603 bp, Oryza sativa
  Clone ID: TFbOSC30776j.C1.o1.fg
atggctgacaaccgttttgtagtcgaacaggctcatgagatacaaaccatagctaaggaactcgaactccttaagtgtgtcttacccgacaaatttgtggccgggtgcattattgcgaaactacctccatcatggagaagtttcggtactgcattcaaacacaagagacaggaatactccattgaggggttgatagcatctcttgatgttgaggagaaagctcgggaaaaagacgccgcgtctaaggatgatgctcaacagaccaccaacttcaagaggcagaagaagaacaacaacaatcctaaccaggatgagaggatttgctttgtgtgtgggcaacctggtcatctggctaggaagtatccacagcgcaaggggatgaaggcacctgcagggcagacttctaagtctgctaatgtgaccattggcaacactggagatggaagcgggtatggtcgcacggggttccaccttcctaatggcgaatgggtcacatgcttctgttcatggtgttggcacggtagatgtgaagtttacttcgggaaagatcgtgcagctgaggaacgtgcagcatgtcccttctatcaacaggaatcttgttag

SEQ ID NO: 13998 - DNA, 1671 bp, Oryza sativa
  Clone ID: TFbOSC401836j.C1.o4.fg
atggctgacaaccgttttgtagtcgaacaggctcatgagatacaaaccatagctaaggaactcgaactccttaagtgtgtcttacccgacaaatttgtggccgggtgcattattgcgaaactacctccatcatggagaagtttcggtactgcattcaaacacaagagacaggaatactccattgaggggttgatagcatctcttgatgttgaggagaaagctcgggaaaaagacgccgcgtctaaggatgatgctcaacagaccaccaacttcaagaggcagaagaagaacaacaacaatcctaaccaggatgagaggatttgctttgtgtgtgggcaacctggtcatctggctaggaagtatccacagcgcaaggggatgaaggcacctgcagggcagacttctaagtctgctaatgtgaccattggcaacactggagatggaagcgggtatggtaatttacctactgttttttcagttaatcagtctactaattggtgggttgatactggggccaatgtcgcacggggttccaccttcctaatggcgaatgggtcacatgcttctgttcatggtgttggcacggtagatgtgaagtttacttcgggaaagatcgtgcagctgaggaacgtgcagcatgtcccttctatcaacaggaatcttgttagtggctcccgtctaactagagatggatttaagttggtttttgagtctaataaagtagtcgtgtctaaacatggatattttattagtaaaggttatgagtgcggaggcctgttccgcttttccctttctgatttctgcaataagtctgtgaacaatatttgtggaagtgtggatgatgaggctaatgtttggcactcacgtttatgtcatattaattttggcttgatgtctcggctttccagcatgtgtttaatttctaagttttccattgtcaaaggttctaagtgccatagttgtgtgcaatcgaagcaacctcgcaagcctcacaaggctgccgaggagagaaacttggcaccactagaactcctacattcagatctttgtgaaatgaatgaggtgttgacgaagggtggaaaacaatatttcatgacgttaattgatgatgctactagattttgctatgtgtacttgttgaaaacgaaagacgaggctctagactattttaaaatttataaggcagaagttgaaaatcaacttgacagaaagataaaaaggcttaggtctgatcgtggtggagagtttttctcgaacgagtttgacttattctgtgacgaacatgacatcatacatgagaggactcctccctattctcccgagtctaatgggattgctgaaaggaagaaccgcacactgactgacttggtgaatgccatgttggacaccgcgggacaacctaaggcatggtggggggaggcattgttgaccacgaatcatgtgttaaacagagttcctaacagaaataagaacaaaacaccatatgagatatggattgggagaaaaccatcactttcttatttgcgcacatggggtgttgttggtcgctctgaagttaagctcgactacccatttcgcaatgcggccgataacgtctttgtttctcatgacttcgccaagagggaaggcggagacaactgtgaccctgtgggcttggaagtggtggtgtag

SEQ ID NO: 13999 - DNA, 3513 bp, Oryza sativa
  Clone ID: TFbOSC23905j.C1.o5.gm
atgtcggtggtggagcacggcacatcggccatggtgctcccagtcccatatatgtcagtctcagggacgtctgcggcgccggaggaggaaaaggacgacccctgcagtgccggaggaagacgcgggtcgctgctcaccaggcaaaaggagatgcgatatgatgttcgtcgaattgagccgacggagagcttgaaagacacggctgctcgtggagccaagccgcacgggcgggcgatcaggtttttggggagcgcaaggcgcgactactcactgttcgtcaacatctacttcatcttcaccaacatgtcgaacactggagacaaggagaaggagactcccgtcaacaccaacggaggcaatactgcctcaaactccagcggaggaccattcttggggtataaccttattacattatttcaattagaatgcttctatgtttcacggggcaaacgaagtgaaccacctctttctcctgaggaagaggctaagttcgaggcttcggattgcctgttccgtggagcattgatcagtgtactcgctgacaacatagtggacgtgtacatgcacatgccttctgggaaggacatgtgggatgcacttgaggccaagttcggagtttctgacgccggcagtgagctgtatgttatggagcagttctatgactacaatatggtcgatgaccgttctgtagttgaacaagctcatgagattcagatgctggctaaggaacttgagaacaacaactgtgagttgccggacaagtttgtggcaggtggcattattgccaaactaccaccttcttggtcggactttgccacttctctaaagcacaagagacaagagttcagtgttcctgatctcattggctctttgggtgttgaggagaaggcgagggcaaaggacgtccggggcaaaaaggttgagggaggttctagtgccaatatggtacagaagaagaaccctcatgcatcccacaacaacaagaaagtcaagcctgatgtcaaacccaaggctgcaaccaattttaagaagaaaagcaagggaaaggcaaagggagactgctttgtgtgtggcaagtctgggcattggcccaaggactgtcctgagcgcaaagacaagaagtctgccaacatgatcattagcgagggcggaggaacatcgggagatgctacattctttgagaatgaatttcctatgaaatatacacctagcacttctagtaaagaaactgtcatgccccatgagcactttgcaccgatagaacacaatgatcaaacgcctgaggaaaatcctgaggaggacaacattgtagatactcgcaagagtaagagacaaagggttgcaaaatcctttggagatgactacattgtatacctagtggatgacaccccaagaaccatagaagaggcatattcatctcctgacgctgactactggaaggaagcagtacgcagtgaaatggactcgattatgtctaatggtacttgggaagttgttgagcgtccatatgggtgcaagcccgtaggatgcaaatgggttttcaagaaaaagcttaggcctgatggtacaatcgaaaagtacaaggcaaggcttgtggccaagggttatacccaaaaggaaggcgaggacttcttcgacacatactcaccagttgctcgcttgaccacgattcgagtactacttgctctggcagcctctcatggtcttctcgtccatcagatggacgttaagacagctttcataaacggagagctggaggaggagatctatatggatcaaccagacgggtatgtactagaaggtcaggagggaatggtgtgtaaactattgaaatccttgtatggcctcaagcaagcacctaagcaatggcatgagaagtttgacaccacgcttacatctgcaggctttgttgtgaacgaagctgacaaatgtgtatactatcgctatggtgggggagaaggggtgatcttgtgcttatatgtcgatgacatactgatctttgggaccagccttaatgtgattgaggaggtcaaagactatctgtccaagagttttgaaatgaaagatttgggagaggctgatgttattcttaacatcaaactacaaagaggagatgagggtgggattacacttgtgcaatcccactatgtggacaaggttttgagtcgctttggatatagtgactgcaagccagctcctactccttatgatcccagcgtgctattaaggaaaaaccgaagaatagcaagggatcagctgagatactctcaaatcattggttcattgatgtacttggctaacgcaacgaggcctgacatctcatttgctgtaagcaagctgagccggtttgtctcaaatccgggagatgatcattggcaggctctggaaagagtaatgcgctatctaaagggtactatgagctatggaattcactataccgggtatccaaaagtactagaagggtatagtgactcaaactggatatctgatgctgatgagataaaagccacaagtggatatgtgttcacacttggaggtggcgctgtttcctggaagtcttgcaagcagaccatcttaacgaggtcaacaatggaagcagaacttacagcactagatactgcgatagttgaggccgagtggcttcgtgaactcctgatggatttgccggtggttgaaaaaccagtgccagctatcctaatgaactgcgataatcaaacagtgattattaaagtgaacagttcaaaggacaacatgaagtcatctagacacatcaagagaagactgaaatctgtcagaaagcagaaaaactccggagtgatagcattggactatgtccaaacggctagaaatctggcagatcagtttaccaaggggctaccacacgggcgggcgatcaggtttttggggagcgcaaggcgcgactactcactgttcgtcaacatctacttcatcttcaccaacatgtcgaacactggagacaaggagaaggagactcccgtcaacaccaacggaggcaatactgcctcaaactccagcggaggaccattcttgggtttattcgatcgccggatacccgaggaagaagaagaagaagaaaagatgagctactacggccagcaacctcccgtcggcgtcccgccgcagcaaggttacccggggaaggacggctacccgccgccggggtacccaccggccggctacccgccggcgcagggctacccaccggctgggtaccccccgcagcagggctaccctccgccgtacgcgcagccgccgccccagcagcagcagcacagcagcggcccttccttcatggagggatgtaattaccggacgctggtctcagatctgtccacgccgacgggtgcggtggccggcgcgtccgccgcggcggcggcggcggcggcggcgcaccttggctgccctctgctgctgctgtctcctggacgcctgcttctgaggatagaggcgacgggtgcaagagagctgaagagatttgtttcatggagctga

SEQ ID NO: 14000 - DNA, 4172 bp, Oryza sativa
  Clone ID: TFbOSC401841j.C1.o20.np
gtttatttctatatcctcaatgcatgtaaagacttaaaaaagatattctgtaaaatattatgcgctagtgttttttcctaaaatcatatcatacctttcaaagacgggtgggtgatcagttttttgaggagcgcaaggcgcgactactcactattcatcaacatctacttcaccttcaccaatatgtcgaatactggagataacagcaacactggatacaaggagaaggagcctcccgtcaataccaacagaggcaatatgcctcaaactccagcggaggaccattcttagggtcattttcggtagttggctttgctgcaacactgaaaccacatgcttttgatggttctaattataagagatggaaagcacgtgcactactgtggttgacagcgatgcttctatgtttcacggggcaaacgatgtgaaccgcctctctctcctgaggaggaggctaagttcgaggtttcggattgcttgttccgtggagcattgatcagtgtactcgctgacaatatagtggacgtgtacatgcacatgccttcagggaaggacatgtgggatgcacttgaggccaagttcagagtttccgacgccggcaacgagctgtatgtcatggagcagttctatgactacaagatggtcgataaccgttctgtagtggaacaggatcatgagatttagatgctggcaaatgaacttgagaacaacaactgtgagttgccggacaagtttgtggtgggtggcattattgctaaattgccaccttcttggtcggactttgctacttctctaaaacacaagaggcaagagttcagtgttattgatctcattggctctttgggtgttgaggagaaggcgagagcaaaggaaaaccggggcaaaaatatcgagggaggttctagcgccaatttggtgcaaaagaagaaccctcacgcatcccacaacaacaacaacaagaaagtcaagtctgatgtcaaaccaaaggctacaaccaattttaagaagaaaggcaagggaaaggccaagggcgactgctttgtgtgcggtaagcctaggcattgggccaagaattgtcctgatcgcaaggacaagaagtctgccaacatggttattagcgagggcggaggaacatcggggtacgacaattttttacctacagttctctctgtttttcattcacctgattggtgggttgatactggtgctaatattcatgtgtgtgctgatatttccctgttttcttcttatcaggtcgggagaggttcctccttgttgatgggaaacgggtcgcttgcggctgttcatggtgttggtacggtcgatctgaagtttacttcgggaaagaccgtatagctgaagaacgtgcagcatgtcccttcaataaagaagaatctagttagcggctctctactgtgtagagatggttttagacttgtgtttgaattcaataaatgtgtcatatctaaatattgaacttttattggaaaaggttatgacaacggaggtctgttccgtttttctttggatgacatgtgtaataataataataatgttgtgaaccatattagcgagaatgatgagtccaatgtgtggcattcgtgactttggctaacatgagtttaattctaaaattcactttggtcaaaggttccaagtgccatacttgtgttcaattgaaacaaccttgcaagcctcacaaggcatctgaggcgagaaatttggcaccactagaactagttcattccgatctgtgcgaaatgaacggtgtgttgactaaagggggaaagaaatatttcatgacactgatagatgattgcactagatattgctatgtgtacctattgaaaacaaaggatgagacattgcattactttaagatctataaagctgaggtagaaaaccaacttgaaaggaaaatcaaacggttgaggtctgataggggtggagagtatttttccaatgagtttacgtccttttgcaaaaagtttggaattattcatgagaggacgcatccctattcaccccaatcaaatggggtagccgaaagaaagaaccgcactctaactgagatggtgaatgccatgttagacactgcgggactttccaaggaatggtggggtgaggcaattttgactgtttgtcatgtcctgaataaaattccagtgaagcataagaaagtaacaccattcgaagaatgggaaaggaagaaattaaatctctcatacctacgcacatggggctgcttggccaaggtaaatatacctatagccaaaaagcgtaaacttggaccaaagaccgtagactgtgttccttggttatgctatccacagcgtgggctataggttcttaatagtaaactctggagtacccgacatgcgtgttggtacaattactgagtccagagatgccacattttttgagaatgaatttcccatgaaaaatacacttagcacgtctagtcaagaacctgttttaccccatgagcattttgcaccgatagaacacaatgatcaaacggctgaggaaaatcctgaggaggataacattgtagcaactcgaaagagtaagagacaaaggactgcaaagtcttttggagatgactacattgtatacctcgtggatgacactccaagaaccatagaagaagcatattcatctcctgacgctgactattggaaggaagcggtacgcagtgagatggactcaattatgtctaatggtacttgggaagtcgttgagcgtccatatgggtgcaagcctgtaggatgcaaatgggttttcaagaaaaagcttaggcctgatggtacaattgaaaagtataaggcaaggcttgtggccaagggttatacccaaaaagaaggcgaggatttttttcgacacctactcaccagttgcccgcttgaccacgattcgagtactacttgcttttgaagcctctcatggtcttctcgtccatcaaatggatgttaagacagctttcctaaacggagagctagaagaggagatctatatggatcaaccagacggatatgtactagaaggtcaggagggaatggtgtgtaaactgttgaaatccttgtatagccttaagcaagcacctaagcaatggcatgagaagtttgacacaacacttacatctgctggctttgttgtgaacgaagctgacaaatgtttgtactatcactatggtgggggagagggagtgatcttgtatttatatgtcgatgacatattgatttttggaaccagcctcaatgtgattgaggaggttaaggactttttgtccaaaagctttgaaatgaaggatttgggagtggctgatgttattcttaacattaagctactgagaggagatgagggtgggattacactcgtgcaatcttactatgtggacaaggttttgagtcgctttggttatagtgactgcaagccagctccaactccttataactccagtgtgctattaaggaaaaaccgaagaatagaaagggatcaattgagatactcccaaatcattggttcattgatgtacttggctagtgcaacgaggcctgacatctcatttgctgtgagcaagctgagccggtttgtttaaaatctgggagatgatcattggcaagctctggaaatggtcatgcgctatctaaaggatacaacgagctatggaattcactatactagttacccaaaagtactgtaagggtatagtgactcaaactggatatctgatgctgatgagataaaagccacaagtggatatgtgttcacacttggaggtggtgctgtttcctggaagtcttgcaagcagaccatcttaacgaggtcaacaatggaagcagaactcacagcactagatactgccacagttgaggccgagtggctttcgtgaactcctgatggatttgccggtgattgaaaaacctgtgccagctatcctaatgaactgtgataatcaaacagtgattattaaggtgaacagttcgaaggacaatatgaagtcatttaggcatgtaaagagaagactgaaatctattagaaagcagaaaaactccagagtgatagcactggactatgtccagacagctaaaaatctagcagatcagtttaccaaggggctaccacgtaatgtgatagatagtgcatcgagggaaatgggcttgagacccact

SEQ ID NO: 14001 - DNA, 1125 bp, Oryza sativa
  Clone ID: TFbOSC11678j.C1.o1.fg
atgtcgggggatggcgagaaaagtgtgaagggggccatgggtcctcaaatagagcaagttatagttgtgagcatttctcctcctagtgatcaaatgctatcatttgaagaggaagagaaatgcatacatctcaatgctcaagctactaatgttttgtttagtgctttgagtgaagatgtgtttgaatccatcatgccacttgaggatgctcatctcatttggaacacactcaaggagagatatgacaagtccgagtgtgatgagacacatgtcttcattgaaggtaatgaaatggtgagtagcgtcaatgtggatacttctacctcctacagtgcttgtgaaactaatcttttgaaggaagaagtatgtggaaaaaaatggccaagtgaagaatttacatctccaagatgctcatctccacgctccgatgaatattcttgcatcatggagaaatcatctttggagaaagaaaatctagagcttaaagctcaacttgtagagctcactagcaagcatgtggacctacaagaaaagtatgatgaacttttgtgctctcatggaaatattgtagattcacatgccatgctagaagtaactcatgaggtgatcataacaacggtaaaatcctatgtgcctcatattcaagttgactttacttgtgctaactcttattgctctcaagcaaatatttttccgagcactatatgtgacctggattatgtagagaaaaaggataagcgcatcgatcatggacttgttggcaatgctcaaccttctcaagataaccgtgagagcatggtgaagaagcttgagaagggaacaaccgtagcttgcaacaagttctatcaagaagatatcaagtccaacaacaagatcaaggggcaagatcaaaggaagaacaaaacttccattacttgcttcaagtgcaagaaaatgggacatcatgtgagagattgtccttggaagaaagagaagaagttgaacaagaatgaggatcttgctcacaagttcttcaagtccaccaaagagggacactttgcctcaagttgtcctcgcaagattgatgatgaaatcacacttccaacaaagacatctagaatcaacaaaaggaagtgctatggttga

SEQ ID NO: 14002 - DNA, 1089 bp, Oryza sativa
  Clone ID: TFbOSC402680j.C1.o1.fg
atgggtcctcaaatagagcaagttatagttgtgagcatttctcctcctagtgatcaaatgctatcatttgaagaggaagagaaatgcatacatctcaatgctcaagctactaatgttttgtttagtgctttgagtgaagatgtgtttgaatccatcatgccacttgaggatgctcatctcatttggaacacactcaaggagagatatgacaagtccgagtgtgatgagacacatgtcttcattgaaggtaatgaaatggtgagtagcgtcaatgtggatacttctacctcctacagtgcttgtgaaactaatcttttgaaggaagaagtatgtggaaaaaaatggccaagtgaagaatttacatctccaagatgctcatctccacgctccgatgaatattcttgcatcatggagaaatcatctttggagaaagaaaatctagagcttaaagctcaacttgtagagctcactagcaagcatgtggacctacaagaaaagtatgatgaacttttgtgctctcatggaaatattgtagattcacatgccatgctagaagtaactcatgaggtgatcataacaacggtaaaatcctatgtgcctcatattcaagttgactttacttgtgctaactcttattgctctcaagcaaatatttttccgagcactatatgtgacctggattatgtagagaaaaaggataagcgcatcgatcatggacttgttggcaatgctcaaccttctcaagataaccgtgagagcatggtgaagaagcttgagaagggaacaaccgtagcttgcaacaagttctatcaagaagatatcaagtccaacaacaagatcaaggggcaagatcaaaggaagaacaaaacttccattacttgcttcaagtgcaagaaaatgggacatcatgtgagagattgtccttggaagaaagagaagaagttgaacaagaatgaggatcttgctcacaagttcttcaagtccaccaaagagggacactttgcctcaagttgtcctcgcaagattgatgatgaaatcacacttccaacaaagacatctagaatcaacaaaaggaagtgctatggttga

SEQ ID NO: 14003 - DNA, 3540 bp, Oryza sativa
  Clone ID: TFbOSC100566j.C1.o19.gm
atgccgtgcaaaactcacgcccacaacgcacgcctgacgcggtcgtctactcctgcagctcgccacatctctcgccgagtgggaggcgcgcttcaagaaaggcgggggagaaacctcgtcgccacagaggaacaagccctctgtggccgcgacaagagccacataaaatgtttcaactgtgaggagtttggccactactccacgcagtgtccacaccccaagaagaagaaggctgaagctcatcttgcgcaaactgaggatgctggcccagctttgttgctcgctgtgacagaggcggtgcagaacgcgccgtgccaggacgcgctctgcgggctggtcgtgcacgaggagcgtgtgtggcctcgcctgatgctggcagagaagggagcagctgctggtgatctgtggtacctggacaatggtgccagcaatcatatgtcaggagatcgtcggaaattccgggaactggacgagactgtgacagggcaggtcaggttcggcgacgcctcgtcagtgcagataatggggcagggatccatccttttctcatgcaagaacggtgaccagtggttgctcgacgacgtctactacatccccagcctctgctgcaacatggtgagtttggggcagctaactgaaactggccaccgtgtcgtgatggatggagatgacctcgaggtgttcgacaaaaatccttggcgattggtgatgaaggtgcggcgaacctcaaatcggctgtaccgcatcgagctgcagctggcgtcaccgctattggtggacaaggagatggtggcaggagtgcccgcagtccaccacccaaaccagctgtgtcaagcatgtctggtggcgaaacaagtccggcagtcgttcccaggaatggcaaactatcgagcagaggcaccgctcgagctgctccacatggatctgtgtgggccgatcactccatcgacgttcgccggtaatcgatactttatgttgatcgttgatgatttttctcgttggatgtgggtgtttgtgatcaagtcgaaggaccaagcgctcgcggcctccgagaagttcaagccgttggcggagaacacggcaggacgaacaatcaagacactccggacagaccgcggcagcgagttcttgtccggcgagttcgcgcgtgtctgcgatgcagccggcatcgagcgccacctgacggcaccgtattcaccgcagcagaatggcgtcgtggagcatcgcaataggacggtgatggcaatggcgcggtctctcctcaaggggatgtccgtgcccggcaggatgtggggcgaggcagttcgtcacgccgtattcctcctaaatcggctgccgaccaaggcgatgggaaatcgcacttcgttcgaggcatggatggggaagaaacctcacctgggccacctgtgggtgttcgggtgtacggcgcacacgaaggtgactgcaccgcacttgatgaagctggatgaccggagcaatccattcgtgtacctgggcgttgaagaagggagcaaggcccatcggctgtttgatccgcgtcgtcggcaaatcattgtaagtcgtgacgttgtttttgatgaaaacacaccttggcagtggagtgctgctgcaggagaggtgacttccactgagttcgaggtagaagaacccgtcggcgcagagcaggcagcctcggtaccgtggtaccgagcgccgccggcaggaaggcgagccggcaaggagccagaagtggcagaacagcggggaacgcctccggcaagcccggcgaggttctcaccaaccttgcctagcacgcctacactcggctcatcctcaacgcactctgccgaggtgcaggcgtcaccgcgcacgcccggcagtgacgacgggccggtgcggtatagaagcttggtggagatcatgcttgaagcacctcgggtggacctggtggaggatgatgatgacgcagaagcgctgctcgcagagatggaggagccgacatcctaccgtgaagcagccggcgagacggcgtgggtgaacgcaatgaacaaggaactggaggctattgagaagaacaggacgtggtcgctgtgcatgctgccagccggtcgcaaggcaatagggctcaagtgggtgttcaagctaaagaaaaacactgccggtgaggtgatcaaacacaaggcgcggctggtggcgaaggggtacgtccagcggcaaggtgtggattttgatgaagtgtatgcgccggttgcaaggttggacacggtgcgagctatacttgcagttgcagctgatcgaaggtggcaggtgcatcaccttgacgtcaagtcggcattccttaatggtgatcttgaggaagaagtatatgtctttcagccagaaggccgcctccccctcctctcctccgtgccgcgcccggcccaagccgacggcggcctccccgcccgttgccggtgcgcgctgacgccgccgcctgaccgcgtggggcccacgcgccaggccgaccgcctgtgccgcctcgcccgcgcaccggccggccgcgccgtcgcctcctccagcgtcgccgccacctcctccaccccggcctgccctccgtttcgcgcggtgaccgccggaggcgcgttcccgccgtcgtccttctttttcctccgcgccggccgcctccagccgcctctccctcctcgccggagcgccgtccggccgcgccgtcttctccctcggcctcgcagccacctcctctccctcggtcagccctccgtttcgcgggggaagcaccggagacgcgtcctcgccggcaaaacagtggcgttgccgccactgttccacctccggccgccactgtcgcgtttcccgtgcgccggccgacgtcgccaccacctccctcggctccgcgacgccaccctcatccccggcatcacctcctcctcgcccgaagttcgccggaacgccgccgccgcgccaaccacccattcctcctcgtcggctcgtcgccccgctgcaccaccaccttctccaacatcgcagcagcgcgttccactccgtcccctcctccgctcagccgctgctgcctgccatcatcgtttccacgtcaccgttcgtcctcgccgatcgacgtcccgtcggtcgcccggctcgtcgtctcgcggcgccgcctccgtcatcgtcatcgctgcggcgtgttccacgccgtcctcgtccccgtgcagccgctgccggctgtcctcgtcgcctcctcgccggtcccggtcgtcgtcgtcgtcgtcgtcctctcgtcgttcccgccccgtcctcgtcttcgtcctcggctccgcgtcgtcaagcctcgtgccggccgtgtctcgccttcgtcctaggatcgccgccgaagtcgttccctcgccgtccgtctccgccgcgcccgttcgtcgttgtcgttccctcgcctcgtcgcgtggtggtaaggatctctcctctcgctgccccgtcctcgtcctttcggtgtcgccccgtatccgttgtgcggtcgtcgaccccggtacccgtgtaccggtgtcggtagtcgttcacgtgtgcgggtggtga

SEQ ID NO: 14004 - DNA, 3651 bp, Oryza sativa
  Clone ID: TFbOSC401435j.C1.o49.np
atggcgttggttccggtgacggcggacccggcgatggggagctcaggaagtgctttcctttacccacagctcatgtcaaccaactacactagttgggtaatacgtgtgcaggctatgatggaggatcaaggcatatgggaagcaatcgagccggcggccggggcggccgtcgacccgaggaaggacaagaaggcgaagtctcatcttctccagtcgctgccggaggatctcttgatgcaggttgcaaagaaacgctcggcaaaggaggtttgggactgcctcaagacgagattcgtcggggtggatcgggtgcgcgatgcacgcctgcagacactcaagggagagttcactagcatggtgatggaggccggggagacgctggaccagtacgccggccggatcaccacgatggggtggttgaacgacgccgccatggtgaagaagctgttcgacactgtcccggagaagttcgttagcctcgtcgcagggatcgagcaattttacgatgttgacaccatgccgttcgaagaagcggtaggtcgcctcaaggcgtatgaagagtggatgtggaagaagaaggcgaccgccggcggagtgaccgctgacgggcaagttctgctcactcagggcgagtgggaggcacgcttcaagaaaggcgggggagaaacctcgtcgccacagaagaacaagccctctggtgagggggcgaaccacggccaggccgagcgtggtcgtggtaggggtcgcggacgcggcgggacgcagagaagcggtggcggctctagcggtggtggccgcgacaagagccacataaagtgtttcaattgtgaggagtttggccactactccacacagtgtccacaccccaagaagaagaaggctgaagctcatcttgtgcaaacggaggatgctggcccagctctgttgcttgccgtgacagaggcagtgcagaacgcgccacgccaggacgcgcactgtgggctggtcgtgcacgaggagcgtgtgtggcctcgcctgatgctggcagagaagggcgcagctgctggtgatctgtggtacctggacaatggtgccagcaatcatatgtctggagatcgtcggaaattccgggaactagacgagaccatgacggggcaggtcaggttcggcgacgcctcgtcagtgcagataatggggatgggatccatccttttctcatgcaagaacggtgaccagtggttgctcgacgacgtctactatatccccagcctctgctgcaacatggtgagtttggggcagctaactgaaactggccaccgtgttatgatggatggagatgacctcaaggtgttcgacaaaaatccttggcgattggtgatgaaggtgcggcgaacctcaaatcggctgtaccgcatcgagctgcagctggcgtcacaggtgtgcctgctggccagtctcgataacccggcgtggctgtggcatgcccggatcggacacgtgaatttccatgcattgaagctattagtggacaaggagatggcgtcaggagtgcccacagtccaccacccaaaccagctgtgtcaagcatgtctggtggcgaaacaagtccggcagccgttcccaggaatggcaaactatcgagcagaggcgccgctcgagctgctccacatggatctgtgtgggccgatcactccatcgacgttcgccggtaatcgatactttatgttgatcgttgatgatttttctaattggatgtgggtgtttgtgatcaagttgaaggaccaagcgctcgcggtgttcgagaagttcaagccgttggcaaagaacacggtaggacgaacaatcaagacactccggacagaccgcggcggcgagtttttgtccggcaagttcgcgcgcgtctgcgatgcagccagcatcgagcgccacctgacggcaccatattcaccgcagcagaacgacgtcgtggagcgtcgcaataggacggtgatggcaatggcgcggtctctcctcaaggggatgtccgtgcccggcaggatgtggggcgaggcagttcgtcacgccatattcctcctaaattggctgccgaccaaggcgatgggaaatcgcactccgttcgaggcatggacggggaagaaacctcacctgggccacctgcgggtgttcgggtgcgttgaagaagggagcaaggcccatcggctgtttgatccgcgtcgtcggcaaatcattgtaagtcgtgacgttgtttttgatgaaaatacaccttggcagtggagtgctgctgcaggagaggtgacttccaccgagttcgaggtagaagaacccgtcggcgcagagcagccggcgctggcagagcaggcaggcttggtaccgtggtaccgggcgccgccagcaggaaggcgagccggcaaggagccagaagtggcggaacatgacgtcgggccggtgcggtatagaagcttggcggagatcatgcttgaagcacctcgggtggacctggtggaggatgatgacgacgcaagagcgctgctcgcagagatggaggagccgttatcctaccgtgaagcaaccggcgagccggcatgggtgaacgcaatgaacaaggaactggaggccattgagaagaacaagacgtggtcgttgtgcatgctgccagccggtcacaaggcaatagggctcaagtgggtgttcaagctaaagaaaaacaccgccggtgaggtgatcaaacacaaggcgcggctggtggcgaatgggtacgtccagcagcaaggtgtggattttgatgaagtgtttgcgccggttgcaaggttggacacggtgcgagctatacttgctgttgcagctgatcgaaggtggcaggtgcatcaccttgacgtcaagtcggcattccttaatggtgatcttgaggaagaagtatatgtctctcagctggaaggttttgttgagaaggggaaggaacatcttgtgtacgaattgagcaaagctctctacgggctgagacaggcgccacgggcatggaatacacggcttgatcggagcatgaaggagcttggtttcagccggtgtgcacaagaacaagcagtctacactagaggcgtggtgagcaaattcatggaacaactgacagtgatgcacttcaaggcggtgaagcaaattctcagatatctcaaggggacaatcaactgtggactcatgttttctggaggcaatgatgcagtggagattactggtttcacagatagtgatctggccggcgacagtgatgatcgtcggagtactagcggcatggcgttttacttcaacagcagtttggtctcgtggagttcacaaaagcagaaaacagtggcactttcgtcctgtgaggctgagttcatggcagccactgcagcagcttgtcaagctttgtggctcaggggattgttgattgagatgattggtgcagaagccaggccggtgaagctgtatgttgataacaagtcagcaattgcactcatgaagaaccctgtgtttcatgggagaaagagtggagacggaggcgacggcgacggtgctggaggcgggggcggcgtcgccgtcggcgtcaccagcacggggaggaggagatggggatgggaagggctcggtggatgggaggatgctggtggtggttggttggataaggttgtgggtgga

SEQ ID NO: 14005 - DNA, 3996 bp, Oryza sativa
  Clone ID: TFbOSC405457j.C1.o13.fg
atggcgggcgagtgcaacggtggacctccgccattgctgccccttcctccgctcgccgctcatcgcgtgacggcaccaacgcggctggctgcggcgggagggaggtggaccgcgcgcttcttagttgatggcgatgccccggagcttcatgctatgatggaggatcaaggcgtatgggaagcaatcgagccggcggccggggcggccgtcgacccgaggaaggacaagaaggcaaagtctcatcttctccagtcgctgccggaggatctcttgatgcaggttgcaaagaaatgctcggcaaaggaggtttgggattgcctcaagacgagattcgtcggggcggatcgggtgcgcgatgcgcgcctgcagacactcaagggagagttcaccaacatggtgatggaggccggggagacgctggaccagtacgccggccggatcaccacgatgggggtccggtactctgctctcggcgcgacgttgaatgacgccgccatggtgaagaagctgttcgacactgtcccggagaagttcatcagcctcgtcgcagggatcgagcaattttacgacgtcgacaccatgccgttcgaagaagtggtaggtcgcctcaaggcgtatgaagagcggatgcggaagaagaaggcgaccaccggcggagtgaccgcggacaggcaaaagaacaagccctctggtgagggggcgaaccgcggccaggccgggcgtggtcgtggcaggggtcgcggacgcggcgggacgcagagcagcggtggcggctctggtggtggcggcggtggccgcgacaagagccacataaaatgtttcaactgtgaggagtttggccactactccacgcagtgtccacatcccaagaagaagaaggttgaagctcatcttgcgcaaacggaggatgctggcccagctttgttgctcgctgtgacagaggcggtgcagaacgcgccgcgccaggatgcgctctgcgggctggtcgtgcacgaggagcgtgtgtggcctcgcctgatgctggcagagaagggagcagctgctggtgatctgtggtacctggacaatggtgccagcaatcatatgtcaggagatcgtcggaaattccgggaactggacaagaccgtgacggggcaggtcaggttcggcgacgcctcgtcagtgcagataatggggaagggatccatccttttctcatgcaagaacggtgaccagtggttgcttgacgatgtctactacatccccagcctccgctgcaacatggtgagtttggggcagctaactgaaactggccaccgtgtcgtgatggatggagatgacctcgaggtgttcgacaaaaatccttggcgattggtgatgaaggtgcggcgatcctcaaatcggctgtaccgcatcgagctacagctggcgtcaccgctattggtggacaaggagatggcggcaggagtgcccgcagtccaccacccaaaccagctgtgtcaagcatgtctggtggcgaaacaagtccggcagccgttcccaggaatggcaaactatcgagcagaggcgccgctcgagctgctccacatggatctgtgtgggccgatcactccatcgacgttcgccggtaatcgatactttatgtttatcgttgatgatttttctcgttggatgtgggtgtttgtgatcaagtcgaaggaccaagcgctcgcggccttcgagaagttcaagccgttggcggagaacacggcaggacgaacgatcaagacactccggacagaccgcggcggcgagttcttgtccggcgagttcgcgcgcgtctgcgatgcagccggcatcgagcgccacctgacggcaccgtattcaccgcagcagaatggcgtcgtggagcgtcgcaataggatggtgatggcaatggcgcggtctctcctcaaggggatgtccgtgcccggcaggatgtggggcgaggcagttcgtcacgccgtattcctcctaaatcggctgccgaccaaggcgatgggaaatcgcactccgttcgaggcatggacggggaagaaacctcacctgggcccctgcgggtgttcgggttggagtgttgctgcaggagaggtgacttccactgagttcgaggtagaagaacccgtcggcgcagagcagccggcgccggcagagcaggcaggctcggtaccgtggtaccgggcgccgccggcaggaaggcgagccggcaaggagccagaagtggcagaacagcggggaacacctccggcaagcccggcgaggttctcaccaaccttgcctagcacgcctacactcggctcatcctcaacgcactctgccgaggtgcaggcgtcaccgcgcacggccgacagtgacgacgggccggtgtggtacagaagcttggcggagatcatgattgaagcacctcgggtggacctggtggaggatgatgatgacacagaagcgctgctcgcagagatggaggagccgacatcctatcgtgaagcagccggcgagccggcgtgggtgaacgcaatgaacaaggaactggaggctattgagaagaacaagacgtggtcgctgtgcatgctgccagccggtcacaaggcaatagggctcaagtgggtgttcaagctaaagaaaaacactgccggtgaagtgatcaaacacaaggcgcggctggtggcgaaggggtacttccagcggcaaggtgtggattttgatgaagtgtttgcgccggttgcaaggttggacatggtgcgagctatacttgcagttgcagctgatcgaaggtggcaggtgcatcaccttgacgtcaagtcggcattccttaatggtgatcttgaggaagaagtatatgtctctcagccagaaggttttgttgagaagggaaaggaacatcttgtgtacaaactgagcaaagctctctacgggctgagacaggcgccatgggcgtggaatacacagcttgatcggagcatgaaggagcttggtttcagccggtgtgcacaagaacaagcagtctacactagaggtacagggagtgccgggataattgttggagtatatgttgatgatctgatcgtgacaggagaaagcccaagcgagatcactgcattcaaacaacagatgatgggggagtttgagatgagtgatcttggactgctcacctattacttgggaattgaagtgttgcaaggcactgacgggatcgccatcaagcaggttgcttatgcaaggaagattctgacccagtttaggatgctagattgcaattctacctcaattcctattgaacatcgttcacagttgcacaaagatgctcaaggaagcacagttgatcccacggagtacaggcgagtgataggttgtcttcgttacttgttgcatactcggccggatttgtcctacacagtaggcgtggtgagcagattcatggaacgaccgacagtgatgcatttcaaggcggtgaagcaaattctcagatatctcaaggggacaatcaactgtggactcatgttttctggaggcaatggtgcagtggagattactggtttcacagattgtgatctggccggcgacagtgatgatcgtcggagtactagcggcatggcgttttacttcaacggcagtttggtctcatggagttcacaaaagcagaaaacagtggcactttcgtcctgtgaggctgagttcatggcagccactgcagcagcgtgtcacgctttgtggctgaggggattgttgattgagatgattggtgcagaagccaggccggtgaagctgtatgttgataacaaatcagcaattgcactcatgaagaaccctgtgtttcatgggagaagtaagcacatcgatacccggtatcattttattcgtgagtgtgttgaaagtgggaagattcagattgaattcgtccggactgaggagcagcgggcggatgcgttaacaaaagggttgccagcagcgagattggcgacagcacgacacctgctaggtgttcgtgattttgggccgtag

SEQ ID NO: 14006 - DNA, 4020 bp, Oryza sativa
  Clone ID: TFbOSC8960j.C1.o8.fg
atggcgttggttccggcgacggcggacccggcgagggggagctcaggaagtgctttcctttacccacagctcacgtcaaccaactacactagttgggttgcaaagaaacgctcggcaaaggaggtttgggattgcctcaagacgagattcatcggggcggatcgggtgcgcgatgcgcgcctgcagacactcaaggaagagttcaccaacatggtgatggaggccggggagacgctggaccagtacgccggccggatcaccacgatgggggtccggtactctgctcttggcgcgacgttgaacgatgccgccatggtgaagaggctgttcgacactgtcccggagaagttcatcagcctcgtcgcagggatcgagcaattttacgacgtcgacaccatgccgttcgaagaagcggtaggtcgcctcaaggcgtatgaagagcggatgcggaagaagaaggcgaccaccggaggagtgaccgctgacgggcaagttctcctcactcaggccgagtgggaggcgcgcttcaagaaaggcgggggagaaacctcgtcgccacagaagaacaagccctctggtgagggggcgaaccgcggccaggccgggcgtggtcgtggcaggggtcgcggacgcggtgggacgcagagcagcggtggcggctctggtggtggcagcggtggccgcgacaagagccacataaaatgtttcaactgtgaggagtttggccactactccacgcagtgtccacaccccaagaagaagaaggctgaagctcatcttgcgcaaacggaggatgctggcccaactttgttgctcgctgtgacagaggcggtgcagaacgcgtcgcgccaggatgcgctctgcgggctggtcgtgcacgaggagcgtgtgtggcctcgcctgatgctggcagagaagggagcagctgctggtgatctgtggtacctggacaatggtgccagcaatcatatgtcaggagatcatcggaaattccgggaactggacgagaccgtgacagggcaggtcaggttcggcgacgcctcgtcagtgcagataatggggaagggatccatccttttctcatgcaagaacggtgaccagtggttgctcgacgatgtctactacatccccagcctctactgcaacatggtgagtttggggcagctaactgaaactggccaccgtgtcgtgatggatggagatgacctcgaggtgttcgacaaaaatccttggcgattggtgatgaaggtgcggcgatcctcaaatcggctgtaccgcatcgagctgcagctggcgtcaccggtgtgcctgttggctagtctcgatgacccggcgtggctgtggcatgcccggctcggacacgtgaatttccatgcgttgaagctattggtggacaaggagatggcggcaggagtgcccgcagtccaccacccaaaccagctgtgtcaagcatgtctggtggcgaaacaagtccggcagccgttcccaggaatggcaaactatctagcagaggcgccgctcgagctgctccacatggatctgtgtgggccgatcactccatcgacgttcaccggtaatcgatactttatgttgatcgttgatgatttttctcattggatgtgggtgtttgtgatcaagtcgaaggaccaagcgctcgcggccttcgagaagttcaagccgttggcggagaacacggcaggacgaacgatcaagacactccggacagaccgcggtggcgagttcttgtccggcgagttcgcgcgcgtctgcgatgcagccggcatcgagcgccacctgacggtaccgtattcaccgcagcagaatggcgtcgtggagcgtcgcaataggacggtgatggcaatggcgcggtctctcctcaaggggatgtccgtgcccggcaggatgtggggcgaggcagttcgtcacgccgtattcctcctaaatcggctgccgaccaaggcgatgggaaatcgcactccgttcgaggcatggacggggaagaaacctcacctgggccacctgcgggtgttcgggtgtacggcgcacgcgaaggtgactgcaccgcacttgaagaagctggacgaccggagcaatccggtcgtgtacctgggggttgaagaagggagcaaggcccatcggctgtttgatccgcgtcgtcggcaaatcattgtaagtcgtgacgttgtttttgatgaaaacacaccttggcagtggagtgctgctgcaggagaggtgacttccactgagttcgaggtagaagaacccgttggcgcagagcagccggcgccagcagagcaggcaggctcggtaccgtggtaccgggcgccgccggcaggaaggcgagccggcaaggagccagaagtggcagaacagcggggaacgcctccggcaagcccggcgaggttctcaccaaccttgcctagcacgcctacactcggctcatcctcaacgcactctgccgaggtgcaggcgtcaccgcgcacggccggcagtgacgacgagccggtgcggtacagaagcttggcggagatcatgattgaagcacctcgggtggacctggtggaggatgatgacgacacagaagcgctgctcgtagagatggaggagccgacatcctatcgtgaagcagccggcgagccggcgtgggtgaacgcaatgaacaaggaactggaggctattgagaagaacaagacgtggtcgctgtgcatgctgccagccagtcacaaggcaatagggctcaagtgggtgttcaagctaaagaaaaacactgccggtgaggtgatcaaacacaaggcgcggctggtggcgaaggggtacgtccagcggcaaggtgtggattttgatgaagtgtttgcgccggttgcaaggttggacacggtgcgagctatacttcctgttgcagttgatcgaaggtggcaggtgcatcaccttgacgtcaagtcggcattccttaatggtgatcttgaggaagaagtatatgtctctcagccagaaggttttgttgagaagggaaaggaacatcttgtgtacaaactgagcaaagctctctacgggctgagacaggcgccacgggcgtggaatacacggcttgatcggagcatgaaggagcttggtttcagccggtgtgcacaagaacaagcagtctacactagaggtacagggagtaccgggataattgttggagtatatgttgatgatctgatcgtgacaggagaaagcccaagcgacatcactgcattcaaacaacagatgatgggggagtttgagatgagcgatcttggactgctcacctattacttgggaattgaattgcacaaagatgctcaaggaagcacagttgatcccacggagtataggcgagtgataggttgtcttcgttacttgttgcatactcggccggatttgtcctacgcagtaggcgtggcgagcagattcatggaacgaccgacagtgatgcatttcaaggcggtgaagcaaattctcagatatctcaaggggacaatcaactgtggactcatgttttctggaggcaatggtgcagtggagattactggtttcacagatagtgatctggccggcgacagtgatgatcgtcggagtactagcggcatggcgttttacttcaacggcagtttggtctcgtggagttcacaaaagcagaaaacagtggcactttcgtcctgtgaggctgagttcatggcagccactgcagcagcgtgtcacgctttgtggctcaggggattgttgattgagatgattggtgcagaagccaggccggtgaagctgtatgttgataataaatcagcaattgcactcatgaagaaccctgtgtttcatgggagaagtaagcacatcgatacccggtatcattttattcgtgagtgtgttgaaagtgggaagattcagattgaattcgtccggattgaggagcagcgggcggatgcgttaacaaaagggttgccagcagcgagattggcgacagcacggcacctgctaggtgttcgtgattttgggctgtag

SEQ ID NO: 14007 - DNA, 4050 bp, Oryza sativa
  Clone ID: TFbOSC900206j.C1.o25.fg
atggcgggcgagtgcaacggtggacctccgccattgctgccccttcctccgctcgccgctcatcgcgtgacggcaccaacgcggctggctgcggcgggagggaggtggaccgcgcgcttcttagttgatggcgatgccccggagcttcatgctatgatggaggatcaaggcgtatgggaagcaatcgagccggcggccggggcggccgtcgacccgaggaaggacaagaaggcaaagtctcatcttctccagtcgctgccggaggatctcttgatgcaggttgcaaagaaatgctcggcaaaggaggtttgggattgcctcaagacgagattcgtcggggcggatcgggtgcgcgatgcgcgcctgcagacactcaagggagagttcaccaacatggtgatggaggccggggagacgctggaccagtacgccggccggatcaccacgatgggggtccggtactctgctctcggcgcgacgttgaatgacgccgccatggtgaagaagctgttcgacactgtcccggagaagttcatcagcctcgtcgcagggatcgagcaattttacgacgtcgacaccatgccgttcgaagaagtggtaggtcgcctcaaggcgtatgaagagcggatgcggaagaagaaggcgaccaccggcggagtgaccgcggacaggcaaaagaacaagccctctggtgagggggcgaaccgcggccaggccgggcgtggtcgtggcaggggtcgcggacgcggcgggacgcagagcagcggtggcggctctggtggtggcggcggtggccgcgacaagagccacataaaatgtttcaactgtgaggagtttggccactactccacgcagtgtccacatcccaagaagaagaaggttgaagctcatcttgcgcaaacggaggatgctggcccagctttgttgctcgctgtgacagaggcggtgcagaacgcgccgcgccaggatgcgctctgcgggctggtcgtgcacgaggagcgtgtgtggcctcgcctgatgctggcagagaagggagcagctgctggtgatctgtggtacctggacaatggtgccagcaatcatatgtcaggagatcgtcggaaattccgggaactggacaagaccgtgacggggcaggtcaggttcggcgacgcctcgtcagtgcagataatggggaagggatccatccttttctcatgcaagaacggtgaccagtggttgcttgacgatgtctactacatccccagcctccgctgcaacatggtgagtttggggcagctaactgaaactggccaccgtgtcgtgatggatggagatgacctcgaggtgttcgacaaaaatccttggcgattggtgatgaaggtgcggcgatcctcaaatcggctgtaccgcatcgagctacagctggcgtcaccgctattggtggacaaggagatggcggcaggagtgcccgcagtccaccacccaaaccagctgtgtcaagcatgtctggtggcgaaacaagtccggcagccgttcccaggaatggcaaactatcgagcagaggcgccgctcgagctgctccacatggatctgtgtgggccgatcactccatcgacgttcgccggtaatcgatactttatgtttatcgttgatgatttttctcgttggatgtgggtgtttgtgatcaagtcgaaggaccaagcgctcgcggccttcgagaagttcaagccgttggcggagaacacggcaggacgaacgatcaagacactccggacagaccgcggcggcgagttcttgtccggcgagttcgcgcgcgtctgcgatgcagccggcatcgagcgccacctgacggcaccgtattcaccgcagcagaatggcgtcgtggagcgtcgcaataggatggtgatggcaatggcgcggtctctcctcaaggggatgtccgtgcccggcaggatgtggggcgaggcagttcgtcacgccgtattcctcctaaatcggctgccgaccaaggcgatgggaaatcgcactccgttcgaggcatggacggggaagaaacctcacctgggcccctgcgggtgttcgggtgtacggcgcacgcgaagtcgtgacgttgtttttgatgaaaacacaccttggcagtggagtgttgctgcaggagaggtgacttccactgagttcgaggtagaagaacccgtcggcgcagagcagccggcgccggcagagcaggcaggctcggtaccgtggtaccgggcgccgccggcaggaaggcgagccggcaaggagccagaagtggcagaacagcggggaacacctccggcaagcccggcgaggttctcaccaaccttgcctagcacgcctacactcggctcatcctcaacgcactctgccgaggtgcaggcgtcaccgcgcacggccgacagtgacgacgggccggtgtggtacagaagcttggcggagatcatgattgaagcacctcgggtggacctggtggaggatgatgatgacacagaagcgctgctcgcagagatggaggagccgacatcctatcgtgaagcagccggcgagccggcgtgggtgaacgcaatgaacaaggaactggaggctattgagaagaacaagacgtggtcgctgtgcatgctgccagccggtcacaaggcaatagggctcaagtgggtgttcaagctaaagaaaaacactgccggtgaagtgatcaaacacaaggcgcggctggtggcgaaggggtacttccagcggcaaggtgtggattttgatgaagtgtttgcgccggttgcaaggttggacatggtgcgagctatacttgcagttgcagctgatcgaaggtggcaggtgcatcaccttgacgtcaagtcggcattccttaatggtgatcttgaggaagaagtatatgtctctcagccagaaggttttgttgagaagggaaaggaacatcttgtgtacaaactgagcaaagctctctacgggctgagacaggcgccatgggcgtggaatacacagcttgatcggagcatgaaggagcttggtttcagccggtgtgcacaagaacaagcagtctacactagaggtacagggagtgccgggataattgttggagtatatgttgatgatctgatcgtgacaggagaaagcccaagcgagatcactgcattcaaacaacagatgatgggggagtttgagatgagtgatcttggactgctcacctattacttgggaattgaagtgttgcaaggcactgacgggatcgccatcaagcaggttgcttatgcaaggaagattctgacccagtttaggatgctagattgcaattctacctcaattcctattgaacatcgttcacagttgcacaaagatgctcaaggaagcacagttgatcccacggagtacaggcgagtgataggttgtcttcgttacttgttgcatactcggccggatttgtcctacacagtaggcgtggtgagcagattcatggaacgaccgacagtgatgcatttcaaggcggtgaagcaaattctcagatatctcaaggggacaatcaactgtggactcatgttttctggaggcaatggtgcagtggagattactggtttcacagattgtgatctggccggcgacagtgatgatcgtcggagtactagcggcatggcgttttacttcaacggcagtttggtctcatggagttcacaaaagcagaaaacagtggcactttcgtcctgtgaggctgagttcatggcagccactgcagcagcgtgtcacgctttgtggctgaggggattgttgattgagatgattggtgcagaagccaggccggtgaagctgtatgttgataacaaatcagcaattgcactcatgaagaaccctgtgtttcatgggagaagtaagcacatcgatacccggtatcattttattcgtgagtgtgttgaaagtgggaagattcagattgaattcgtccggactgaggagcagcgggcggatgcgttaacaaaagggttgccagcagcgagattggcgacagcacgacacctgctaggtgttcgtgattttgggccgtag

SEQ ID NO: 14008 - DNA, 5358 bp, Oryza sativa
  Clone ID: TFbOSC900365j.C1.o11.np
agaaaagaaggcatagatgaagaagcatcaacatccaaagaagaagtagaagaaaccaaagcagtcgacttagaatcaacttttcgagaaagaacattcatctcatgtgttttcaattttgtgtaaagtgaatccaaagtcaaaattccgacgttctcggagagtccgattttgcaggagaagactttgaagagttccaaggccagcaaggcaactcctggtttggaatggtatattcctggtttggagatagaactttacagccgagattggttgttcagaatggttgggcctatgcaacacgatgccacgcttcaagcctgagtacttgttcggtactgagggatttgtcctggagttgcgtacgatgtctttcctcataggattcgggactgcccctttgtatgcccagattcctcatgatcgtgatgaagagaagtgtcgggtcaaggtcaccttgaacagtaatcgtgaagatatcccatcagtgatgttcgaggctggagggggaaactgtattcatgcttgtcaggaggtggcaaggattaccataggagagctccgcgaacgctacaatgatcagttggccgacaccgagtatcgctaccatccttgtcaaccccagggaagtggtcgtggcagctaccttgaacttgcaggaattgagaatgatgctaccacaaggcatttggttgagatgctgtgggccatggatgagacccgcgctgagattgtgttagcagcccaagatcacgaagaccggaatcgtggtaagatttgcaagctggaggacaaggtggatcgtttggagaaggaattagccgcattgaagggagaagcaccaccgcagaaggccagggttcgtcttaccgcaaggaagagagctctttttgtccctcgctaccagttggcacctaagatggtgcttactcgcagcaatgggaatggtcccaacaacaacaacaacaacaacaacaacaacaatggagagaatcccacgcttgcccaagtcctggctcaacaggcacagctcatgaatatgatgatgcaccaactacagaaccagcagaaccagggaaacaatcatgcacctccccagaacaagttagcataatttcttcgtgtgaggccgcctactttttctagcactaccaatccagtcgaggctggtgattggctgcatgccatagaaaagaagttggacctgcttcagtgcacagatcaggaaaaagtctccttcgcttcgcatcagcttcatggccctgcctctgagtggtgggatcatttccgtctcaacagaactactgccgaaccaatcacttggcttgagttcactgctgctttccggaaaactcacataccctcgggagtggtgtctcttaagaagaaggagtttagggcgctcactcagggatctcgctctgtcaccgaatatctgcatgaatttaatcgtctggctcgctatgctccgaaagatgtgtgcactgatgatgggcgtcaagagaagttcctggaaggactgaatgatgagttttcttacccattaatgactggggattatcatgatttccagaagttggtggataaggctatacgccaggaggacaagtacaaccatatggagcagaagaaacgtaggattgctcacttcaaagctctacaggggaatagtcagaggccgcgtcttgctatgggacctcaggcagtgttgcagggagggtcttcgtctgttgttcgtccgcaacgtcagttcttcaacaacaatgctggcaacaacaaccgcaaccaagctccacgtcccgttgcaactccagtccagcatcagcctgccaagagggagcaaggcagcaagcctggggtgtgcttcaactgtggtgaacaaggacattactccgataagtgtccgaagccccgccgcgtgaaggttgtccctgcctagagcaactccaccgcaccagcgacaaaggctcgtgtcaaccatgttgctgctgtagaagcccaaggtgctctagatgtgattttgggtacgttccctgttaactcaattcctgcaacagtacttttcgattctggtgctacgcattcttttttgtctatgagttttgcgggaaatcatgggatgcaggtagaagatcttagacgtcctttgatggttagtactccgagtaagcaagcactcacatcacaacgtagcccctctgtcagaatagagattcaaggagtaccatttctagccaaccttattctgttagaatccaaagatcttgatgtcatcctagggatggactggttagccagatataaaggtgtgatagactgcgccaatagaaaagtaactctcaccagcaatgatggtcaagttgtaactgttcatgcattgccttctgagcctttatggtcaagtctgaaccaaataactttggaagagattcccatagtacgggagtacccggacgtgttcctggatgatttacctggtatgccgcctaaaagagatatagaattcagaatagatctggtaccaggaacaaccaatccataagagaccttatagaatggcagccaatgaattagcagaggacaagaggcaagtagatgatttgcttcagaaaggatacatcagaccaagttcgtctccatggagagctccagtcatctttgtggaaaagaaagatcatacccagaggatgtgtgtggactatcgtgcactaaatgatgtgactatcaagaataagtacccattgcccagaattgatgatttgtttgatcagcttaaaggtgccaccgttttctccaagatcgatcttcgatcaggttatcaccagttgaggatcaaagaggaacatatacctaagacggtttttaccactcggtatgggttgtttgaatgtacagttatgtcttttggacttaccaatgccctcgctttcttcatgaacttgatgaataaggtgtttatagaatacctagacaagttcgtggtagtctttattaatgacattcttatctactcccgaaccaaagaagagcatgaagaatatcttcgccatgcactagagaagctacgagaacatcaactgtatgccaagtttagcaagtgtgaattttggttgtctgaaataaaattccttggtcacatcatctcagccggaggagttgccgttgatcctagtaatgtggaatccgtaacgaactggaaacaaccgaagacagtttcagagattcgtagtttcatgggtctcgcaggttattactggaggtttatagagaatttctccaagattgctaagcccatgacacgactgcttcagaaaaatgtgaagtacaagaggtcagaagaatgtgagcagagctttcaagagttgaaaagtcgcttaatatcagcacccattttgattttgcctgatccaaagaagggtttccaagtgtactgcgacgcatctaagcttgggttaggttgtgttctgatgcaagatgggaaggtggttgcctatgcaggttgcctatgcatctcgtcagttacgtccgcatgagaagaactaccctactcttgatcttgagttagccgcagtggttcatgcgttgaagatttggcgtcactatctctttggtactcgtacggaggtgtacacggatcacaagagtttgaagtatatctttacccagccggatctaaacatgaggcagcggagatggttggaattgattaaggattatgacatgggaattcattaccaccccggaaaggccaatgttgtagcagatgctctcagcaggaaaggttattgcaatgctacggaaggacgacagttgccgttggagttatgcaaggaatttgaaaggctgaatttgggaattgtcagtagaggtttcgttgcagctttagaagcaacgcctactctcattgatcaagttagagaagctcaagtcaatgatcctgatattcaagagatcaagaagaatataagaagaggaaaagctatcagtttcttggaagatgagcaaggaactgtatggttgggcgagagaatctatgtcccagagaacaaggagttgaaagatgtaattctgaaagaagctcatgacactttatactctattcaccctggtagtaccaagatgtaccaagatctcaaggagaaattttggtgggcaagtatgaagcatgagatagcagagtatgtagctgtgtgtgatgtttgtcagcgagtcaaggcagaacatcagaaacctacaggtctgctgcaacctttaaaattaccagaatggaagtgggaggaaataggaatggatttcatcactggtctacccagaacgtcatcgggccatgactctattttagtgatagtcgacaggcttaccaaagtggctcatttcatcccagtgtggacaacatattccggaagccgtttggcggaattgtatatggcaaggattgtgtgtttgcatggcgttcctaagaaaatagtatccgatcgaggtaaccagtttacttcaaagttttggaagaagcttcaggaagagatgggttccaagctgaacttcagtaccgcttatcatccgcagacagacggacaaaccgaaagggtaaatcagattttggaagacatgttgagagcttatgctttagacttcggtggaagttgggataagaatctgccttacgcagaattctcgtacaacaacagttatcaagccagtcttcaaatggctccttatgaagcgttgtatggtcggaagtgccgcactccgctattctgggatcagacgggtgaacgtcaggttttcaggactgatattctgagggaagtagaagagaaagtaaagatcattcaaaaaagattgcgtatagctcagtctcgtcataagagctatgctgataatcgccgtagggatctgagttttgaggaaggagatcatgtgtaccttcgtgtcacgcctcttcgaggggttcatcgttttcacaccaaaggaaaattggcaccgtgttttgcgggaccttacatgattgtcagtagaagaggagaggttgcttatcagttggagttacctcaatcattggcaggtgtttataatgtgttccatgtgtcacaattgaaaaagtgtttaagggtacccactgaagaagctaatcttgagcaaatagaaatccaaaaggatctgacatatgttgagaaaccaatccgtatcctggagacagatgagataaggaccaagaatcgggttattcgtttctgcaaggtccaatggagtaatcacacagaggaagaagctacctgggagcgagaagatgaattaaagtcagctcatccgcatcttttcgacagttcttccgaatctcgaggacgagattctgtt

SEQ ID NO: 14009 - DNA, 2799 bp, Oryza sativa
  Clone ID: TFbOSC400321j.C1.o28.fg
atggatcatggggcttatgagccaattatgttatcaattggtccataccaccatggattgtcgtacttgctagcctttgagaaggaaaaatggaattgccttgatctttttcttaaactgaatcgtgaaataaagttggaggactacctaaatttggtcaaagatttagaggaggaagcacgggcatgctatgaagacattgacatgcaacatgacaaatttctgcagatgctactccttgattcttgcctttttgttcaccatttcagaggtttagagggaatacttccatccactttgggtgcaaatatatgtagtgctgacagttcggacattataatggaaagaacaatacacaaaagcactacaagtcaaggtaattttggtgagcaatgcagcagggataactctatctgcacacagagagaacttgtccttgctggttcaagtcgggaagttactagtcaaggaactgactttgatcacactgaggaacttgaatcttctcaatgtaataattggcaaattggaacctggtttgacagctgtattgaacaagacctgatgctactagagaaccaaattcctttctttattgttaggaggatatatgaactttttgctggaaatgagaggcctatttcatttctcacagacaaagtagctcaatcgttggagaacttcatacaataccatccaagagcaatccaggaagcacatcggcctaaagatttccatcatatgctgcatttgttccagatgtacctcaagcctagtaaaaagctggttgagggttcacaatacctggagagaggaagatattttcattctttcgctaatatatgctataggtatttgaaaattggacgtaagcttgccgatagcaatcacgatatgtcaccagatcctttgcttaactgctttcaggatcaccatccacgtattcgtggccgtcgggcagtgcaataccatcaagctggagttcaattcaagaaaaagtcatttgataggaataatccccattctctgttagatattagctttgacaatggtactttgatggttccttatttgtttgttgatcagagcaccgtctcccattttaggaacttaattgcatttgagcagacatgtccccagtttggaaatgatgtgactgcatattctgctttcatgtctttccttctgtgtagagcagatgatattgcttttcttggtcgcaaaggaataattgtacatcatttatgcagtgatggggaggtgtcagctatttttgctaagcttggtaaaaatgttgattttgatttgaatgggagacacttccttaaacatgtatgccatgcaatggaggaacactaccaaagtcgtattaacagtgagtgcaattccatcgttacacactggaggaaaatgattaacttgttgaatttcccaacatcagttgtcaaggccagcctcatcaatgcacctcctcatggcattgcccatggacaaggtcgaatttctaaagatgacgtcatgtcaattgttccacagaacccaaatgcagatgaggggcctgaagcctggtccggttcaatactctgttgtgaggaagaaatggatcctaccatgcaaggggaaggtgttgtgggaagtcaggaaaaagaagtagtgattgcttcatcatcccttgtcataaaggatgagatgaaagatttgttggaggatctagtaaagttgggaatgataggtactagaggtggaggatcagccgaattgaaactagaattgatgccaaatgaattgagattggaaggaagtaagaattgtttgagttggtcaaggagggcccaactaatgttgagggcaaaaggggtggatcattttttgcaggaggattataaagagcctgctgataaggaaagttcagcttggaggatgtggaatactacaaattcaaccgtggtgtcatggttgaggaattcggtggctccatctattgctcggatgctagaaaccattcaaaatgcagcagttgtatggaaaacattgagcagcatgtactcagaagagggaagtgtaatgatgatggttgaggctcaaaacaaggggctgaacaatgagtttgaggatagaagagcagctatgtttcaccaggctactttgcctactatggaagaggccatttcagccatggtacaggaggaaatgaggttaaaattgatgaggggtacaaatcctatgggatcagcatacattgtagctgatgatagggaatgctacaattgtggccaagtgggtcatgtgagctgcaattgtcccactccccgaaacagtggtggtaggggatcaatgcgaggatggtatggtggatttggtggaaatcatggtggctttggaggaagccatggtggtagaggaggtgaccgtggaggtcgcattggagatcatggtagaggccgaggtgcacctcaggctaatgcagctatggaggatggtaaagctatatccctaacggttaaccttctctcggttagctcggctattgaccaattcaagtgcattgttgcatttgatgagaactcatgtcttttccaggagaaggggactggaaggaggattgggactagagggtcttcggtgccaatattgggaactcctgactctgactctgattcgggttctgggctggcatctggacttgcacctgcggttggtgacattgacgcgactcctgacattgccgttgcatctggtatatttggtaccgacgtcgcatctgttgtaacaactcttccactgtttgagtttgattag

SEQ ID NO: 14010 - DNA, 3981 bp, Oryza sativa
  Clone ID: TFbOSC400685j.C1.o16.np
atgcttggtgctaagaaactcctgaactgcattcaggacccaactattgcaacatcagctggaggagttaataatttaccaacttcagccgagaaaaatcaggcactgcatttcctgatgcaccatttgaatactactctcaagaatgagtatatgactgaggaagatccgaaggtcctttgggactcactgaaggatcgctatggccatcaagtaaaggctttgctcccaaaagcaaaacgtgagtggcttcacttatgtttccaggattacaaatctgtggagtaatataactcagttcttcaccgcattgtcacttgtcttaagctatgtggagagaaaatcactgatgctgacatgatagacaaaactttgtccaccttccatgccaatcatgtgaatattcagaggcaataccgccaggctaaatacgagaagtattctgaactgatctccgtgctcatggaagcgcaaggagaagatgagacacttgttgaaaatcatacgtctcgccccactggaagttcagcagcacccgaagcaaatgctagctcctttaagaaggggaaaaaccagaataaccagaacaaagggaagaatttctggaaaaataatggtaaagttaacaagatgtctttcaagaagaaaggaaatcagaatagtaagtctaagaagggctctactagtggtgaatatggaaagcaatatcaggtatgcttcaagtgtggcactaggggacactggtctcgcatttgccgcacccctaagcatctcattgagctttatcaagagaagcacgggaagaagaagtcagagcatgagtcacacttcactgttgagatccagcactcagaggagaagatggctgccatgcatatcgacaagcagactagtcaaatcgctactattgccggaagcaatgcacacatcgtcggagtgggacgagcatcagtagttctcccacatagtaccaagatcattataaattatgctctattatatccagagtccagtcgtactctactaagctttaaagatatccgtgctaatggttatcatgtagaaaccaaagatgagaataaactcgaatttcttctcataacgaaattagacggaaatcgtaagactattgttgaaaaactcccttccttgaaatctggcctgtactacactcatataaaacccgaaaatgttgcactgaaaacaatatttaaaaatcccgagtcatacagaatatggcatgataggttaggacatccaggtctagggatgatgagaagaatcatctcaacttcaaatggctataatttacgacctaacgatttcccaaaccaagaagattttgtttgcactgattgtgcaacatggaaattaatcgttagaccctctaatctaaaggtgaacgcagaatcaccagtattcttgcaacaaatacagggagacatatgtggaccaattaatcccatgtccggatcattccgtttcccgggtaaccggatacaatccattagaatggacaatgccggggagtttacctctaaggtatttaatgaatattgcatggctttgggaattaaagtggaacattctgtaccacacgtccacactcagaatggtctcgccgaatcattaattaagaggattaagcttatcgctaggccattgctactgcatagcaacctaccaactacatgttggggacacactgttttgcatgcagcggcgttacttcaaatcagacctactgcatacaatgttgtatcccctatgtagcttacacgtggatatgcaccaaatatttcccatctacgcaaatttggatgtgctgtatacgtccctataccgccacctaagcgtacgtcaatgggtcctcatagaaaattgggaatctatgtaagatttgaatctccgtctatcattaaatttttagaaccattgacaggagacctacatatgggtcgatacgctgattgtatatttaatgaagatcatttcccggcattagggggaggaaagtacctacagaaggtcgaatgccgcgaaattgagtgggaaactaaaaatctcctacatttagatccacgtactaaggaatctgaccaggaagtttagaccataattgattcgcaaagaattacaaataatctgccagaagccttcactaacctaaaggggatcatgaaatctcatatacctgctgtgaatgcaccggaaagagtagaaatacctcctgacgcagaggaactggttttcaaattaatttctacatctaccccaacttctaggaagaaggggagaccaccggttgcacacaaccaaactaaagtttctaggagacgtcctacgaaacaacagattggacagaataccacagcaccagagaatagtgaaggagctcaccaggtagatgagccacctgcagtgacatgcccggatggcaatgaacccagtgagaatgcgcgcgcaattactactagcactaggagaccggaaattcctgacttaaacattgcgggaaacaatgaagatcaggaatgtgaaagaatagaggaaatatccaccagttatgtggatacaggtgaaacatacaatagagagactactattgtcgacatatactttgccgaaaagatcgctaagatcattgatctggatccagaaccaaagtccatggcagaatgcaaaaaagcgttcagactgggtcaaatggaaagaagcaataaaggcagagttaatctcgctcaataaaagaaaattattcggtcctattgatcgtacccccgtagggatatcctctgtaggatataaatgggtgttcgtccgaaaacgggatgagaacaaccaggtggttcggtataaagcaagattagtagcataagggtttacgcagagacctggcatcgatttcgatgaaaccaattcacctgtaatggatggaattacattccggttcttaatatctatggcagtcaatttgaacttagaaatacagttgatggatgtagtgaccgcatatttatatgggtcattggattttgaaatctatatgaaagttcctgatgggattcaagttcctgaagaaaaaaacacaacatatacagtgttaaattgcaaagatcattgtatgggttaaaacaatccggtaggatgtggtacaaccggctcagtgaattcctagaaggaaaaggattcatcaagaatgatgactgtccctgtaagactaaatattgcttaggtctgcagcttgagcacactcatgaaggggtattgttacaccagtctgcatatatccagaagataatggagaaatttaatatgaaggatttatatccgacgagaacccccatggtagtaagatctctagcagtagagagtgacccatttagaccataggaaaataacgaggaattattgggacctgaatgtccatatttaagcgctattggagctttaatgtatctcgcgaatggtaccaggcctgatattgcatttgctgttaacctacttgcaaggttcagtttggctcctaccaaacggcatttgaatggcgttaagcaaatcttccgttatttacgtggcacacaagatctcggtttattctttagaaaaaatcaagatttgaccatggtgggatatgctgatgctggatatttgtcagacccccataaagcattgtcacagactgggtatgtgtttctctgtggtggtacagccatctcatggaagtcgacgaagcagacgatggtcgcgacatcaacaaatcacttggagattatagcattatttgaagcgagcaaggaatgcatgtggttgaggagggtgatacaacatgtacagaatacatgtgggctgaatatcacaccaactccaaccattatttttgaagataattcagcttgtgttgcacaaatacaaacgggttatgtgaagacgagtctcacaaaacatatatcgcctaaattcttctatatgcatgaattg

SEQ ID NO: 14011 - DNA, 3954 bp, Oryza sativa
  Clone ID: TFbOSC401807j.C1.o5.np
atgcttggtgctaagaaactcctgaactgcattcaggacccaactattgcaacatcagctggaggagttaataatttaccaacttcagccgagaaaaatcaggcactgcatttcctgaggcaccatttgaatactactctcaagaatgagtatatgactgaggaagatccgaaggtcctttgggactcactgaaggatcgctatggccatcaagtaaaggctttgctcccaaaagcaaaacgtgagtggcttcacttacgtttccaggattacaaatatatggagcaatataactcagttcttcaccgcattgtcacttttcttaagctatgtggagagaaaatcactgatgctgacatgatagacaaaactttgtccaccttccatgccaatcatgtgaatattcagaggcaataccgccaggctaaatacgagaagtattctgaactggtctccgtgctcatggaagtgcaaggagaagatgagacacttgttgaaaatcatacgtctcgccccaatgaaagttcagcaacacccgaagcaaatgctagctcctttaagaagggggaaaaccaaaataaccagaacaaagggaagaatttctggaaaaatggtggtaaagttaacaagatgtctttcaagaagaaaggaaatcacagtaagtctaagaaaggctctactagtggtgaatatggaaagcaagatcaggtatgcttcaagtgtggcactaggggacactggtctcgcatttgccgcacccctaagcatctcattgagctttatcaagagaagcacgggaagaagaagtcagagcatgagtcacacttcactgttgagatccagcactcagaggagaagatggctgccatgcatatcgacaagcatactggtcaaatcgctactattgccggaagcaatgcacacatcgttggagtgggacgagcaacagtagttctcccacatggtaccaagatcattataaataatgctctgttatatccagagtccagtcgtactctactaagctttaaagatatccgtgctaatggttatcatgtagaaaccaaagatgagaataaactcgaatttcttctcataacgaaattagacggaaatcgtaagactgttgttgaaaaactcccttccttgaaatctggcctatactacactcatataaaacccgaaaatgttgcactgaaaacaatatttaaaaatcctgagtcatacagaatatggcatgacaggttaggacatccaggtctagggatgatgagaagaatcatctcaacttcaaatggccataatttacgaactaacgatttcccaaaccaagaagattttgtttgcactgattgtgcaacagggaaattaatcgttagaccctctaatctaaaggtgaacgcagaatcaccagtattcttgcaacgaatacagggagacatatgtggaccaattaatcccatgtccggatcattccgtttcccggataaccggatacaatccattagaatggacaatgccggggagtttacctctaaggtatttaatgaatattgcatggctttgggaattaaagtggaacattctgtaccacacgtccacactcagaatggtctcgccgaatcattaattaagaggattaagcttatcgctaggccattgctactgcatagcaacctaccaactacatgttggggacacgctgttttgcatgcagcggcgttacttcaaatcagacctactgcatacaatgctgtatcccctatgcagcttacacgtggatatgcaccaaatatttcccatctgcgcaaatttggatgcgctgtatacgcccctataccgccacctaagcgtacgtcaatgggtcctcatagaaaattgggaatctatgtaggatttgaatctccgtctatcattaaatttttagaaccattgacaggagacctacatatgggtcgatacgctgattgtatatttaaggaagatcatttcccggcattagggggaggaaagtacctacagaaggtcgaatgccgcgaaattgagtgggaaactaaaaatctcctacatttagatccacgtactaaggaatctgaccaggaagttcagaccataattgatttgcaaagaattgaaaataatctgccagaagccttcactaacccaaaggggatcatgaaatctcatatacctgttgtgaatgcaccggaaagagtagaaatacctcatgacgcagaggaaccggttttcaaattaatttctacatctaccccaacttctaggaagagggggagaccaccggttgcacacaaccaaactaaagtttctaggagacgtcctatgaaacaacagattggatagaataccacagcaccagagaatagtgaaggagctcaccaggtagatgagccacctgcagtgatatgcccggatggcaatgaacccagtgagaatgcgcgcgcaattactactagcactgggagaccggaaattcctgacttaaacattgcgggaaacaatgaagatcaggaatgtgaaagaatagaggaaatatccaccagttatgtggatacaggtgaaacatacaatagagagactactattgtcgacatatactttgccgaaaagatcgctaagatcattgatctggatccagaaccaaagtccatggcagaatgcaaaaagcgttcagactgggtcaaatggaaagaagcaataaaggcagagttaatctcgctcaataaaagaaaagtattcggtcctgttgatcgtacccccgtagggatatcccctgtaggatataaatgggtgttcgtccgaaaacgggatgagaacaaccaggtagttcggtataaagcgagattagtagcacaagggtttacgcagagacctggcatcgatttcgatgaaacctattcacctttaatggatggaattacattccggttcttaatatctatggcagtcaatttgaacttagaaatgcagttgatggatgtagtgaccgcatatttatatgggtcattggattctgaaatctatatgaaagttcccgatgggattcaagttcctgaagaaacaaaatgcaacatatacagtgttaaattgcaaacatcattgtatgggttaaaacaatccggtaggatgtggtacaaccggctcagtgaattcctagaaggaaaaggattcatcaagaatgatgactgtccctgtaagactaaatattgcttaggtctgcagcttgagcacactcatgaaggggtattgttacaccagtctgcatatatccagaagatattggagaaatttaatatgaaggattcatatccgacgagaacccccatggtagtaagatctctagcagtagagagtgacccatttagaccacaggaaaataacgacgaattattgggacctgaatgtccatatttaagcgccattggagctttaatgtatctcgcgaatggtaccaggcctgatattgcatttgctgttaacctacttgcaaggttcagttcggttcctaccaaacggcattggaatggcattaagcaaatcttccgttatttacgtggcacacaagatatcgatttgaccatggcgggatatgctaatgctggatatttgtcagacccccataaagcattgtcacagactgggtatgtgtttctctgtggtggtacagccatctcatggaagtcgacgaagcagacgatggtcgcgacatcaacaaatcactcggagattatagcattatttgaagcgagcaaggaatgcatgtggttgaggagggtgatacaacatgtactgaatagatgtgggctgaatatcacaccaactccaaccattatttatgaagataattcagcttgtgttgcacaaatacaaacgggttatgtgaagacgagtctcacaaaacatatatcgcctaaattcttctatatgcatgaattg

SEQ ID NO: 14012 - DNA, 1095 bp, Oryza sativa
  Clone ID: TFbOSC422281j.C1.o1.fg
atgactgatattgctaagagagattttgctgaactagcagtcagcggcaagaattacctgacatgggcactggatgccaaaatcatgcttggtgctaagaaactcctgaactgcattcaggacccaactattgcaacatcagctggaggagttaataatttaccaacttcagctgagaaaaatcaggcactgcatttcctgaggcaccatttgaatactactctcaagaatgagtatatgactgaggaagatccgaaggtcctttgggactcactgaaggatcgctatggccatcaagtaaaggccttgctcctaaaaacaaaacgtgagtggcttcacttacgtttccaagattacaaatctgtggagcaatataactcagttcttcaccgcaatgtcacttgtcttaagctatgtggagagaaaatcactgatgctgacatgatagacaaaactttgtccaccttccatgccaatcatgtgaatattcagaggcaataccgccaggctaaatacgagaagtattctgaactggtctccatgctcatcgaagcacaaggagaagatgagacacttgttgaaaatcatacgtctcgccccactggaagttcagcagcacctgaagcaaatgctagctcctttaagaaggggaaaaaccagaataaccagaacaaagggaagaatttctggaaaaatggtggcaaagttaacaagacgtctttcaagaagaaaggaaatcagaacagtaagtctaagaagggctctactagtggtgaatatggaaagcaagatcaggtatgcttcaagtgtggcactaggggacactggtctcgcatttgccgcacccctaagcatctcattgagctttatcaagagaagcacaggaagaagaagtcagagcatgagtcacacttcactgttgagatccagcactcagaagagaagatggctgccatgcatatcgacaagcaggtcgacgagaaggcagtggttgcaatgcacatcgatgataagatggaaaagaatgcagcagacgcagagctgaagctctcagatgatctcatggactctgatcagttatatggggacatttaa

SEQ ID NO: 14013 - DNA, 3953 bp, Oryza sativa
  Clone ID: TFbOSC422283j.C1.o4.np
atgcttggtgctaagaaactcctgaactgcattcaggacccaactattgcaacatcagctggaggagttaataatttaccaacttcagctgagaaaaatcaggcactgcatttcctgaggcaccatttgaatactactctcaagaatgagtatatgactgaggaagatccgaaggtcctttgggactcactgaaggatcgctatggccatcaagtaaaggccttgctcctaaaaacaaaacgtgagtggcttcacttacgtttccaagattacaaatctgtggagcaatataactcagttcttcaccgcaatgtcacttgtcttaagctatgtggagagaaaatcactgatgctgacatgatagacaaaactttgtccaccttccatgccaatcatgtgaatattcagaggcaataccgccaggctaaatacgagaagtattctgaactggtctccatgctcatcgaagcacaaggagaagatgagacacttgttgaaaatcatacgtctcgccccactggaagttcagcagcacctgaagcaaatgctagctcctttaagaaggggaaaaaccagaataaccagaacaaagggaagaatttctggaaaaatggtggcaaagttaacaagacgtctttcaagaagaaaggaaatcagaacagtaagtctaagaagggctctactagtggtgaatatggaaagcaagatcaggtatgcttcaagtgtggcactaggggacactggtctcgcatttgccgcacccctaagcatctcattgagctttatcaagagaagcacaggaagaagaagtcagagcatgagtcacacttcactgttgagatccagcactcagaagagaagatggctgccatgcatatcgacaagcagactggtcaaatcgctactattgccggaagcaatgcacccatcgtcggagtgggacgagcaacagtagttctcccacatggtaccaagatcattataaatgatgctctattatatctaaagtccagtcgtactctactaatctttaaagatatccgtgcttatggttatcacgtagaaaccaaagatgagaataaactcgaatttcttctcataacgaaattagacggaaatcataagactgttgttgaaaaactcccttccttgaaatctggactgtactacactcatataaaacccgaaaatgttgcactgaaaacaatatttaaaaatcctgagtcatacagaatacggtctagggatgatgagaagaatcatcttaacttcaaatggccataatttactaactaacgatttcccaaaccaagaagattttgtttgcactgattgtgcaacagggaaattaatcgttagaccctctaatttaaaggtggacgcagaatcaccagtattcttgcaacgaatacagggcgacatatgtggaccaattaatccaatgtccggatcattccgtttcctggataaccggatacaatccattagaatggacaatgccggggagtttacctctaaggtatttaatgcatattgcatggctttgggaattaaagtggaacattctgtaccacacgtccacactcacaatggtctcgccgaatcattaattaagaggattaagcttatcgctaggccattgctactgcatagcaacctaccaactacatgttggggacacgctgttttgcatgcagcggcgttacttcaaatcagacccactgcatacaatgttgtatcccctatgcagcttacacgtggatatgcaccaaatatttcccatctgcacaattttggatgtgttgtatacgtccctataccgccacctaagcgtacgtcaatgggtcctcatagaaaattagtaatctatgtaggatttgaatctccgtctatcattaaatttttagaaccattgacaggagacgtacatacgggtcgatacgctgattgtatatttaatgaagatcatttcccagcattagggggaggaaagtacctacagaaggtcgaatgccgcgaaattgagtgggaaactaaaaatctcctacatttagatccacgtactaaggaatctgaccatgaagttcagagcataattgatttgcaaagaattgcaaataatctgctagaagccttcactaacccaaaggggatcatgaaatctcatatacctgctgtgaatgcaccggaaagaatagaaatacctcatgacgcagaggaaccggttttcaaattaatttctacatctaccctaacttctaggaagagggggagaccaccggttgcacacaaccaaactaaagtttctaggagacgtcctacgaaacaacagattggacagaataccacagcaccagagaatagtgaaggagctcaccaggaagatgagccacctgcagtgatatgcccagatggcaatgaacctagtgagaatgcgcgcgcaattactactagcactgggagaccggaaattcctgacttaaacattgcaggaaacaatgaagatcaggaatgtgaaagaatagaggaaatatccaccaattatgtggatacaggtgaaacatacaataaagagactactattgtcgacatatactttgccgaaaagatcgctaagatcattgatctggacccagaaccaaagtccatggcagaatgcaaaaagcgttaagactgggtcaaatggaaagaagcaataaaggcagagttaatctcgctcaataaaagaaaagtattcggtcctgttgatcgtacccccgtagggatatcccctgtaggatataaatgggtgttcgtccgaaaacaggatgagaacaaccaggtggttcggtataaagcgagattagtagcacaagggtttacgcatagacctggcatcgatttcgatgaaacctattcacctgtaatggatggaattacattccggtttttaatatctatggcagtcaatttgaacttagaagtgcagttgatggatgtagtgactgcatatttatatgggtcattggattctgaaatctatatgaaagtttccgacgggattcaagttcctgaagaaacaaaacgcaacatatacagtgttaaattgcaacgatcattgtatgggttaaaacaatccggtaggatgtggtacaaccggctcagtgaattcctagaaaaggattcatcaagaatgatgactgtccctgtaaggctaaatattgcttaggtctgcagcttgagcacactcctgaaggggtattgttacaccagtctgcatatatccagaagatattggagaaatttaatatgaaggattcatatccgacgagaacccccatggtagtaagatctctagcagtagagagtgacccatttagaccacaggaaaataacgaggaattattgggacatgaatgtccatatttaagcgcaattggagctttaatgtatctcgcgaatggtaccaggcctgatattgcatttgttgttaacctacttgcaaggttcagttcagctcctaccaaacggcattggaatgacattaagcaaatcctccgttatttacgtggcacacaagatctcggtttattctttagaaaaaatcaagatttaaccatggcgggatatgctgattctggatatctgtcagacccccacaaagcattgtcacagactgggtatgtgtttctctgtggtggtacaaccatctcatggaagtcgacgaagcagacgatggtcgcgacatcaacaaatcactcggagattataggattatttgaagtgagcaaggaatgcatgtggttgaggagggtgatacaacatgtacagaatacatgtggactaaatatcacaccaactccagccattatttatgaagataattcagcttgtgttgcacaaatacaaatgggttatgtgaagacgagtctcacaaaacatatatcgcctaaatcttctatatgcatgaattg

SEQ ID NO: 14014 - DNA, 4359 bp, Oryza sativa
  Clone ID: TFbOSC400761j.C1.o70.fg
atgtcggacttagggggaaagaacggggaaaatggaaatgaatatggagcgagcagcaagggaactccatcacccaagggagctactataccttttgattacagcaaacttaccattccccctcacaactttgtctccgtgcctttcgggcgtgctcctcaatttgatgggacacattacgccgcttggaagcacaagatgaagttgcatctaatctctttgcatccaagtatttggaaagttgtttgtacaggtgttgatgtaccccatgatgacatggagctcacttcggagcaagagcaactcatccaccgcaatgctcaagcttccaatgcaattctctctgccttgagtccggaggagttcaacaaggttgatgggcttgaggaggccaaggagatatgggatactttgcaattggctcatgagggatcacccgccgttcctgaggccaagattgagttgttggaaggaagacttggaagatttgtgatggatgacaaacttctccgtgcttttggtccaagaaatcccactcttgtatcaatgatacaagaaaggaaagacttcaagaggctcaccccaagtgatattcttagaagaattgtgtctcatgagatgcaagaagaggaagctcgtgaagtgaggcaaatggtgaagaatgccgccatgatcaaaaatcaagaagtagttttgaaggcaaaacaagaagaagagtcaagttgtgaagaaagtgaagatgaagagatggcttttattgtcaagatattcaagcactttcttcgcaagagtggctatggcaaagggaggaaagatgatgacaagggaaagaggcaatcaaagagagcttgcttcaattgtggcgaatatggccacttcattgccgattttcccaagtcaaatgaagctaaggctaagggaggcaataagaagccggagcatgctcatgtggcggaggtgtggtactccggagatgaagaagatcccgaggtcaagcccaagcccaagccaaaagacaaggttgaaggagaagatggtgttgctatcgtcgccttcaagtcatcctcttcaagcaaggagcgtctcttcaataacttgagtgatgacgacgatgactcctaccactactcttgcttcatggcccaaggccgcaaggtgatgactcaaaagccctctcacacctctcttaatgttgattctagtgatgaggaaactagccttagggttgtcaatgaaactcttcaagagaaatttgctaatttagacaaaagtcataaagatcttgaagttcaatttgacactctttggaatagcacttctcaaccaaatgtggtttctaattcttccaacccttctactagcaatggttgtgctaggtgttacaatattgatttgaactcttatgctactaatgttgatgctatgcaagctcttaagaaagagaatgagaagttgggcacattggtgaaatatggatgcatgaagacataccattcaaaagatgccctttacaagaccatcaccgctcatcctaacaaggatggacacgggctcaagttttctggcggaagtcctgtgtctaagcgtgtgatgataaatgggaaagaatgcttgatgtttgtgagagaaggcaaagctccacaagcaagtgaggtgacttgccccttcactggtcagacacccagaagttccgggcaaaatgaccagaagttcctgtcctgtaagacaggaagttccggacattttgtcaggaagttccgggcttctgatagaccgaagggggtgaccggaagttccgggtataatgccaggaaattccggccagagggtctttactatgattcatatgcatactcctccggtggctcaagttgggttgtggacagtagctgcaccaatcatatgacgagagagaggcgtatgtttacaagtcttgatgaggagggtggaagtcgtaagaatattgtctttggagatgatggtaaaggaaaggtaatgggtctcggtaagattgccatttccaagaatcaatctctatctaatgtcctccttgtcaattcattaagctacaatttattatccgtgtctcaattgtgtaagttaggatttaattgcttgtttaccgatgtggatgtgaccgtttttaggcgagatgactcttccatagcattcaagggtgtgttaaagggtgatctatatcttgttaatttcgacatggatagagtgaatccggaggcatgcttgattgctaaatcttctatgggttggctatggcaccgtaggctagcccatgttggaatgaggaatttggcatctcttctaaaaggggaacacattcttggtctatctaatgtttcttttgagaaagatcgtgtgtgtagtgcttgccaagccgggaagcaagttgggagtccacatgccataaaaaacatcatgactacaacaagaccactcgagcttcttcatatggatttatttgggcccatggcctacataagcattggaggtaacaagtatggtttcgttattgttgatgatttttcacgcttcacttgggtgtactttctccatgacaaaagcgaagctcaagatgtcttcaagcgcttcgcaaagcaagctcaaaacctctatgatctcactatcaagaagaacactcaagtggaggaatttcttgatgaagaaggaatcaagcacgagttctccgccccctatgatcctccccaaaacggcattgttgagaggaagaaccaaaccctcattgaagccgcaagggcaatgcttgatgagtacaagacttcggatgtcttttgggcggaggccgtgagtaccgcatgtcataccatcaaccgcttgtacctccacaagatcctaaagaaaacttcatatgagctcttgagtggtaagaagcctaatgtttcatattttcgtgtctttgggagcaaatgttttattttaagtaagaaacctcgctcatctaagttctctcctaaggtggatgagggattcttacttggctatgaatcaaatgcacatgcctatcgtgtcttcaacaaaacctccggtattgttgaagtcactagggatgtgacatttgatgaatctaatggctcccaaggagagcaagttgttgtacatgttgtaggtgatgtggatccaagtcaagctataggcactaaggctattggagacatacgaccaatcgagacgcaggatgaccaagaagatagggatcaacctccgtcatcgacatccaatagccctacaagtgttgtgtctgctgagccggaagttccgagtcctattgaccggaacctccggacatctccaggcccggaagttccggattttacagtccggaacctccggacctgtggcagtgaagacgtgccaacggcacaggtcccctcagtgcaccatccaaggatacatcacactgtccaaagagatcattccgtcgacaacatacttggtgacataagaaaaggggtaactactcgctcttgtgtcgcaggtttttgtcaacacttctcgtttgtctcttctttggaaccaatcagggtggaagatacgcttggtgatccagattgggtgatggccatgcaagaggagttaaataacttcactcgcaaccaaatatggactttggtggagagacccaagcaaaatgtcatcggtaccaagttattccaaatggatatcaagagtgcctttctcaatggacctatctcggagttggtctatgtggagcaaccaccggggttcgaggatccaaagttgccaaaccatgtgtacaagctccacaaggcgctctacgggctcaagcaagcccctagagcttggtatgaatgtctccgaaattttcttttgaagaatggtttcgaaattggaaaggcggatactactctcttcactaaaaaatttaagagtgatttattcatatgccaaatttatgtcgatgacataatatttggttctactaatgcctctttttgtgaagaatttagtagtatcatgactaaaaggttcgagatgtctatgataggcgagttgaccttcttcctcgggctacaagtgaagcaagcacaagaggacaccttcatctctcaaaccaagtacgtgaaagacatactcaagaagtttgggatggaggatgccaaacttatcaagacgcccatgcctactaatggccacctagacctcgacgataatggtaaatatgtggaccaaaagggttgtgactttgaggttttgggctattccgattcggattatgccgggtgtaaggttgatagaaaaagcacaaccgggacttgtcaatttcttgggccgtcccttgttaattggtcctccaagaagtaa

SEQ ID NO: 14015 - DNA, 5802 bp, Oryza sativa
  Clone ID: TFbOSC401324j.C1.o2.fg
atgaagttgcatctaatctctttgcatccaagtatttggaaagttgtttgtacaggtgttgatgtaccccatgatgacatggagctcacttcggagcaagagcaactcatccaccgcaatgctcaagcttccaatgcaattctctccaccttgagtctggaggagttcaataaggttgatggacttgaggaggccaaggagatatgtgatactttgcaattggctcatgagggatcacccgccgttcgtgaggccaagattgaattattggaaggaaggcttggaagatttgtgatggatgacaaggagacaccacaagaaatgtatgataggatgatgatccttgtcaacaagattaaaggacttgggagtgaggacatgacaaatcactttgtggtcaagagacttctccgtgaatttggtccaagaaatcccactcttgtatcaatgatacgggaaaagaaagacttcaagagactcaccctaagtgacattcttggaagaattgtgtctcatgagatgcaagaagaggaagctcgcaaaacaagaagaagagtcaagagattcaagcactttcttcgcaagagtggctatggcaaagggaggaaggatgatgacaagggaaagaagcaatcaaagagagcttgcttcaattgtggcgaatatggccacttcattgccgattttcccaagtcaaatgaagctaaggctaagggaggcaagaagaagccggagcgtgctcatgtggcggaggcacacatgccggaggtgtggtactccggagatgaagaagatcccgaggttaagcccaagcccaagccaaaagacaaggttgatggagaaggtggtgttgctaccgtcaccttcaagtcatcctcttcaagtaaggagcgtctcttcaacaacttaagtgatgacgacgacgactcctaccactactcttgtttcatggcccaaggccgcaaggtgatgactcaaaagccctctcacacctctcttgatgttgattctagtgatgaggaaagtgataatgaattagatgatgtgcttaagagctttagcaaacccgctatgcaacatttggctaagctaatgagagctttggatagtaaagaacaatcactcgaaaggcaagaagaattgcttattcttgaggtgggcctcctagcatccccaatccttctactagcaatggttgtgctagctcttaagaaagagaatgaaaggttgggcacattggtgaaatatggatgcatgaagacataccattcaaaagatgccctttacaagaccatcacggctcatcctaacaaggatggacacgggctcgggttttctagtgaaagtcctgtgtctaagcgtgtgatggtaaatgggaaagaatgcttgatgtttgtgagagaagagagcaaagtggttgcttattttaatgggaattacaatgatgagtaccacacttgtgtgtgggtgccaaaggctttggcatactcctacgatggctcaagttgggttgtggacagtggctgcaccaatcatatgacgggagagaggagtatgtttacaagtcttgatgagaagggtggaagtcgtgaaaatattgtctttggagatgatggtaaagaaaagctacaatttattatccgtgtctcaattgtgcgagatgactcttccatagcattcaagggtgtgttaaagggtgatctctatctcgttgatttcgacgtagatagagtgaatccggaggcatgcttgattgctaaatcctctatgggttggctatggcaccgtaggctagcccatgttggaatgaggaatttggcatctcttctaaaaggggaacacattcttggtctatctaatgtttcttttgagatggatcgtgtgtgtagtgcttgccaagccgggaagcaagttgggagtccgcatcctatcaaaaacatcatgactacaacaagaccactcgagcttcttcatatggacttatttgggcccgtggcctacataagcattggaggtaacaagtatggttttgtcattgttgatgatttttcatgcttcacttgggtgtactttctccatgacaaaagcgaagctcaagatgtcttcaagcgcttcacaaagcaagcccaaaatctctatgatctcactatcaagagggtgcgaagcgacaatggaggagaatttaagaacactcaagtggaggaatttcttgatgaagaaggaatcaagcacgagttctccgccccttatgatcctccccaaaatggcattgttgagaggaagaatcgaacactcattgaagccgcaagggcaatgcttgatgagtacaagacttcggatgtcttttgggcagaggccgtgagtaccgcatgtcatgccatcaaccgcttgtacctccacaagatcctaaagaaaacttcatacgagctcttgagtggtaagaagcctaatgtttcatatttccgtgtctttgggagcaaattctttattttgagtaagatgcctcgctcatctaagttctcacctaaggtggatgagggattcttacttggctatgaatcaaatgcacatgcctatcgtgtcttcaacaaaacctccggagagcaagttgttatacatgttgtacgtgatgtggatccaagtcaagctataggtactaaggctattggagacatacgaccagtcgagacacaggatgaccaagaagatagggatcaacctccgtcatcgacatccaatagccctacaagtgttgtgtctgctgagccggaagttccgggtcctattgaccggaacctccggacatctccaggcccggaagttccgggttctacagtccggaaccttcggaccagtggcagtgaagacgtgccaacggcgcaagtggatgggatcgatgctgcgggcactttagggcataccgatcaggctcaggtccccctagtgcaccatccaaggatacatcacactgtccaaagagatcatcccgtcgacaacatacttggtgacataagaaaaggggtaactactcgctctcgtgtcgcaagtttttgtcaacactactcttttgtctcttctttggaaccaaccagggtggaagatgcgcttggtgattcggattgggtgatggctatgcaagaggagttgaataatttcgctcgcaaccaagtatggaatttggtggagagacccaagcaaaatgtcatcggcaccaagtggatctttcgcaacaagcaagatgaacatgtggtggttgtgaggaacaaagcccggttagttacgcaagggttcacccaagtcgagggtctcgattttggtgaaaccttcgcacccgtcgctcgccttgagtcaattagaattcttttagcctatgccgctcaccatgatttcaggttgttccaaatggatgtcaagagtgcctttctcaatggacctatctcggagttggtctatgtggagcaaccaccagggtttgaggatccaaagttgccaaaccatgtgtacaagctccacaaggcgctctatgggctcaaacaagcccctagagcttggtatgaatgtctccgagattttcttttgaaaaatggttttgaaattggaaatgcggatactactctcttcactaaaaaatttaagagtgatttattcatatgccaaatttatgtcgatgacataatatttggttctactaatgcctctttttgtgaagaatttagtagtatcatgactaaaaggttcgagatgtctatgatgggcgagttgaccttctttctctggctacaagtaaagcaagctcaagagggcaccttcatctctcaaaccaagtacgtgaaagacatactcaagaagtttgggatggaggatgccaaacctatcaagacgcccatgcctactaatggccacctagacctcgacgataatggtaaatgtgtggaccaaaaggtatatcgctccatgataggatctttgctttacttatgtgcatctcgtcccgacatcatgcttagtgtttgtatgtgtgcccgttttcaagcggagcctaaagagtgccatttgattgccgttaagagaattcaaagatatttagttcatactcctaatcttggcttgtggtatcctaagggttgtgactttgaacttttgggctattccgattcggattatgccgggtgtaaggttgatagaaaaagcataaccgggacttgccaatttcttgggccgtcccttgtttcttggttccccaagaagcaaaactccattgtattatccaccaccgaggccgaatatgtcgccgccgggtcttgttgtgcccaactcctttggatgaaacaaactctaaaagactttggctacaacttcaccaagaccccactcctatgtgacaatgagagtgccatcaaaatagccaacaatcccgtccaacactcaaaaaccaagcacatagatattcaccaccactttttgagagatcatgagactaaaggagacatatgccttacccatttttgcagggcggaagttccagtctctgtccagccagccagcaaccttgattcctctactgtttcttttaaccattgcactccaaccttgctaattcttgttgcagtggtcagtatgcctcgtgagaagagacagaagctttcacaggatgttcctgctgactcgagtcccccagttcatggtcctagggggagattgggcaaagaaaaagttggagatttttttagtgggagtcatattccgatccattccaagagggctggtagcattgtcattcgtgatgctccccgctctccctctccagttgcatctgagtctgatgatggtggcaatgaggatgagcctggttctgatagcaatcctttgaggctttacaagacaagggctgttgatcctgatcctagacgcccaagagtgaactatttgaagaatctgctcaagtgtggaaaggacagaatggatgacagattcaggaccttggtgcaggttgattggtataattctgtgatcatgggaagatcttatccagtgtattcctggaatgaggaagtgattggacagttctactccactgctttctttggcaccaccaagaaggggcttgattttgtgaagtggaccattcaggggcagcagtatagggtctctatggcacagtttgctgcagctttggggttagatgatgatgacctgagtcgtccacatatctttgtagaggatgctctgtcatcgaccagcactactttcttgtatgagaaggatgctcccaaggattgtttggggactactcgtgggttgcgtccatactatagaatgttgtattataaagtaaaatcctactatgggatttctcgaaacctcttgataaagttcaaagatgatcaaattgatgaaacatctattcttgcgcaagtactaagctccgaatctgccattagctcactgcttgacatgtcaattcggtcacttcctggagatcatggactaccgttacagcaggtacttcctgatgttccaccagcaatggccgatgcagtaaacagaggaggtgaactcctgacaaatctagcaacagggacaccatgggaggctgttgctaaggaggtaggcactgggggtgcacagtactgcacagtcctgtccgcaaatctacagttcagttttacaagaaatgttcatttggtagcaacggaagatgggtatttcataagactgctgcaacaacaacagcaacaacagttgattttatcacatatgggctcgacttaccctgatataaagtattgcatgtgtgtatga

SEQ ID NO: 14016 - DNA, 2403 bp, Oryza sativa
  Clone ID: TFbOSC410643j.C1.o22.fg
atggcggaaagcaaggcgacgagcacggcggcgctagggcgtgcgtgcttgccggagagacgacctccctcgccagcgacgccgaagaggggaggtaatcgagacgtttcgataggtgggaaatggtgttggaatacccatgggttagcccaagggcccgacactattcacgcgggctggagtggtggggctcgtggaatccgccatggatggtccatgcgtgatctgctcccgagcccgattaaggaggtttttttgtctgcgagctgggtgtgggtgccgaaagggggttctctgagtcctcatctagggtttccagccaccaggcgagaggtcgtgcgttttggggcgacgacgaggcggatctggagagctccggcgagactcactgacgggagatccttcctcgaggtagcgaagggaagtatggatcgtaaacctcaattccaacgtcctgatcaatgggttcccaataagagaagagcgttcgaagaggaggggggaggtgggaattgggggaatcgaaatttgcaggaaagggaggaacgtgaacttcggaatcggttgatggggcaacaacaacagcgcgaggaagggaggtggcagcaagttgagagaaggggggccaacaaacagtggcaaggagacagaaacagggagggtggtgcttgggagggaggggatcggcgtccgactcgtggaaaggagaagctgggggaggaagggagatcaggtccttcccagaaggaagagatcaagtgtttcaactgtggagaaagtggttatcatcaggtgaactgtcagaaacctcctctgtgctatgtctgtaagaatcctggacacatctcatctcattgccctgttcatgttggggggagtagctctaatttgagcaaactagaagtaaagctaaaaggttatggcatacctgagcagggttttttcagcctaaatgtagataatttaggtgtggctgagaaaggggcacaattcagaggaatcctaactgtggagaaaggggctggttcagtgcaaaaggtggccaatgagatgtctcatctatttagggagaaaaattgggattggaatgtgaagcaaatcagcagtaataatttcttgattgatttcccgagtgaagatgctagaagacaagttactaagtcagggggtttcgccaaaaagcaggaaatcattagagcaatatctgatattgtgggtgaatttaaagaagtggatgagaaatctttgaagggggaaggagctgttaggataaaagtgggatgcttggaccctagtgctatcaactattctgtcataatatatattaatgacattggatataagataaaatgggaggcagaggttgatacagaggggacagggtctattgattggggggggacaatgatgatgatgatgctgatgatctggatgatgattaccctccaggaggaaagaaaggtgggggtcaggatgccaaagggagtccaaagaaaaaggaacctgctaaggatgcagatagcaaaggaaggattgtcagtggagaatgaggtgggggtcactgctaagggtgaggatcctattgaatcaattaccgtggagaaaaaggcagacaaggcagtggtgttatggaagtcagaggaattttcacaaccagaattgtttgagcaagtttcacaggaggaggacaaaagtggtgaccttctcaaaagaatggatgtggatttaaaattggggggtgttagattattcacagatgaagagggggagaaatgtgctatccccgctgactcagacattgagttgatgagggcagaggaagatgatgacagtgaacaactagatctggaaagtgaagcagagatacagctcaaggaggttaacttccagaaagtcaggcacaagaaaaagcaagttagtttggtcaagagacagagttctagggtgaaggataaagaggtatcagttcatctaaaagctgagctcaggaagtccaaaatgaacatgacctcaggtatgtcatcaaaaaattcttatgcaatctttcattctgttagtcaggattatcttatcaacattgctagggctaggggaatctctttgggtgacaattctgtggaagtgagatgcaacttagatgctatttgtgctagggaattggcacaggctactatttttgatgcagataagagtttacaacagatggctgaaaaagcaagtttggaggaagaaggggggcaggaagtccccccaaatgggaatagtgtaattctggggttttctgtggtagaaatggagaatgatcagtttgttgagggcctgaaggaggaaaatagggatgagttggatgatgcagataaagagagttctgataatctgggggattttgacttgcatgactag

SEQ ID NO: 14017 - DNA, 4302 bp, Oryza sativa
  Clone ID: TFbOSC400225j.C1.o6.fg
atggcgttggttccggcgggagcgggagcggatccggcgagggagagctcggggagtgctttctcctacccacaactcacggcaacgaactacaccagctggtgcattcgggttcaggcgatgatggaggaccagggtgtctgggacgccatcgagccggcggccggggtggccgtcgacccaagaagggacaagaaggcgaggtcccatctgttgcagtccctgccggaggacttgctgatgcaggtggcaaagaagagatcggcgaaggaagtgtgggattgcttgaagacaaggttcgtgggcgcggaccgcgttcgcgaagcgcgcttgcagacgttgaagggtgaatttggtgccatggtgatggagccaggggaaactctggatcagtacgcgggccgcatcaccgcgatgagcgtgcgtcactcggcgttgggctcgacgctgggtgattccgcgatggtgaagaagctgttcgacacggtgccggaaaaattcgtcagcctcgtcgcaggtattgagcaattttatgacattgatactatgccatttgaggaggcagtgggtcgaccgaaggcctacgaggagcgcatgcggaagaagaaggctgccgctggcggggtcaccaccgatgggcaggtgctcctcactcaagcggagtgggaagctcacttcaagaagaacggcggggaatcctcgccaccacagaagaacaaaccttcaggtgaaggtgctgggcgcggccagggcggtcgcggtcgcggcagaggccgtggcgcaggcggacgcggtgggacgccgcggggcgactcaggtgcaggctctggcggcggtggccgtgacaagagtcacatcaagtgcttcaattgcgaggagtacgggcactactctaaccaatgcccacatccgaagaagaagaagggagaagcacatcttgcacagacggaggacgccgggcctgccctgttgcttgcgatgacggaggatgtgccagagcgcgcgtcgtgcggattggtcgtacgcgagcagcgcgtgtggcccaagctgctactggtagacgctggtggacatgctggcgatgtctggttcctggacaatggggccagcaaccacatgaccggcgatcgaagcaaattccgggagctggacgagtcgatcaccggacgggtgaagttcggcgacgcttccacagtgcagatcaaggggaaggggtcgattcttttttcatgcaagaacggtgatcaatggctgctacaggacgtctactacatccccagtctgcaatgtaacatggtgagtttgggccaactaacagagaccgggcatcgcgtggtcatggatgaggatgtactcgaagtgttcgacaaaagtccatggcggctggtgatgaaggtgaggcgcactgtaaatcgtctttaccgaattgagttgaagctggcgcatcccgtgtccctgctgtccagcctcgacgacccggcttggctgtggcatgcgcggctgggacacgtaaattttcaagcaatgaaactgctggtggacaaggagatggcggggggtgttccggcaatcgtccacccgaatcagctgtgccaatcttgcctggtggcgaaacaggccagggcgccgttcccggcggcggcgcacttcagggcggaggagccgctcgagctgctgcacatagatctgtgcggcccgattacaccgagtacgatgtctggtaatcgctatttttttcttatagttgatgattattcccggtggatgtgggtgttcgtactcaagacgaaggatcaatcgctcgatgctttcgtaaagttcaagccactggccgagaacacggctgggcggcgcgtgaagacgttgcggtcagaccggggtggtgaattcctgtcaggcgagtttgcacaggtgtgcgaggaggcggggattcaacgtcacctgacagcgccgtactcgccccagcaaaacggggcggtggagaggcgcaaccgcacggtgatggccatggcacgctcactactgaaggggatgcgcgtaccgggcaggttttggggggaggcggtgcgtcacgcggtgcatctccttaaccggctcccgacgaaggcaatgggtgatcgtactccgttcgaggcatggacggggaggaagccacagctgggacatctcaaggtgttcggctgcacggcacacgcgaaaaacacgcagccgcacctcaagaagctggacgacaggagtgcaccgtacgtgtatctcggtgtggaggaagggagcaaggctcatcgtctgttcgatccgcgtcgtgggcgcatacatgtaagtcgtgacgttgtatttgaggaaaatgtaccttgggagtggacatcagttgcaggacaggagccaacggatttcacgatggaggaggagcctggtgagcagctgccgagcccggcaacagcggccggcgtggtaccgtcgtaccaggcaccgtctcctggcaggcgcgccgggaaggaagcagtggtggcggcagaagaagtaccgtcaccggcaagcccggtggcagcatcaccgactctgcctggaacgcccacgcccggttctccatcgacaaactctgccggggtggtgccgtcaccgggcacagatgacaacatcgatacagatgatgggcctaggcggtatagatcgctggcagatgtcctacgtgaggccccgcgtgtggatttggtggaggacgaatgtgatggagaggcgctcctagctgagtcagaagagccatcaagctatcgagaagctgccggccaacctgcgtgggaagaagcaatgcagagggagatggaggcaatcgagaagaacaaaacatgggagttggccatgttgccagccgggcaccgagcgattgggctgaaatgggtgtataagctcaagaagaacacgacaggggagataatcaagcacaaggcacggttggttgcaaaaggatatgtgcagaaacaaggggtcgattttgaagaggtgtttgctccggtagcgaggcttgataccgttcgtgttgtgcttgcagtggcggctgatcgccgctggcaggttcatcatcttgatgtcaaatcggcattccttaatggtgaacttgaagaagaggtgtatgttgcacaaccggaagggtttgctagatcaggaaaagagcatcttgtgctcaagctgcataaggcattgtatggactccggcaggcactgcgagcctggaatatacgcctggacagaagcttgagggagctcggctttgatcggtgtacgcaggagcaggcagtatacacccgaggcagaggaagtgatggcataattgtcggcgtttacgttgatgatctcattgtcaccggagaaaatccctctgaattgaaggttttcaaggaacaaatgatgggggagtttgagatgagtgatctcggtttgctcacatattatctcgggatagaggttgatcaagatgagagtgctaccacattgaaacagactgcatatgccaagaaattactgtctcagtttgggatgatggagtgcaactcagtttcaattccaatcgatccgagatcgcagctgagcaaggatccagaaggtcacccggtggatgcaactgagtatcggcggatcatcggtagtcttcggtatttgcttcacacgaggccggatctgtcatatgttgtcggggtggcaagcaggttcatggagaggccaaccgtgatgcatttcaaggctgtgaagcaaattctcagatacatcaagggaacgatggattatggtctcgtgtatgctgcaggcactagggcactgaagattacagggtatactgacagtgacctcgccggggacttggatgatcggcgcagcactggtggaatggcgttctacatcaatcagagtctggtggcgtggagctcgcaaaagcagaaaactgtggcactatcgtcgtgtgaagccgagttcatggcagccacgacggcggcctgtcaagcgctctggttaagagtgttgctagcagaagtggcgggagtggaggagaaagcagtgaagctcttcgtcgacaataggtcagcaattgcattgatgaagaacccggtgtttcatgggagaagtaagcatattgacacccgttatcacttcatacgggagtgtgtggatggcgggcaaattgttgtggagttcgtccggactgaggagcagcgggcggatgcactgacgaaaggattgccggcggcgaagctggcgacggcgagacaccttcttggtgttcgttcactagggccacggcagaattaa

SEQ ID NO: 14018 - DNA, 4185 bp, Oryza sativa
  Clone ID: TFbOSC400510j.C1.o22.fg
atggcgttggttctggcaacatcggatccggcgagggggagctcggggagcgctttcctgtatccacaactcacagccaccaactacactagttgggtgatccgtgtccaggcgatgatggaggaccagggtgtgtgggaggcgattgaaccggcggccggggcggccgtcgaccctcggaaggacaagaaagcgaagtcgcacctactgcagtcgctgccagaggatctcctcatgcaggtggcgaagaaacggtcggcgaaggaaacgctgaagggcaaatttggcgccatggtgatggagccgggggaaaccctggatcagtacgcaggccgcatcaccgcgatgagcgtgcgccactcggtgttgggctcgacgttgaccgatgccgcgatggtgaagaagttgttcgacacggtgccagagaaattcgtcagccttgtcgcaggtattgagcagttttataatgttgatgacatgccatttgaggaggctgtgggccggcttaaggcttacgaggagcgggtgcgtaagaagaaggcagcagccggcggagtcaccgccgacgggcaggttcttctcactcaggctgagtgggaggcgcggtttaagaaggatggcggggagtcatcgtcgcctcagaaagggaaagcttccggcgagggagctaaaggcggccagagcggtcgcgaacgcgggcgaggccgtggtgcgggtgggcgcggtggcgctgctcgcggcaactctgcaagtggctcaggcggcggtggccgtgacaagagccacatcaaatgcttcaactgcgaggagtatggtcactattccaaccagtgtccgcacccgaagaagaagaaaggagaagcacacttggcccagaccgaggacgctggcgccgtgctgctgcttgcggtgaccgagaacgcgccggcgcgagcgacacaggagatggttgtgcacgaggatcgtgtgtggccaaagttgctgctggctgatagtggcgcaatggctggaaacgtctggtatttggacaatggcgctagcaaccacatgaccggagatcgcaagaaatttagggagctggatgaatcaatcaccggcagcgtcaggtttggggatgcatcatcggtgcagataaaagggaagggatctattctcttttcttgcaagaatggtgaccagtggcttctccaggatgtgtactacattcctagcctctgttgcaacatggtgagcttggggcaactcactgaaacagggcatcgagtggtgatggacgaggatgtcctcgaggtgttcgacaagtgtccttggcgactggtgatgaagctttgtcaggcgtgcttggtggcgaagcaaatcagggcgtccttccttgtggtggtgaactacagggcggaggaaccactggagctcattcacattgatctgtgcgggccgatctcgccggcgacgatggctggtaacaagtattttgttttaatcgttgatgacttcacacggtggatgtgggtgtttgtgattaaatccaaggatcaagcagtggaggccttcacaaagttcaaacccttggccgagaatgtggccgggcggcgcatcaagacgctgaggtcggatcgcggcggcaagttcctgtccggcgagtttgcacaagtgtgcgaatcggctggcatccagcggcatctcactgcgccgtactcgccgcagcagaacggggtggtggagcgccggaacagatcagtgatggtgatggcgcgctccctcttgaaggggatgagtgtaccaggcagactttggggggaggcggtgcgccacgcggtgtacatcctcaatcggctgccaaccaaggcgatgggcaatcgtactccgtacgaggcatggacggggaagaagccacatttggcacacttgcgtgtgttcgggtgtactgcacatgcgaagatcacaacgccacatcttaagaagctggacgaccggagtgcaccgtatgtgtacttgggggtggaagaaggaagcaaggcgcaccggctgttcgatccacgtcgcggtcgcatccacgtaagtcgtgatgtcatatttgaagaaaatgctgtttggcagtggcttggagatgcaggcgagcaagtctccgttgaatttgatgttgaagaaatcgttgagtcaccagccggctcggcgacatcgttgccaggcgcggtaccgaggtaccaggcgccatcacccggcaggcgtctaggcaaggagccggtggtggtagaagaggaagcttcctctccggcaggcacggcggaggcgtcaccgtcactgccgaccactcctgccacgcctatcggtgaacagagcacaccacactctgctggcgaaattgacaccgacggtgctcctgttcggtacaggcacattgctgatattttgagagatgcgcccagggtggatttggttgatgatgaacaagatggtgaggcattgcttgcagagacggaggagccgtcagcttaccgtgaagcagccggtcactcggcgtgggaggacgccatggctatggagatggatgccattgagcggaacgggacgtgggagctcaccacgttgccagctggccacagggcaattgggcttaagtgggtttataaactcaagaagaacactgcgggagaagtgatcaaacacaaggctcggttggtggcaaaaggatatgtgcagagacagggagtcgatttcgatgaagtctttgcaccggtggcaagacttgatacagtccaccaccttgatgtcaagtcagcctttctgaatggcgagctagaagaggaggagcaggctgtgtatacttggggcataggcagtggtggtgtcatcgttggcgtctatgtcgacgatctgattgtgactggtgaaaatcctgttgaattgaagatgttcaaggaacagatgatgggggagttcgagatgagtgatctcggtctgctctcgttctacctcgggattgaagttgatcagggagaaaatggaaccacgctcaagcaaactgcctatgccagaaaagtgctttctcagttcgggatgctggagtgtaattcaacctcaattccgattgatccaaggatgcagctgaacaaagatgcagatggtcacccggtgggatattactgggtatacagacagcgacccgctggggatgttgatgaccgccggagcacgggtggtatggcgttctacatcaatggcagtttggttgcttggagctcgcagaaacaaaagaccgtggcactgtcgtcgtgtgaagctgagtttatggcggccacgacagcagcttgtcatgcgctttggctaagagcactgctggttgagattgttggaggaccggcgaaggtggttaagctatttgtggataacaaattagcgattgctcttatgaagaatccagtgtttcatgggagaagcaagcatattgatacacgatatcacttcattcgtgagtgtgttgatggagggaaagtggttattgagtttgtccggactgaggaacagcaggcagacgctctgacaaaagttgcaacggttgaaggaataagtctgcgtttgttagcagatgcaaatgatgcggtgatcgagtcagaagaagaccgcgtcggtagcgttcgttacgcacgcaaggtgttcgatcgagggtctagcactaacacctacggcgtgcgcgtcgtcgccctgcacgccgacacggcggcggccaggacgatcgatctgccaccggggtgcgtcgacaggatgctgggctgcagcaacgccaagagcatgagcgagctcatgctggtcatgtcgcggggcggggcggtgttgagccttgtcatggcggagcgcgaggtgatctcggtgtggacgttggaggaggaggcagcggcggtggagaggtggagccggcaggtggtgatcgcgagggtggcgattgatcggagtgtggaagcacggagattgtaccagaccgtcttcttcgaggggttcggggagagaagcggcaccgtgctgatgaggatcgtcaacgtcgggctcgtgcagctcgccgtagcaacgaagaaggcgatcgttgtgcgggacagcggcgccggtaaatggtggggcaggtccatgtccagggcgtgcttgcacgagatgaatttgtactctttgctccaaagcatgaaacccttttga

SEQ ID NO: 14019 - DNA, 4302 bp, Oryza sativa
  Clone ID: TFbOSC400864j.C1.o6.fg
atggcgttggttccggcgggagcgggagcggatccggcgagggggagctcggggagtgctttctcctacccacaactcacggcaacgaactacaccagctggtgcattcgggttcaggcgatgatggaggaccagggtgtctgggacgccatcgagccggtggccggggtggccgtcgacccaagaagggacaagaaggcgaggtcccatctgttgcagtccctgccggaggacttgctgatgcaggtggcgaagaagagatcggcgaaggaagtgtgggattgcttgaagacaaggttcgtgggcgcggaccgcgttcgcgaagcgcgcttgcagacgttgaagggtgaatttggtgccatggtgatggagccaggggaaactctggatcagtacgcgggccgcatcaccgcgatgagcgtgcgtcactcggcgttgggctcgacgctgggtgattccgcgatggtgaagaagctgttcgacacggtgccggaaaaattcgtcagcctcgtcgcaggtattgagcaattttatgacattgatactatgccatttgaggaggcagtgggtcgactgaaggcctacgaggagcgcatgcggaagaagaaggctgccgccggcggggtcaccaccgacgggcaggtgctcctcactcaagcggagtgggaagctcacttcaagaagaacggcggggaatcctcgccaccacagaagaacaaaccttcaggtgaaggtgctgggcgtggccagggcggtcgcggtcgcggcagaggccgtggcgcaggcggacgcggcgggacgccgcggggcgactcaggtgcaggctctggcggcggtggccgtgacaagagtcacatcaagtgcttcaattgcgaggagtacgggcactactctaaccaatgcccacatccgaagaagaagaagggagaagcacatcttgcacagacggaggacgccgggcctgccctgttgcttgcggtgacggaggatgtgccagagcgcgcgtcgtgcggcttggtcgtacgcgagcagcgcgtgtggcccaagctgctgctggcagacgctggtggacatgctggcgatgtctggttcctggacaacggggccagcaaccacatgaccggcgatcgaagcaaattccgggagctggacgagtcgatcaccggacgggtgaagttcggcgacgcttccacagtgcagatcaaggggaaggggtcgattcttttttcatgcaagaacggtgatcaatggctgctacaggacgtctactacatccccagtctgcaatgtaacatggtgagtttgggccaactaacagagaccgggcatcgcgtggtcatggatgaggatgtactcgaagtgttcgacaaaagtccatggcggctggtgatgaaggtgaggcgcactgtaaatcgtctttaccgaattgagttgaagctggcgcatcccgtgtccctgctgtccagcctcgacgacccggcttggctgtggcatgcgcggctgggacacgtaaattttcaagcaatgaaactgctggtggacaaggagatggcggggggtgttctggcaatcgtccacccgaatcagctgtgccaatcttgcctggtgacgaaacaggccagggcgccgttcccggcggcggcgcacttcagggcggaggagccgctcgagctgctgcacatagatctgtgcggcccgattacaccgagtacgatgtctggtaatcgctatttttttcttatagttgatgattattcccggtggatgtgggtgttcgtactcaagacgaaggatcaatcgctcgatgctttcgtaaagttcaagccactggccgagaacacggctgggcggcgcgtgaagacgttgcggtcagaccggggtggtgaattcctgtcaggcgagtttgcacaggtgtgcgaggaggcggggattcaatgtcacctgacagcgccgtactcgccccagcaaaacggggtggtggagaggcgcaaccgcacggtgatggccatggcacgctcactactgaaggggatgcgcgtaccgggcaggttttggggggaggcggtgcgtcacgcggtgcatctccttaaccggctcccgacgaaggcaatgggtgatcgtactccgttcgaggcatggacggggaggaagccacagctgggacatctcaaggtgttcggctgcacggcacacgcgaaaaacacgcagccgcacctcaagaagctggacgacaagagtgcaccgtacgtgtatctcggtgtggaggaagggagcaaggctcatcgtctgttcgatccgcgtcgtgggcgcatacatgtaagtcgtgacgttgtatttgaggaaaatgtaccttgggagtggacatcagctgcaggacaggagccaacggatttcgcgatggaggaggagcctggtgagcagctgccgagcccggcaacagcggccggcgtagtaccgtcgtaccaggcaccgtctcctggcaggcgcaccgggaaggaagcagtggtggcggcagaagaagtaccgtcaccggcaagcccggtggcagcatcaccgactctgcctggaacgcccacgcccggttctccatcgacaaactctgccggggtggtgccgtcaccgggcacagatgacaacatcgatacagatgatgggcctaggcggtatagatcgctggcagatgtcctgcgtgaggccccgcgtgtggatttggtggaggacgaatgtgatggagaggcgctcctagctgagtcagaagagccatcaagctatcgagaagctgccggccaacctgcgtgggaagaagcaatgcagagggagatggaggcaatcgagaagaacaaaacgtgggagttggccatgttgccagccgggcaccgagcgattgggctgaaatgggtgtataagctcaagaagaacacggcaggggagataatcaagcacaaggcatggttggttgcaaaaggatatgtgcagaaacaaggggtcgattttgaagaggtgtttgctccggtagcgaggcttgataccgttcgtgttgtgcttgcagtggcggctgatcgccgctggcaggttcatcatcttgatgtcaaatcggcattccttaatggtgaacttgaagaagaggtgtatgttgcacagccggaagggtttgctagatcaggaaaagagcatcttgtgctcaagctgcataaggcattgtatggactctggcaggcaccgcgagcctggaatatacgcctggacagaagcttgagggagctcggctttgatcggtgtacgcaggagcaggcagtatacacccgaggtagaggaagtgatggcataattgtcggcgtttacgttgatgatctcattgtcaccggagaaaatccctctgaattgaaggttttcaaggaacaaatgatgggggagtttgagatgagtgatctcggtttgctcacatattatctcgggatagaggttgatcaggatgagagtgctaccacattgaaacagactgcatatgccaagaaattactgtctcagtttgggatgatggagtgcaactcagtttcaattccaatcgatccgagatcgcagctgagcaaggatccagaaggtcacccggtggatgcaactgagtatcggcggatcatcggtagtcttcggtatttgcttcacacgaggccggatctgtcatatgctgtcggggtggcaagcaggttcatggagaggccaaccgtgatgcatttcaaggctgtgaagcaaattctcagatacatcaagggaacgatggattatggtctcgtgtatgctgcaggcactggggcactgaagattacagggtatactgacagtgacctcgccggggacttggatgatcggcgcaacactggtggaatggcgttctacatcaatcagagtctggtggcgtggagctcgcaaaagcagaaaactgtggcactatcgtcgtgtgaagccgagttcatggcagccacgacggcggcctgtcaagcgctctggttaagagtgttgctagcagaagtggcgggagtggaggagaaagcagtgaagctcttcgtcgacaataggttagcaattgcattgatgaagaacccggtgtttcatgggagaagtaagcatattgacacccgttatcacttcatacgggagtgtgtggatggcgggcaaattgttgtggagttcgtccggactgaggagcagcgggcggatgcactgacgaaaggattgccggcggcgaagctggcgacggcgagacaccttcttggtgttcgttcactagggccacggcagaattaa

SEQ ID NO: 14020 - DNA, 4230 bp, Oryza sativa
  Clone ID: TFbOSC900029j.C1.o29.fg
atggcgttggttccggcgggagcgggagcggatccggcgagggggagctcggggagtgctttctcctacccacaactcacggcaacgaactacaccagctggtgcattcgggttcaggcgatgatggaggaccagggtgtctgggacgccatcgagccggcggccggggtggccgtcgacccaagaagggacaagaaggcgaggtcccatctgttgcagtcccagccggaggacttgctgatgcaggtggcgaagaagagatcggcgaaggaagtgtgggattgcttgaagacaaggttcgtgggcgcggaccgcgttcgcgaagcgcgcttgcagacgttgaagggtgaatttggtgccatggtgatggagccaggggaaactctggatcagtacgcgggccgcatcaccgcgatgagcgtgcgtcactcggcgttgggctcgacgctgggtgattccgcgatggtgaagaagctgttcgacacggtgccggaaaaattcgtcagcctcgtcgcaggtattgagcaattttatgacattgatactatgccatttgaggaggcagtgggtcgactgaaggcctacgaggagcgcatgcggaagaagaaggctgccgccggcggggtcaccaccgacgggcaggtgctcctcactcaagcggagtgggaagctcacttcaagaagaacggcggggaatcctcgccaccacagaagaacaaaccttcaggtgaaggtgctgggcgcggccagggcggtcgcggtcgcggcagaggccgtggcgcaggcggacgcggcgggacgccgcggggcgactcaggtgcaggctctggcggcggtggccgtgacaagagtcacatcaagtgcttcaattgcgaggagtacgggcactactctaaccaatgcccacatccgaagaagaagaagggagaagcacatcttgcacagacggaggacgccgggcctgccctgttgcttgcggtgacggaggatgtgccagagcgcgcgtcgtgcggcttggtcgtacgcgagcagcgcgtgtggcccaagctgctgctggcagacgctggtggacatgctggcgatgtctggttcctggacaacggggccagcaaccacatgaccggcgatcgaagcaaattccgggagctggacgagtcgatcaccggacgggtgaagttcggcgacgcttccacagtgcagatcaaggggaaggggtcgattcttttttcatgcaagaacgatgatcaatggctgctacaggacgtctactacatccccagtctgcaatgtaacatggtgagtttgggccaactaacagagaccgggcatcgcgtggtcatggatgaggatgtactcgaagtgttcgacaaaagtccatggcggctggtgatgaagcctcgacgacccggcttggctgtggcatgcgcggctgggacacgtaaattttcaagcaatgaaactgctggtggacaaggagatggcgggggtgttccggcaatcgtccacccgaatcagctgtgccaatcttgcctggtggcgaaacaggccagggcgccgttcccggcggcggcgcacttcagggcggaggagccgctcgagctgctgcacatagatctgtgcggcccgattacaccgaatacgatgtctggtaatcgctatttttttcttatagttgatgattattcccggtggatatgggtgttcgtactcaagacgaaggatcaatcgctcgatgctttcgtaaagttcaagccactggccgagaacacggctgggcggcgcgtgaagacgttgcggtcagaccggggtggtgaattcctgtcaggcgagtttgcacaggtgtgcgaggaggcggggattcaacgtcacctgacagcgccgtactcgccccagcaaaacggggtggtggagaggcgcaaccgcacggtgatggccatggcacgctcactactgaaggggatgcgcgtaccgggcaggttttggggggaggcggtgcgtcacgcggtgcatctccttaaccggctcccgacgaaggcaatgggtgatcgtactccgttcgaggcatggacggggaggaagccacagctgggacatctcaaggtgttcggctgcacggcacacgcgaaaaacacgcagccgcacctcaagaagctggacgacaggagtgcaccgtacgtgtatctcggtgtggaggaagggagcaaggctcatcgtctgttcgatccgcgtcgtgggcgcatacatgtaagtcgtgacgttgtatttgaggaaaatgtaccttgggagtggacatcagctgcaggacaggagccaacggatttcgcgatggaggaggagcctggtgagcagctgccgagcccggcaacagcggccggcgtggtaccgccgtaccaggcaccgtctcctggcaggcgcgccgggaaggaagcagtggtggcggcagaagaagtaccgtcaccggcaagcccggtggcagcatcaccgactctgcctggaacgcccacgcccggttctccatcgacaaactctgccggggtggtgccgtcaccgggcacagatgacaacatcgatacagatgatgggcctaggcggtatagatcgctggcagatgtcctgcgtgaggccccgcgtgtggatttggtggaggacgaatgtgatggagaggcgctcctagctgagtcagaagagccatcaagctatcgagaagctgccggccaacctgcgtgggaagaagcaatgcagagggagatggaggcaatcgagaagaacaaaacgtgggagttggccatgttgccagccgggcaccgagcgattgggctgaaatgggtgtataagctcaagaagaacacggcaggggagataatcaagcacaaggcacggttggttgcaaaaggatatgtgcagaaacaaggggtcgattttgaagaggtgtttgctccggtagcgaggcttgataccgttcgtgttgtgcttgcagtggcggctgatcgccgctggcaggttcatcatcttgatgtcaaatcggcattccttaatggtgaacttgaagaagaggtgtatgttgcacaaccggaagggtttgctagatcaggaaaagagcatcttgtgctcaagctgcataaggcattgtatggactccggcaggcaccgcgagcctggaatatacgcctggacagaagcttgagggagctcggctttgatcggtgtacgcaggagcaggcagtatacacccgaggcagaggaagtgatggcataattgtcggcgtttacgttgatgatctcattgtcaccggagaaaatccctctgaattgaaggttttcaaggaacaaatgatgggggagtttgagatgagtgatctcggtttgctcacatattatctcgggatagaggttgatcaggatgagagtgctaccacattgaaacagactgcatatgccaagaaattactgtctcagtttgggatgatggagtgcaactcagtttcaattccaatcgatccgagatcgcagctgagcaaggatccagaaggtcacccggtggatgcaactgagtatcggcggatcatcggtagtcttcggtatttgcttcacacgaggccggatctgtcatatgctgtcggggtggcaagcaggttcatggagaggccaaccgtgatgcatttcaaggctgtgaagcaaattctcagatacatcaagggaacgatggattatggtctcgtgtatgctgcaggcactggggcactgaagattacagggtatactgacagtgacctcgccggggacttggatgatcggcgcagcactggtggaatggcgttctacatcaatcagagtctggtggcgtggagctcgcaaaagcagaaaactgtggcactatcgtcgtgtgaagccgagttcatggcagccacgacggcggcctgtcaagcgctctggttaagattgttgctagcagaagtggcgggagtggaggagaaagcagtgaagctcttcgtcgacaataggtcagcaattgcattgatgaagaacccggtgtttcatgggagaagtaagcatattgacacccgttatcacttcatacgggagtgtgtggatggcgggcaaattgttgtggagttcgtccggactgaggagcagcgagcggatgcactgacgaaaggattgccggcggcgaagctggtgacggcgagacaccttcttggtgttcgttcactagggtcacggcagaattaa

SEQ ID NO: 14021 - DNA, 4083 bp, Oryza sativa
  Clone ID: TFbOSC900327j.C1.o10.fg
atggcgttggttccggcaacgtcggatccggcgagggggagctcggggagcgctttcttgtatccacaactcacggccaccaactacactagttgggtgatccgtgtccaggcgatgatggaggaccagggtgtgtgggaggtgattgaaccggcggccggggcggccgtcgaccctcagaaggacaagaaagcgaagtcgcacctgctgcagtcgctgccagaggatctcctcatgcaggtggcaaagaaacgattggcgaaggaaacgctgaagggcgaattcggcgccatggtgatggagccgggggaaaccctggatcagtacgcaggccgcatcaccacgatgagcgtgcgccactcggcgttgggctcgacgttgagtgatgccgcgatggtgaagaagttgttcgacacggtgccggagaaattcgtcaaccttgtcacaggtattgagcagttttataatgttgatgacatgccattcgaagaagctgtgggccggcttaaggcttacgaggaacgggtgcgtaagaagaaggcagcggccggcggagtcaccaccgacgggcaggttcttctcactcaggctgagtgggaggcgcggttcaagaaggatggcggggagtcatcgtcgccccagaaagggaaagcttccggagagggagctaaaggcggccaaagcggtcgcggacgcgggcgaggccgtggcgcaggtgggcgcggtggcgccgctcgcggcaactctgcaagtggctcaggcggcggtggccgtgacaagagccacatcaaatgcttcaactgcgaggagtatggtcactattccaaccagtgtccgcacccaaagaagaagaaaggagaagcacacttggcccagactgaggacgccggcgccgcgctgctgcttgcggtgaccgagaacgcgccggtgcaagcgacgcaggagatgtttgtgcatgaggatcgtgtgtggccaaacttgctgctggctgatggtggcgcggtggctggaaacgtctggtatttggacaacggcgctagcaaccacatgaccggagatcgcaagaaattcagagagctagatgaatcaataactggcagcatcaggtttggggatgcatcgtcggtgcagatcaaagggaagggatctgttctcttttcttgcaagaatggtgaccaatggcttctccaggacatgtactacattcctagcctctgttgcaacatggtgagcttggggcaactcactaaaacagggcatcgagtggtgatggacgaggatgtcctcgaggtgttcgacaagtgtccttggcgactggtgatgaaggtgaggcataccacgaatcgtctctaccggatcgagctcaaccttgcctatccagtgtccctgctatccagccttgatgatccggcgtggctgtggcatgcacgtttggggcatgtgaatttccaagcgatgaagctgttggtggacaaaggcatggaggtggacgtaccggccatcgttcacccgaatcagctttgtcaggtgtgcttggtggcgaagcaaatcagggcgtccttccctgtggtggtgaactacagggcggaggaaccactggagctcattcacattgatctgtgcgggccgatctcgccggcgacgatggctggtaacaagatcaagcagtggaggccttcaccaagtttcaaacccctggccgagaacgtggccgggcggcgcatcaagacgctgaggtcggatcgcggcggcgagttcctgtccggcgagtttgcacaggtgtgcgaatcggctggcatccagcggcatctcactgcgccgtactcgccgcaacagaacggggtggtggagcgccggaacagatcagtgatggcgatggcgcgctccctcttgaaagggatgagtgtagcaggcagactttggggggaggcggtgcgctacgcggtgtacatcctcaatcggctgccaaccaaggcgatgggtaatcgtactccatacgaggcgtggatggggaagaagccacatttggcacacttgcgtgtgttcgggtgtactacacatgcgaagatcacaacgccacatcttaagaagctggacgaccggagtgcaccgtatgtgtacttgggggtggaagaagggagcaaggtgcaacggctgttcgatccacgtcgcggtcgcatccactggcttggagatgcaggcgagcaagtctccgttgaatttgatgttgaagaaatcgttgagccaccagccggctcggcgacatcgctgccaggcgcgataccgaggtaccaggcgccatcacccggcaaccgtcctggcaaggagccggtggtggtagaagaggaagcttcctctccggcaggcacgatggaggcgtcaccgtcactgccgaccactcctgctacgcctatcggtgaacagagtacaccgcactctgctggcgaaattgacaccgatggtgctcctgttcggtacaggcacattgccgatattatgagagatgcgcccagggtggacttggttgacgatgaacaagatggtgaggcattgcttgcagagatggaggagctgtcagcttaccatgaagcagccggtcacccggcgtgggaggacgccatggctatggagatggatgccattgagtgcaacgggacgtgggaactcaccacgttgccagctggccacagggcaattgggcttaagtgggtttataaactcaagaagaacactgcgggagaagtccaccaccttgatgtcaagtcagcctttcttaatggcgagctagaagaggaggtatatgttgcacagccagaaggttttgtcaagcaaggcagagagcatctcgtgctcaggttgaacaaggcattatatgaactccggcaggcgccgcgagcctggaacattcgcctagatagatgtccgaaacagctcggttttgagcggtgcacgcaggagcaggctgtgtatactcggggcacaggcagtggtggtgtcatcgttggcgtctatgtcgatgatctgattgtgactggtgaaaatcctgttgaattgaagatgttcaaggaacaaatgatgggggagttcgagatgagtgatctcggtctgctctcgttctacctcgggattgaagttgatcagggagaaaatggaaccacgctgaagcaaactgcctatgccagaaaagtgctttctcagttcgggatgctggagtgtaattcaacctcaattccgattgatccaaggatgcagctgaacaaagtcgcagatggtcacccggtggatgcaactgagtatcggcgagtgatcagttgtcttcgatatctgttacacacaaggccagatctttcctttgctgttggagtggcaagcagatttatggagcggccaactcttatgcacttcaaagcagtgaaacaaattctcatatatctgaaagctggaaatggtgatatgcagattactgggtatacagacagcgacctcgctggggatgttgatgaccgccggagcacgggtggtatggcgttctacatcaatggcagtttggttgcttggagctcgcagaaacaaaagaccgtggcgctgtcgtcgtgtgaagctgagtttatggcggccacggcagcagcttgtcatgcgctttggctaagagcactgctggttgagattgttggaggaccgacgaaggtggttaagctgtttgtggataacaaatcatcgattgctctcatgaagaatccagtgtttcatgggagaagcaagcacatcgatacacgatatcacttcattcgtgagtgttttgatggagggcaagtggttattgagtttgtccggactgaggaacagcgagcagacgctctgacaaaagttgcaacggttgaaggaataagtctgcgtttgttagcagatgcgaatgatgcggtgatcgagtcagaagaagaccgcgtcggtagcattcgtgtgcgtgagtttagcgcggtgaatgaaaaccacagaaaattagccccacaaatttcctatctgctattgttctctgaaacttctcaatttcctgtgttcttgttctgctctgtattcctctga

SEQ ID NO: 14022 - DNA, 3003 bp, Oryza sativa
  Clone ID: TFbOSC401564j.C1.o4.fg
atggctggttttgctgatacactgagaccggataaattcaccggtgtgcactttaagagatggcagctcagggtcactctgtggctgacagctatgaaatgcttctgggtgagtactggcaaacctgaagaaattcttactgctgatcagcagaagcaattcgaggaagccactactctctttgtgggatgcattcttagcgttcttggcgatcgtctggtcgaggtatatatgcatatgaccgacgctaaggagttgtgggatgcactgaataataaattcggtgctattgatgctagcaatgatctgtatatcatggagcagtttcatgactacaagatggctgacaaccattctgtagtcgaacaggcccatgagatacaaaccatgactaagaaactcgaactccttaagtgtgtattactcgacaaatttgtggccagtgccaatgttgtgcacaaggcccaaaataagagtaaggggaaatacaaagctcaacagaccaccaacttcaagaagcagaagaagaacaacaacaatcctaatcaggatgagaggacttgctttgtgtctggccaacctggtcatctggctaggaagtgtccacagcgcaaggggatgaaggcacctgcagggcagacttctaagtctgctaatgtgaccattggcaacactggagatggaagcgggttggtcgcacggggtttcaccgtcctaatggggaatgggtcacatgcttatgtcatggtgttggcacgattttgctatgtgtacttgttgaaaacgaaagacgaggctctagactattttaaaatttataaggcagaaattgaaaatcaacttgacagaaagataaaaaggcttaggtctgatcgtgatggagagtttttctcaaacgagtttgacttattctatgaggaacatggcatcatacatgagaggacgcctccctattctcccgagtctaatgggattgctgaaaagaagaaccgcacactgactgacttggtgaatgccatgttggacaccgcgggactacctaaggcatggtggggggaggcattgttgacctcgaatcatgtgttaaacagagctcctaacagaaataaggacaaaacaccatataagatatggattgggagaaaaccatcactttcttatttgcgcacatgggggtgcttggcgaaagtcaatgtaccaataacgaagaagcgcaaactgggatctaagactgtggactgtgtctttctgggatatgctcatcacaacattgcctatagatttttaatagttaaatctaaggtacctaacatgcatgttggtacaattatggagtctcgtgatgctaccttctttgagagctttttcccaatgaaggatacacatagtagttcgagccaaccctctgaagtaattcccagttcaatcacaccaccagaacaaactgaacatacacatgaacatgtcactgaggaggatgaaagtgaagctcctcgaagtagtaagagacaaaggacggctaagtcctttggtgatgatttcactgtgtacctcgtggatgacactcctaagtcaatttcagaagcatatgcatcttctgatgtagactactggaaggaggctgtccgtagtgaaatggactccattatcgctaacgggacttgggaggtgacagagcgaccctatgggtgtaaacctgtggggtgcaagtgggtgttcaagaagaagcttaggcctaacggtactattgaaaagtacaaggcacgacttgttgctaagggctatactcagaaagaaggcgaaaatttctttcacacttactcacctgttgctagattgaccacaattcgtgtgctactttccctagcaacctcacatggtcttctcgttcatcaaatggacgttaagatagcttttcttaatggagagctagatgaggagatctatatggatcaacctgatgggtttgtagttaaaggctttgcagtcaatgaggcagataaatgtgtgtactatcgccatggtgggggtgagggagttattctgggcttgtatgttgatgacatactgatatttgggacaagccttgaggtgataaatgaggttaaatcattcttgtctcaaaattttgatatgaaggatttgggagtagctgatgttatcttaaacattaagctaattagaggcgagaatgggatcacactcttgcagtcccattatctggagaagatcttgaatcgctttggctacattgatagtaagccttctccaacaccttatgatcctagcttgttgcttcgcaagaacaagagaattgctaggaatcaactagaatactcccaaatcattggctcgctgatgtacctggctagtgcaactaggcctgatatctcctttgctgtgagcaagttgagccggtttacctctaattcgggagatgatcactggcatgcgcttgagcgagtaatgcactatctgaaaggtactatggaattggagcttcactattctgggtatcctgcggtactggagggatatagtgattctaattggatctctgatgtggatgagatcaaagccactagtggatatgtcttcacactaggtggtggtgctgtttcgtggaggtcttgcaaacagacaattttgacgaggtcaaccatggaagcagagctgacggcactggatactgctactgttgaggcagaatggctgcgtgatctattaatggatctgcctattgttgaaaaaccagtgccggctatccttatgaactgtggcaatcaaacggtaattgtcaaagtgaatagttctaaggataatatgaaatcgtctagacatgtgaaaagacgattaaagtctgtcaggaaattgagaaactctggagttataacgttggattacatccaaacagctagaaacctggcagatcccttcacgaaaggactatcacaaaatgtgatagacaatgcatcgaaggagatgggtttgagacccatgtga

SEQ ID NO: 14023 - DNA, 3918 bp, Oryza sativa
  Clone ID: TFbOSC900422j.C1.o26.fg
atgatacgggaaaggaaagatttcaagaggctcaccccaaatgacattcttggaagaattgtgtctcatgagatgcaagaagaggaagctcgtaaagtgaggcaaatggtgaagaatgctgccatgatcaaaaatcaagaagtagctttgaaggtaaaacaagaagaagagtcaagttgtgaagaaagtgaagatgaagaaatggcttttattgtcaagagattcaagcactttcttcgcaagagtggctatggcaaagggaggaagtatgatgataagggaaagaggcaatcaaagagagcttgcttcaattgtgacgaatatggccacttcgttgccgattgtcccaggtcaaatgaagctaaggctaagggaggcaagaagaagccggagcgtgctcatgtggcagaggcacacatggcggaggtgtggtactctgcagatgaagaagatctcgaggtcaagcccaagcccaagccaaaagacaaggttgaaggagaaggtggtgttgctaccgtcaccttcaagtcatcctcttcaagcaaggagcgtctcttcaacaacttgagtaatgacgacgaggactcctaccactactcttgtttcatggcccaaggctgcaaggtgatgactcaaaagccctctcacacctctcttgatgttgattctagtgatgaggaaagtgataatgaattagatgatgtgcttaagagctttagcaaacccgctatgcaacatttggctaagttaatgagagctttggatagtaaaaaacaatctctcgaaaggcaagaagaattacttattcttgagaagaaaagaaaccttgccttagaggagagcctagctaaagaatgtgctaaaaatgaacaactagctaatgagcttaatttggctaatggttctctagctagccttagggatgtcaatgaaactcttcaagagaagtttgctagtttagacaaaagtcataaagatcttgaagttcaatttgacactctttggaatagcacttctcaaccaaatgtggtttctaattcttccaacccatctactagcaatggttgtgctaggtgttacaatattgatttgaactctcatgctactaatgttgatgctatgcaagctcttaagaaagagaatgaaaggttgggcacattggtgagatatggatgcatgaagacataccattcaaaagatgccctttacaagaccatcaccgctcatcctaacaaggatagacacgggctcgggttttctggtggaagtcctgtgtctaagcgtgtgatggtaaatgggaaagaatgcttgatgtttgtaagagaaggaaaagctccacaagcaagtgaggcatactcctccggtggctcaagttgggttgtggacagtggctgcaccaatcatatgacgggagaggggagtatgtttacaagtcttgatgagaagggtggaagtcgtgaaaatattgtcattggagatgatggtaaaggaaatgtaatgggcctcggtaagattgccattttcaagaatcaatctctatctaatgtcctccttgtcaattcattaagctacaatttattatccgtgtctcaattgtgtaagttaggatttaattgcttgtttaccgatgtggatgtgaccatttttaggcgagatgactcttgcatagcattcaagggagtgttaaagggtgatctctgtctcgttgatttcgacgtaaatagagtgaatccggaggcatgcttgattgctaaatcctctatgggttggctatggcaccgtaggctagtccatgttggaatgaggaatttggcatctcttctaaaaggggaacacattcttggtctatctaatgtttcttttgagaaagatcgtgtgtttagtgcttgccaagccgggaagcaagttgggagtccacatcctataaaaaacatcatgactacaacaagaccactcgagcttcttcatatggatttatttgggcccgtggcctacataagcattggagagggtgcgaagcgacaatggaggagaatcaagaacactcaagtggaggaatttcttgatgaagaaggaatcaagcacgagttctccgccccctatgatcctccccaaaacggcattgttgagaggaagaaccgaaccctcattgaagccgcaagggcaatacttgatgagtacaagactttggatgtcttttgggcggaagccgtgagtaccgcatgtcatgccatcaaccgcttgtacccccacaagatcctaaagaaaacctcatatgagctcttgagtggtaagaagcctaatgtttcatattttcgtgtctttgggagcaaatgttttattttaagtaagaggcctcgctcatctaagttctcacctaaggtggatgagggattcttactttgctataaatcaaatgcacatgcctatcgtgtcttcaacaaaacctctggtattgttgaagtcactagggatgtgacatttgatgaatctaatgactcccaaggagagcaagttgttgtacatgttgtaggggatgtggatccaaatcaagctataggtaccaaggctattggagacatacgaccagtcgagacgcaggatgaccaagaagatagggatcaacctccgtcatcgacatccaatagccctacaagtgctgtatctgctgagccagaagttctgggtcctattgatcggaacctccggacatctccaggcccggaagttccgggttctacagtccggaacctccggatcaatggcagtgaagacgtgccaacggcacaagtggatgggatcgatgctgagggcactttagagcattctgatcaggctcaggtccccccagtgcaccatcctcaaggatacatcacactatccaaagagatcatcccggtggaagatgcgcttggtgatccggattgggtgatggctatgcaagaggagttgaataacttcactcgcaatcaagtatggactttggtggagagacccaagcaaaatgtcatcggcaccaagtggatctttcgcaacaagcaagatgaacatggggtggtcgtaaggaacaaagcccggttattccaaatggatgtcaaaagtgactttctcaatggacctatctcggagttagtctatgtggagcaaccaccggggttcgaggatccaaagttgccaaaccatgtgtacaagctccacaaggcgctctacgggctcaaacaagcccctagagcttggtatgaatgtctccgagattttcttttgaaaaatggttttgaaattggaaaggcggatactactctcttcactaaaaaatttaagagtgatttattcatatgccaaatttatgtcgatgacataatatttggttctactaatgcctctttttgtgaagaatttagtagaatcatgactaaaagtgtttgcatgtgtgcccattttcaagcggagcctaaagagtgccatttgattgctgtcaagagaattctaagatatttagttcacactcctaatcttggcttgtggtatcctaagggttgtggctttgagcttttgggctattccgattcggattatgccgggtgtaaggttgatagaaaaagtacaaccaggacttgtcaattccttgggcggtcccttgtttcttggtcctctaagaagcaaaattccattgccttatccaccaccgaagccgaatatgttgccgccggttcttgttgtgcccaacttctttggatgagacaaaccctaaaagactttggctacaacttcaccaagatcccactcctatgtgataatgagagtgccatcaaaatagccaaaaatcccgtccaacactcaagaaccaagcacatagacattcgccaccacttcttgagagatcatgagactaaggggacatatgccttacccatgtga

SEQ ID NO: 14024 - DNA, 5379 bp, Oryza sativa
  Clone ID: TFbOSC421503j.C1.o7.fg
atgaggggcgagcatgagggagagcgcttccgcccatccacctccaccgcggcgggcgtccactccggcatccgtcagccaccatccaaaccccaggtcggctcttggcgtgacatcattgttggcgttgggacccagggggcagtgggcgagaaggaacgggaagcggcatggattgaggtgagaagaaggaagggttcgcattcaagaggggctcatctgtctccacctaccagaccagctgcattgaagacgacgagggaggtcccccggtggttgcaaggacgctgcttcaagtgtctcggcttggggcaccagaaggctcactgcacgggtcaaatccgttgctttcgctgctggtacacgggccatcttgctagctcctgtgctgagaagggtgagcgtggtgagagggaggaaggcgaggtgcggggcgcaccgaaagagagcgttcaggggagagcgcaggtggagggcaggcgtctgccggcgcgccgacaagaaccccgccgtgcggtgcctcaggctcggcggcaggaggaaacctcgacagctgaacccggcgcgtctcgtcgtcccaaatccgaccaggcttcagcgagcgtcaaggagatggccggctttcagatctgcacagccaggccccatgagtacatggaggagttctggacgggcgagccggagctgcgtccggcgatcgggcactgcgttctgtcttggacggcgggcatggagcgcaacgaagcttggctcaaccaacacactctcatggcgtccgttctgaagacaaggccatcggtctcgtcgggggagctgcttgtggccatcgtgcagcaggccggcgtccgggaggagaacctgcgcgtcgacgtgactcacacagaggacttcctcctctccttccgcacgctgcgcgaccggaactcggtgttccgtcgctctcatgagatctacgtgcaagaagttcctgtctccttcaaactgtggagtaggcggagctgggctgacagctccgatctcaagttcttcaccaagatttcgcttgacgggctgccggctcacctgtgggaaagggagacggtgcgcaacaaggggagttggtggagattatcccggctgcagatgctagatgtctgggtcttttcgcttggttcaagaacccaaacaagcttccgcagttgcttcaggtcgaagtgccagagaagactggggcaggaggttcttggaggaaaggttcttcgagcacagctcctcctcgcgctcctcgggcacggccaacgcttctctatgacgttatccttcatgtcgaagaggtcatcgatcccactcccttgcacgctccggctacgaacgcaaccagtccgcttgctcgtccgcgaggggacggtggaggctgcgaactcggcagctgtggagctccatcatctagctcctgaggcccgcggaacctcggtcaagcagccggttgcacctgaccctttggaggcagaggtctgctcctatgggggcaagggttcgatgttggcgctgagcccggtgatagaggcggtgactggatcggcggagccgggccggatggtagcgggggcaatgatggcggcggggaccgagggcatggctccacgtccgaatgtctggttttcccctcagcagagccagggctcgccggcgcttgtggacgcatccacgccggtgttccaagatgttccactgccgctggagaacctggcgcattctccgggttcgacagtccttccctcgccgcggatcttccgctctatcagtcctttgcggctgtctgaagaggaccaggtagacgggctcatggctcaagccatgctgccaccaccggcacaagccttcgtcctcgcctcgccgggcacgatggattcacttctggtttcaccgaggttgcggagcactgcggacgcggtccgtgggtgcgcgtttcgaggctctgggcacgacccgagccctgcgtcgacgccaggccacgtcagctctgtccagactctacccccgctggccagacacctcagctttgaagatatgggtggagatccgccattaatggcgagagctgctgtcctggaagagattttcgaagcactgtcccccggcgggaacccggtcggggctcgcctgccctctccacctgcggacgggcagtcccatgctggtccttctacggctgatgggccgccctcgtctgctgataggctgtctccaccttggtcgcctgtacggtcggctctgctagttgggccggccttgggggtggcccatttcgaccgggtctatgtgtgccgcaaggagtccgttcccgctcctcaagtggttgagctggctcccagcccacagcctgctcgacgaagccctttaggagcggtgatcctgggccaggcctccccacttcggcccgtgatgagccagagccaggcttctcgggtaccagacggctcagcagtcgacgcgttcatcgtcaccatctcgaccccacctccatgctccctccttggcaccccacccgcctcagtcccggtcacaagaagtcgtcgccgcgtcgaacttccccgcgatttcacgccgtggagaagcccccggctggcgctacaaggggatggtgctcgtcgtcacaccatctccaaggtgcagcgggttaccatgaagaaattggggatcattgaggaagaagatgaggccactcaggagacggcggagcagtacatgtgcctcttcgacaatcccctgccgccgcatcacgtcgaggcgatggcggaactgctccagctggaccttgctgagccgatggatcccctgccggcagaaccgacgatggcactgttcagtgttctagtttggaatgtgagggggcttaataacactgctaagcgtgccctcgtgcaagagtctgttgtttcctctaatgcctctgtagtttgctttcaagagtctaaattagaagtggtgaacgctgtgcttatctttgagctctgtggtccgggtttcaattgtttcgaagtgctgcctgctgaacaaacaaggggaggagtgatcattgcttggaaaggcgacttgcttcagggaacactggtccataccggtcgttggtctttgattgttaatttgagttggggtgacagatcctggtctctttcctcggtgtatgggccgcaagccgacgacgagaagctcttattccttgacgagatgtcggcaatcagggatctctgtttggtggaatggataattactggggatttcaacctcatcactgcggccgcggacaagaataacttgagaatcaaccgtcgcctcatgaatgcctttcgcagcaaggtaaatgagttggaattgaaagaagtgtatttgttcgggaggcggtatacctggagcagcgagcaggcggttcccactttggtgaagctagatcggttgttcgcttcgacccagtgggaggacatgtttccggaagcgcatctccaagccttaagttcttcagggtcggaccactgcccgcagctccttacttgcggcgacagggtgcctagacagaggagattcaggttcgagtcctactggactagacttgagggttttgaggaagtggtgaaggagacttggcagatggcgaggctcagcaaatttttatctaagtggggtcaaaggcacatcagttccttcagactgcagttgcagatcgcgaacgaactcatccttcgctcgagcaactccatccgcttccaagacatccacatgccccggctgaacttggctgatttggatgctgctttcaatgaggaagcagtttgggaagccatcaagatcatgccaaatgagaaatcacccacgccagatgggttcacgggcctgttctatcagaaatgttgggagatcatcaagcaggatgtgatggcagcgttgcacaaattctgctccgggaataatcagaacttggagctgcttaacacggcaatcattactcttttgccaaagaaggaggcctcatctctcttgaaggattacaggcccattagcctcattcatagctttgccaagctagcagctaaggtgatggctttaagactcactccaaggatggcggacttggttgcttgcacacagtcggctttcatcagaggtcgctccattcatgagaattttatctttgtgaagggtctcactaagctcttccactgccgaaagaaggccatgatccttctaaagctagatatcttgaaagccttcgactcggtttcttggcccttcctgctagacttgttacagttcaggggtttcggtcccaactggagaaggatcaatcctacttctgttgtgcccaatatgtccttttacgccgacgatgcggttatcttcttcaagccagtgcatcacgaagcggcaaccattaaagcagtcttgaatctgttcggggatgccaccggtcttctctctaactttgctaaaagcgctattactcctattcgctgcacagaagaacagaggttgctggtgcaggaagtgttgggttgcagaatggaggatcttccaatcacctacctagggctgcctctttctataaggaatccaaccaaggctgagttgcaacccattatggatcgaatggctaagaaggtggcgggctggaaaccaaagttactgtctccggatgggcggttgtgcctgatcaagtcagtcctcatggcgattcctgttcatctcctctcagtggttcagctcccacgatgggtcatcaaagacattgaacgtcgctgtagggggttcttgtggaagggacaggaagagataagtggtggtcattgcttggtcgcttggcgggagatatgcatgccaatcggcaacgggggtttggggatcaaggatatcgacagttttgggaaagccttgcggctcaaatgggaattcaaacgtcaagaacaaagagacagaccatggacaatggcaaattgggaatcagagaaagatgttggagatcttttcaactccctggcaattcatatacttggggatggcagccacactgacttttgcaggggaaattggttacctcgagggggaagcatcgcaaacaattgccccacactcttcagctttgtcagcagaactaagctcatggttgcccaaggtttgatctcgcacagatgggtcagagaccttcagggttctctttccagcagagctctggctgaatacctttctctttgggatgaacttcaatcggtggctgtccaggagggtcctatgatctcttctttcttacctcaactaagtgcccttttggggaagcaatttggaagaccaaagcgccagcgagagtcagattttttctttggttggcagcaaagggtagatgtctaa

SEQ ID NO: 14025 - DNA, 715 bp, Oryza sativa
  Clone ID: TFbOSC13260j.C1.o1.np
taatcaacttgcagaataagcctaacatacatcataacagcaaaagacttagatctgttaaggtcctatccttagtttctaatctgtctctccccttcgttttccctctctccctctccaaacctttgcaacagatggctgacaatgagaaaggcaataaggtcaggagtcaagacattggtacctcaagctcccgagtgaatgaagcacaagacaccagttgtgcggcagtggtcccaacacctgattaaccagaacaaattgcttatagagatactacagcagcatcggatgccaattttgaacccgagtcagatgcaacctcaggtgcagttggaggcagtccaagcactcacaccacaagtcagcgcaccgccaacatcccagaaggcccctcatgccatgccacatgttgacccaaaagaagcaagtatcatctgttttatgtgtgatgagcaagggcactacgcaaggaactgtcctcagcagaaaagaaaagcaccaatgcgaaccgaaggtgaagttcgtaagatgatcattaccagcacagaatggccctcaccaggaatgacaagacgtcagagaagaaacaccttccgaggtgcaccacagttgacagagcatcttttagctaatggaggtagagtgtctgatagtgaagattcagatcaagtctctcaaaagatgaagatgagaaatctccccaagggttcaa

SEQ ID NO: 14026 - DNA, 884 bp, Oryza sativa
  Clone ID: TFbOSC18671j.C1.o2.np
taggtggagtcctgcttataccccagttgagcgcctgtgaagatggagccgtaggccgctagtccgctgcttactagatggtcaggtcagtgaagaagaagacatcgtcagttgtttgccgaagctccggaagactgcaggatccgctagcgaaatggaggaagtagtgaagccagctgttcataacagcaaaagacttagatctgttaaggtcctatccttagtttctaatctgtctctcccctttgttttccctctctccctctccaaacctttgcaacagatggctgacaatgagaaaggcaataaggtcagaagtcaggacattggtacttcaagctcccgagtgaatgaagcaccagacaccagttgtgtgacactagtccaacacctggttaaccagaaccgattgcttatagagatactacagcagcaccagacgccaattctgaacttgagtcaaatacaacctcaagtgcagttggaggcagtccaagcactcacaccacaagtcagcgcaccgccaacatcccagaaggcccctcatgccatgccacatgttgacccaaaagaagcaagtatcatctgttttatgtgtgatgagcaagggcactacgcaaggaactgtcctcagcagaaaagaaaagcaccaatgcgaaccgaagatgaagtccgtaagatgatcattaccagcacagaatggcctccaccaggaatgacaagacgtcagagaagaaataccttccgaggtgcaacacagttgacagagcatcttttagctaatggaggtagagtgtctggtagtgaagattcagatcaagtctcctccgatgatgaagatgagaagtctccccaaggttttaaccagtgatgagctactgtac

SEQ ID NO: 14027 - DNA, 987 bp, Oryza sativa
  Clone ID: TFbOSC20369j.C1.o1.fg
atggctgacaatgagaaaggcaataaggtcagaagtcaggacattggtacctcaagctcccgagtgaatgaagcaccagacaccagttgtgtggcagtggtccaacacctgattaaccagaaccaattgcttatagagatactacagcagcatcggatgccaattttgaacccgagtcagatgcaacctcaagtgcagttggaggcagtccaagcactcacaccacaagtcagcgcaccgccaacatcccagaaggcccctcatgccatgccacatgttgacccaaaagaagcaagtatcatctgttttatgtgtgatgagcaagggcactacgcaaggaactgtcctcagcagaaaagaaaagcaccaatgcgaaccgaagatgaagtccgtaagatgatcattaccagcacagaatggcctccaccaggaatgacagaacatcagagaagaaattccttccgaggtgcacaacagttgacagagcatcttttagctaatggaggtagagtgtctgatagtgaagattcagatcaagtctcctcagatgatgaaggaatgggtcatttcgccgacaagtgcccaaaaccgagaaacgtagctgccagcacgtcagtccacgcaaacccccgcaatcagaagcttgctcctcaacgaattgtcatccatgcatcccgaagcagtcctataacccgcgttgcaacagctccaattccaatgagtgcactaccacaaggtgtcaatgctcaatttcagccccagccaccagctgacaagacagaggccagtatctgcgttgtacctttggaagttccaatacagcagctgagaaatcaagtacaagatgaagaacccgagttgaagaagggcattactccaaaaactgtccccaaccaaggcaaaatcgacctccacattaccgccaatttacacgaagcagacattccaatcgtattgtggtcactggagcaaacgccgtacccgtaa

SEQ ID NO: 14028 - DNA, 598 bp, Oryza sativa
  Clone ID: TFbOSC25205j.C1.o1.fg
atggctgacaatgagaaaggcaataaggtcaggagtcaggacattggtacctcaagctcccgagtgaatgaagcacaagacaccagttgtgcggcagtggtccaacacctgattaaccagaacaaattgcttatagagatactacagcagcatcggatgccaattttgaacccgagtcagatgcaacctcaggtgcagttggaggcagtccaagcactcacaccacaagtcagcgcaccgccaacatcccagaaggcccctcatgccatgccacatgttgacccaaaagaagcaagtatcatctgttttatgtgtgatgagcaagggcactacgcaaggaactgtcctcagcagaaaagaaaagcaccaatgcgaaccgaaggtgaagttcgtaagatgatcattaccagcacagaatggcctccaccaggaatgacaagacgtcagagaagaaacaccttccgaggtgcaccacagttgacagagcatcttttagctaatggaggtagagtgtctgatagtgaagattcagatcaagtctcctcagaagatgaagatgagaaatctccccaaggtttcaaccaggataaaatggaac

SEQ ID NO: 14029 - DNA, 536 bp, Oryza sativa
  Clone ID: TFbOSC25668j.C1.o2.np
aacctctgcagagggggcacactttacccacacgacattactaacccggatcacccagcccgcatttcgagagccgacacaggtttaccatatgccgacgagaggggtcccagaccaacaacaggttaggtcccagaccatactgtgccaggaagcccaggggtcctccccgacaccaccctggcaaatccacttgtctctcggcatcaaggctcccctgattagctaattactcagccaggggtgtcccatttcacccatgtggtcgtacttgttatatgttcggatgaaattccaaaggaataggtccttaagtgcaagagcgggaaaccgtgctcccggcacgtcccccggtctgcgatttttggaaattcatttagttcgtaagcaccgacccaggtgtcggtgacatgggatcaggagtatcatgactagaggtttgaggcagacacaatcgcacacgtggcctggtacccccgagggacgtcgggcccgagggtgatgcgttcgccctcctcttagtccccccgaggggg

SEQ ID NO: 14030 - DNA, 1409 bp, Oryza sativa
  Clone ID: TFbOSC33041j.C1.o1.np
atgtcatggcacagggttggtgtcctgctgctaggggctcagtcctgcctgcctgtcccgggggttccggccgtaggtgggattgggtcggtactcttgtctatggctaggatgggttggaaactatgtcacgtcttccgtccgtataccgtggtgatgtttaacagagaaaaaggaaagaatgtcagcgggtatacctcaagtaactcaagttttcaactcaatccaccactggcccccagagagttaacaagggcacacccttggtccattccgagcatgctgtttagttcacagctaccattggttggaagtcaagaccaaaatcagtatgtgtttgatcgagcctttgccacccaagtcaatgagcttccaatgccagaagagcaggtccccttttgtcatgattgtagagagcaaggacactatgccctgaattgtccatgggtatatgtcaaagaagccccttccctggtttagcagggcagacatcgctaaaccagcctcctcacaccaagtcaagcttgcagcctagtgtgcaaagtagagagctcaacggagagaatccattgaatcccgggaaatgctttcctcctagcctctcgtaccacgtggggtcacatactaagcaagccaaaggcaagaagagtaagaatcagaagagaaaagcaccgatgcgaactgaagaagaagtacgtaagatgactattaccagcaccgaatggcctccagcagggataactattcctagacgtcaaagaggaaatactttccgaggtgcacgacagttgacccagcacctcttaagccatggtggcagagtatctgatagtgaagggtcagatcaagtctcctcggatgatgaagatgagtctccccgacatctcggcgaggaagagatggaatcaaaggcatgcacccgttgcggggaaattgaacacgttgctagcgtgtgtctcacactctgcactcattgtgaagaagaccatccaccaggggagtgtcccacccgcaaggtcacatgttttctgtgcgaaggtacaaaccatgtgcccaaggattgccaactcagtgtgttgttgaccaagaccgcagaaatccaacgaacaaccctacgattgtctcatcagctagtcagctccaacagcaacatcgacgatatcatccacagcaccaatgctcctctcgctgcacctgactctgcagtaagtcatagcgataataccttcagcaccaaccattctctgcaccgaccgcctcagcaaagaattgtcatcgatggaagaagttgtgtctctccccgacctactccaggccgagccaaggacaatcaacctccggagggcgataccaagcagaagaccgttattcgcctcaaccagcaatcagaaggaaacttctcctgtgaa

SEQ ID NO: 14031 - DNA, 1098 bp, Oryza sativa
  Clone ID: TFbOSC417491j.C1.o2.np
gaaccgtttttccgtgtttttccccccaaaagcgggagaaacccgtcatgtcgccagctcgtgtgccactatatgcgttcattgcgaggaagaccatccacccgacaggtgtccaacgagcaggatcacttgtttcttttgtgaaggaactgatcatgtaccaaaagattgtcaattcagttttctgctgacgaagaagatggctaaccaacccgccagttccaacggagagaagcatcaaggcaacaccaatcctcgccaagattacagtttcagcctaactccagtgccaggacagaggaatcaaaatgagaaaagaaaatgccgagtccgggaagatatctgttgcttcaattgtcaaggaatgggtcatttcgccgacaagtgcccaaaaccgagaaacataactgccagcacgtcagtccacgcaactccctgcaatctgaagcttgctcctcagcgaattgtcatccatgcatcccgaagcagtcctatagcccgcgttgcaacagctccaactccagcgagtgcattaccacaaggtgtcaatgctcactttcagccccagcaaagaattgtcgtcgatggaagaagttgtgtctctccccgacctactccaggccaagcaaagggcaatcgacctccggagggcgataccaagcagaagaccgtcatccgcttcaaccagcaatcagaaggaagcttctcctgtgaatgatagcaatatgcagtcctatcacatcatcacagaaccaatcaaggatgcagtcactagaacaatgccagctgcaaggagtgaaatcttcaactcggtatcagatgctacacggagtgaaaagtgcaagccccggttaccaggttgactccgaagatatgaatcatgagaagttctggaacggaagcatcattgaactaccgcaacctagtctgagtcagccaaaaggtgcaccctggtccaagtcaggtgaagagaagattccatccgcaacaggaggtcaagccaagcagttccgagtggtgaagttttgctggaagtttgtcaagacgcaacggaagaagtcagacaagaagagaagaccgcccaacctatcttcttgc

SEQ ID NO: 14032 - DNA, 1467 bp, Oryza sativa
  Clone ID: TFbOSC21297j.C1.o9.fg
atggacatctctaggacaaatgaaggctacacgagctgcggcccggtagtcgagatgtcatggcacagggctggtgtcctgctgctgggggctcattcctgcctacctgtcccggaggttccggccgtaggtggggttgggtcggtactcttgtttatggctaggatgggttgggaactatgtcacgtcttccgtccgtataccgtggtgatgtttaacagagaaaaaggaaagaatgtcagcgggtatgcctccagtaactcaagttttcaactcaatccaccactagcctcaagagagttaacaagggtacacccttggtccattccgagcatgctgcttggttcacagctaccattggttggaagtcaagaccaaaatcagtatgtgtttgatcgagcacttgccacccaggtcaatgagcttccaatgccagaagaggatgtccccttttgtcacgattgtagagagcaaggacactatgccctgaattatccatgggtatatgtcaaagaagccccttcctttggtttagcagggcagacatcgctaaaccagcctcctcacaccaagtcaagcttgcagcctagtgtgcaaagtagagagcccaatggagagaatccattgaatcctgggaaatgctttcctcctagcctttcgtaccacgtggggtcacgtactaagcaagccaaaggcaagaagagtaagaatcagaagaaaaaagcaccgatgcgaactgaagaagaagtacgtaagatgactattaccagcaccgaatggcctccagcagggataactattcctagacgtcaaagaggaaataccttccgaggtgcacgacagttgacccagcacctcctaagccatggcggcagagtatttgatagtgaagggtcagatcaagtctcctcggattatgaagatgagtctctccgacatctcggcgaggaagagatggaatcaaaagcatgccctcgttgtggagaaattggacacgttgctagcatgtgtctcacactttgccctcattgtgaggaagaccatccaccaggtggatgtcccacccgcaaggtcacatgttttctatgcgaaggtacaaaccatgtgcccaaggattgccaactcagtgtgttgttgaccaagaccgcagaaatccaacgaacaaccctacgattgtctcgtcagttagtcagctccaacagcaacatcgacgatatcatccacagcaccaatgctcctcttgctgcacctgactctgcaataaatcatagcaataataccttcagcaccaaccattctctgcaccgacggcctcagcaaagaattgtcgtcgatggaagaagttgtgtctctccccgacctactccaggccgagcgaagggcaatcaacctcaggaggatgataccaagcagaagaccgttattcgcttcaaccagcaatcagaaggaagcttctcctgtgaatga

SEQ ID NO: 14033 - DNA, 4734 bp, Oryza sativa
  Clone ID: TFbOSC422890j.C1.o1.fg
atgggcgtaccccgctcagagggatacgtcattgagctacaccggttgatgaggcgcctacggtaccccagatttccgatctaccgagtgagatggtgtggacccgtttgggaggctcgggttgaggttcatacacgagttcctttagagtcagactacagctttccgacacgccaccgtcacgacttaccggagaccgcgatgcaggatgcagcccgggaggccttcctccgacttagctctattcaacgagctgagttagcgagtaccgagtttgctcaccacccgtttcaagaggagagcaactccgtctgcacagtccaggacacaccttgctgctacaacccgatagtgactcgactgtcccgatgggctgaggcagtagacgacttctacgaggaggctctgttagagattgacgaccagcagagacgtgtgggagagttagagactgaggtgactaacctcacagtgcagcagcttcagctagaggaggagcaccaggcttggggcagtgagatagactcactgaaggcacagcttcagacagaggggaccgacactgagccagagatagagccggacatcactgatccttcagaggatgagactcctgtccaccgcatcacctttgtcggaggccctcataccctcagcactgctcgcaagagcacacgacctccgggcaagaagcccaagccagatccagagatggcaagccgacatagggcgtcaaccagcaatgaagaaactcaagtacccgacctaaccaccctggccggagttatggccactcaaacccaacttctgcaagctattgcaaacaatcaaggcaaccgcggaggatcgagctttggagagtttatgaggactaagccacccactttcgctacggcagacgagcctatgggggcagaagattggctacgcaacataaagaagaaactgacccttgtccggatgcgcgaagccgacaaagtgatcttcgcagtaaaccaactggagggaccagctggtgattggtgggatacttacaaggaagctcgagaagaagatgctggagaacccacttgggaagaattcactgcagcttttcgtgagaacttcgtgcctgccgcggtgatgcgcatgaagaagaacgagttcagaaggctgcgacaaggaaacacaacggtgcaagaatatctgaaccggttcactcagttggcccgctacgcaatcggagacctcgcagatgaagaggaaaagatcgacaagttggagaatgatcaaaggactgtagagcacaaccgcaagaggaggcttgctatgaatcgcccgcctcagggagtacctcagcgactcaagggggccacttcgtctggacggaagcccactattgtggcaaccaaccgtcccgctgcgcctagcaatttcaataggccagttgcggttcagaaccgcacccctacaccaaccctggctgcccctggagtcaagaagaatgtggactgcttcaactgcggggagtatgggcattatgccaacacctgcccacatccacgcaaaactcctgtccgtactggcgctaatgcaatgactgttcgtggaactgctacccctgctgtcggacgaggtctattcaagactccgcagactaacaggaccgctaccggatttggacgcggacaagtgaaccatgtccgagctgaagaggcccaggaagataagggcgtactaatgggtatgttctctatcaattctagcccggttaaagttctgttcgattctggtgcatcgcattcattcatatccctggaggctagtcaaaagcacaacttaaccctagtgggacttagaaagcctatgatagtacactcccctgggggcgagataaccgtaagtcatgcttgcatcaacatacctattcgccttagggatgtggtgtttccctccaaccttatagttgtgatacctcagaccctggatgtcatattgggtatggattggttaacaaagaacagaggagtaatcgactgtagacgtagagaagttaccctgaccacaccctggggatcggatataagagcaactatggatcaagatcctagactggccgaacgtgccggaggcatattcaccatgctacccatgaagggaatgcccatagtgcagcgattgcccgatgtgtttccagaagatttacctggaatgccaccagatcgtgacatagagttcattattgacctgatacccggaactgctcccatatccaagagaccatatcggatgccagtcaatgagttggaggaacttaaaaagcaaatcagagagttgcaagagaagggatttgtatgccccagttcgtcaccttggggagccccagtgttattcgtcaagaaaaaagatggtagcatgagaatgtgtgtaaactaccgttcactgaacgaagtaactatcaaaaacaagtatccactaccacggattgatgatctcttcgaccaacttaaaggagctaaggtgttctctaagatcgaccttcgatcaggataccaccaactgaaaattaggactggggatatacccaaaaccgcgttctcaacacgctatggattgtatgagttcacagaagagcatgcggagcacttgcgtttggtactcgagaaacttcggaagcataagttatatgcaaaatttagtaaatgtgagttctggttaaaggaagtcgcctttctaggccatgtgatctcagccggtggagtagcagtggatcctgctaaagtggaggctgttacggaatggaaggcacctaaatctgtgaccgagattcggagttttctaggtttggccggatactaccgaaggttcattgagggattctctaagatagctcgaccaatgacgcaactactcaaaaaggaaaaggagtttgtgtggtcagaacagtgcaaggagagctttgagcagctcaaagaaaagttgacctctgcgcctattctagttctccccgacaataggaaagactttgttatatattgtgatgcatcaaggcaaggactaggaggagtactgatgcaggacggaaaggttgtggcctatgcatcgcgacaactgcgaccacacgaggaaaattaccctacccatgacctagaactagcagctgtggttcatgcactaaagatttggagacactatttgattggaaaccattgcgatatctacactgaccacaagagtctgaagtatattttcacccagtcagatctcaacttgaggcaaaggcgatggttggaattaatcaaggactatgatctagaggttcactatcacccaggcaaggcaaacgttgtggccgacgctttgagtcgtaagagtcattgcaatcatctgagaatggaagagatggctcctgagcttaaagaggaaatagcccagctaaacctgcatatagtacttcgtgggcggataaacaccctggacattcgacctcttttgagaacccaaatagaagaagcccagagggagaacagagaaatccaagaggtgaaagaacgcttagctgcagggtttgcaaaggaattttcgaccgatgagaaagatgtcctatggtataaaaagcgaatctttgtactcgaacagggtggactgagaggattaatcctaaaggaagctcacgaatcggcatattcattgcaccccggaagtactgaaatgtaccaggatctgaaggaaggatactggtggcccaacatgaagagagatgtggcagaatacgtagcgctctatgacgtatgccagaaggtgaaggctgagcaccagagaccagcaggtttgttgcaaccccttagaattcccgaatggaaatgggatgaaataggtatggattttatagttgggttgcccaagaccgcaacaggatatgattccatctgggtgattgtggatcgactcaccaagacggcaagattcatccctgtcaagacaaactatagcggtgccaaactcgccgagttgtacatgaccaggatagtgtgtcttcatggtgtgcctaagagaattatatccgatcgaggcacacagtttacctcgcatttctgggaaaaagtacatgaagccctaagaagttatcttgcttttagcacagcttatcatccacagacagatggccagacaaagagaacaaatcagacggtagaacgggcggtatttggacctgacattatcaaagaggccgaagaaaaggttagcctgatccgtgaccatttaaaggtggcacaatcacgacaaaagagtcacgctgacacccgaagaagaaacctggaattcaaggaaggagattatgtttgtctgaaggtttctccgatgagaggcacaaaaaggtttaaggtcaaagagaaactagcgccaagatatgtgggacctttccaagtcatggctagacgaggagaagtcgcatatcagttacagctaccagaaaatatcgccgatgtacacccagtcttccgtgtgtctcaattaaagaagtgcttacgagtgccggaggaacaagctccgctggaagagattcacattagcaatgatctcacgtatccagaacacccggtccggatattggatgaagccgaaaagaggactaggagcaaagtgtggcgtatgtacaaggtacaatggagtaatcacactgaggacgaagccacctgggaaagcgaagaattcttgaggacggaatacctgcacctattcgaaaactggtaa

SEQ ID NO: 14034 - DNA, 3059 bp, Oryza sativa
  Clone ID: TFbOSC8199j.C1.o1.np
tgccctccgttcgcgtcctcgcgccgtcattccgacgtttccggagagtccgttttcgcaggagaagaatttgaagagttcctaggccagcaaggcaactcctggtttggaatggtatattcctgatttggagatagatctgtacagccgggtatggttgttcagaatggttgggcctatacaacaggatgccgcgctacaagcctgagtacttgtttggtgttgagggttttgtccaggagttgcgtacgatgtcctttgtcattggatttgggactgcccctttttatgcccagattcctcatgatcgacatgaagagaagtgccgagtcaaagtcaccttgaacagtaatagtgaggatatcccctcagtaatgttcgaagctggagggagaaactacatccatgcatgtcaggaggtggcaaggatcgccataggagagctccgcgatcgctacagtgatcggttggccgacactgagtatcgctatcatcctcgccaaccccagggaagtgaccgtggcagctaccttaagaccgaaggaattgagaatgatgctaccacaaggcatttggttgagatgctatgggctatggatgaaagtcgtgcggagactgtgttagcagctcaagatcgtgaagaccggaatcgtggtaagatttgcaagctagaagacaaggtggatcgtttggagaaggaactagccgcattgaagggagaagcaccgctgcagaaggccagggttcgtcttaccgcaaggaagagagctctatttgtccctcgctaccaattggcgccaaagatggtgctcactcgcagcaacaggaatggccccaacaacaacaataacaacaacaatggagagaatcccacacttgcccaagtcctggctcaacaggcacagcttatgaacatgatgatgcagcaactccagaaccagcagaaccagctcaaccaagggaacaaccatgcacctcctcagaataagttagcagaatttcttcgtgtgaggccgcctattttctctagtaccactaatcctgttgaagctggtgattggctgcatgccatagagaagaagttggatttgcttcagtgcaccgatcaggaaaaggtctcatttgcatcacatcagttgcatggccctgcctctgaatggtgggatcacttccgccttaataggactactgctgaacctatcacttggcttgaattcaccgctgctttccggaagacgcatataccatcgggagtggtgtctctcaagaagaaggaattcaggtcgctcactcagggatctcgctctgttacggagtatttgcacgagttcaatcgtctggctcgttatgctccggaagatgtgcgcactgatgaagagcgtcaggagaagttcttggaaggactcaatgatgagctttcttacccactcatgactggggattatcctgatttccagaagttggtggataaggctattcgccaggaggacaaatacaaccgtatggagcagaagaaacgccggattgctcaattcaagacacaacaggagaataatcagaagccgcgtcttactttaggaccccagtccatgccacagggaggttcttcatctgttgttcgtccgcagcgtcagttcttcaacaacaatgctggcaacaacatccacaatcaagctccacgccctgttgccgcttcgacacagcaacagcctgtcaagagggagcaaggcagtaagcccgtagtgtgcttcaactgtggagacccaggacattatgctgacaagtgtctgaagccccgacgtgtgaaggttgtccctgcccagagcaactctaccgcaccagcatcaaaggcccgtgtcaatcatgttgctgctgcagaagctcaagatgctccaaatgtgattttgggtacgttctttgttaactcagttcctgcaacagtgcttttcgattctggtgctacacattcattcttatctatgagttttgcgggaaatcatgggatggaagtagaagatcttagacgtcctttgatggttagtaccccaagtaatcaagcactttctttgcaacgtagcccctctgtccgaatagaaattcagggagtaccatttctggccaatcttatcttgttagaatccaaagaccttgatgttatcctagggatggactggttagccagacataaaggtgtgatagactgtgctaacagaaaagtaaccctcaccagcaatgatggtcgagttgtgactgttcatgcattgtcttctgagtctttaaggtcaagactaaaccaaataactttgaaagagattcctatagtccgggagtatcctgatgtgtttccagatgatttacctggtatgccgcctaaaagggatatagagttcagaatagatttggtaccaggaacaactccgatccataagagaccttgtagaatggcagccaatgagttggcagaagtcaaaaggcaagtagatgatttgcttcagaaaggatacatcagaccgagttcatcaccatggggagctcgagttatttttgtggaaaagaaagatcatacccagaggatgtgtgtggactatcgtgcactaaacgatgtgactatcaagaataagtatccgttacccagaattgatgatttgtttgatcagcttaaaggtgccaccgttttctccaagatagatcttcgatcagggtatcaccagttgagaatcaaagaggaagatatacctaagacagcttttaccactagatatggattgttcgaatgtactgttatgtcttttggacttaccaatgcccctgctttcttcatgaacttgatgaataaggcgtttatggaatacctagacaagttcgtggtagtctttatcgatgatattcttatctactctcgaaccaaagaagagcatgaagaacatctttgccttgcattggagaagctgcgagaacatcaactgtatgccaagtttagcaagtgtgaattttggttgtctgaagtaaagttccttggtcacgtcatctcagcaggaggagttgccgtcgatcctagt

SEQ ID NO: 14035 - DNA, 4057 bp, Oryza sativa
  Clone ID: TFbOSC900190j.C1.o15.np
gatcaccccaacttagcacaaatgctcgccaatcaaaaccaactcatcgcagctttgctccaccaaatgcaaaacccataagcacccgctgctcaagctcccataaacgctctaccgcagtcaaagttgtcggaattcttccgagtctgacctcccactttttcaagcacaaccaatcccgtcgaagcaaactactggctgcacgtggttaacaagaagttggacctcatccaatgtaatgatgaagagaaagtcgccttcgccgctcaccaactgcatggacctgcttccgagtggtgggaccacttccaggccacccagccagctggacaaattattacttgggctcgttttctactgcttttcgcagagctcatgtacctgctggagttgtagctctgaagaagaaagaattccgtgaactcaagcaagatggcaggaccgtcactgaatttttgcacgagttcaacaggttggcccgctatgctcccaaggatgttcgtacagatgaagagaaacaggagaaatttctcgaagggttgaatgacgagttgtcagtccagctcatctctggtgaatacgaagacttccaaaagctagtcgacaaggcgatccgcttggaggacaagcaccggaagatggaaagcaagaaacgcaagttggctaatgccaggatgtttcaaggaccaagtcagaaaccgcgttatgtgtttccccctcaagttggttcttcatcagcagcacagcgtgcatcctgtccacagatgaacaacaagctgcagaactcaggatggaacaacggtcagcgttctacccctgctcagggtggatccacacgcaaagatagctccgggaagatacttgtctgctacaactgctatgagcctggacactttgccgacaagtgcccaaagccaaagcgtccgcaagctcctgcacctgcacgcaatgccaaccagagcaacaatggcaaccgcaacaacaacaacctggtgaggggacgtgtgaatcacgtctcggctgaggaggcacaggctgcaccagaagtcatacttggagctacgcattcctttatatcaagagattttgtggcaaaacaccaaataaggatagaagatcttagcaaccctatgataatatcaaccccgggaagccagctaccgactaagctcttcagcccatcagtaaccatagagatccaaggagtcacttttctggctaatctcatccttctgagctctaagaacccggatgttattcttggaatgaactggttgaccaagcacagtggtattatagattgtgctatccgatccatatctttgattgggggtactggccaacgagtcactttccatgctaagctagcacttccttgtaagcaagttctgaaccaggtcagtatggaggaaatacccatcgtgaaagagtatccagatgtttttccagaggaactaccaggcatgccgcccaagagggacatcgagtttcgaattgacttagtgcccgggacagcgccaatctccaagagaccgtaccgcatggctgccaatgagctagctgaagttaaaaagcagttggaagaactcaaaggaaaaggccacatccgaccaagcacttcaccctaaggagatcccgttatcttcgtggaaaagaaagacaaaactaagagaatgtgcgtggattaccgtgcactcaacaaggtcaccatcaagaataaatatcctcttccgaggattgatgacctctttgatcaactgaagggagcaaccgtgttctcaaagattgatcttcgatccggctaccatcagctaaggattcgggaggaagatatccccaaaacggcattcacgaccagatatgggttatatgaatgcacagttatgtcgttcggactaacgaatgcaccagccttctttatgaatctgatgaataaagtgttcatggaatatttagacaagtttgtcgtggtcttcattgatgacatcttgatctattccaagatagcagaagaacatgagcagcacctccacctagcgctagagaagcttagagaacatcaattgtatgctaagttcagtaaatgtgaattttggcttttagaagtgaaatttctcggacacgtcatttcagctcaaggagtggcagtggatccaactaacgtagaatcggtgaccaattggaatcaacccaagtcagtgacccaagtccgtagtttccttggacttgcaggctattatcgcagattcatcgaaaacttctcaagaatagcaaggccaatgactcagctactaaagaaagaagagaaattcatatggacctcgcagtgtgaagatgcatttcaattcctcaaaaagaagctagatttccaggtatactgtgatgcctctaaacaaggactagggtgtgtcttaatgcaagaaggacaagtggtagcctatgcttcccgccaacttcgccctcttgagagcaactacccaacgcatgacttggaactagctgctgtggtgcatgctttaaagatctggcggcactatcttatcggtaaccgttgtgagatatatacggaccagaaaagtttgaagtatatattcactcaaccagatctgaatctccgtcagagaagatggttagagctcattaaagactatgatgtgggaatccgctatcatccagggaaagctaacgttgtggctgatgctttgagtcggaagagttactgcaatgctatcatccatgaacagtgtccgcctggattatgccgagagcttgaggccttgaatttgggaatagtcaattatggctacgtagcgaccttagaggcgaaacctctactccttgaccatattcgagaagcccaaaaaggtgattctgatatccaagagatcaagaagaatatgaggaggggaaaagcaattgggttttccgaacatgaacatgggaccatttggtacggggaacgtgtttgtgttcccaatgatcctgagatcaagaagcttattctacaagaggctcactagagtcaatactcaatacaccccggcagtacaaagatgtatcaagacttgaaaatgaaatattggtgggtcagtatgaaacatgaaatagcagaatttgtggcactctgtgatgtatgttaacgggttaaagccgaacaccaaagaccagtcggactgctacaaccactcaagatcctagaatggaagtgggaagagattgggatggatttcatcaccggtcttccaaggacccaacctggatatgactctatttgggttgttatcgaccgcctaaccaaagttgcacatttcatcgtagtcaaaaccacttatcccggcagaagaaatgggaactcgtttgaactttagcaccgcttatcaccctcaaacagatggccagatagagcgggttaatcagattcttgaagatatgctcagggcatgtgctgaattttcgtacaataatagctaccaagccagtcttcaaatggcaccttttgaagccctatatggccggaaatgtcgaacccccactcctttgggaccagaccggagaacgtcaagtttttgggaccgacattataaaagaagtagaggagaaggtcaaggttatccaagcaaatctgaaagttgcccagtctcgacagaaaagctacgcagatacgcgtcgaagggagttagcctttgaagaaggagactttgtatatctcagagttacaccgcttcgtggagtacgtcgtttccacaccaagggaaagttggcaccacgttttgtgggaccatacaaagttcttggtaggagaggggaagttgcttatcaattggaactaccggcatctctgggaggagttcatgatgtattccacgtgtcgcaactcaagaaatgcctccgagtcccgacagagcaagcagatacagaacagattgagattcaggaagacctgacttatgtggagaagcctataaggatcttggaaacatctgaaaggcatacccgaagccgggtgatccgtttttgtaaggttcaatggagcaatcactcagaagaggaagcaaca

SEQ ID NO: 14036 - DNA, 4839 bp, Oryza sativa
  Clone ID: TFbOSC400772j.C1.o71.np
atgtcgaacgaggtgaaccatgtagggaaggctcccatgtttaatggcacaaactactccacttggaaaattaaaatgtctactcacctaaaagctatgagcttccatatttggagtattgtggatgtaggctttgctatcaccgacacacccttgacggagattgatcaccgcaaccttcaactcaatgcccaagccatgaatgccttgttcaactctttgagccaagaggagttcaatagagtgagcaaccttgagaccgcatatgagatttggaacaagttggcggagatccatgagggtacaagtgagtacaaggataccaagcttcatttcctcaagatccaatatgagacattctccatgttgcctcatgagagtgtgaatgacatgtatgggaggcttaatgtcattgtgaatgatctcaaggggcttggggcaaactacaccgatcttgaggttgcccaaaagatgcttagagccctaccggagaagtatgagacccttgtcaccatgctcatcaactgcgacatgtcaagaatgacacccgcaagcctcttggggaagatcaacaccaatgacatgtacaagttgaagaagaaggagatggaggaagcctcaccctccaagaagtgcattgctctccaagccgaagttgaagacaagagcaagagcaaggtgaatgaagtcaatgaggacttggaggaagagatggtccttcttgctagaaagttcaatgatctcttgggaaggagaatggagagaggaagggactccaactcaaataggagaagaaatagaagacccaacaagactctctccaacttgaggtgttttgagtgtggtgagaagggacactttgcttccaagtgcccttccaaggatgatgatggagacaagtcatccaagaagaagagtggaggctacaagctcatgaagaagcttaagaaggaagggaagaagatcgaggctttcatcggggaatgggactcaaatgaggagagctccacctcatccgggtccgaggaagaaggtggtgatgatgcaagctccaagaagaagaagatggccgttgttgccatcaaggaggctccatcactcttcgctccactttgtctcatggcaaagagctcctctaaggtaacatctcttagtgatagtgagagtgatgatgattgtgatgatgtttcctatgatgaacttgtgagtatatttgaggagcttcatgcttatagtgaaaaggagattgtcaagttcaaggccctaaagaaggatcatgcttctttagaggtcttgtatgaggagctaaagacctctcatgagagactcaccatttctcatgagaagcttaactctagctctagctcttgtatttctatttgtgatgcctcacttgttgttgagaacaatgagcttaaggagcaagtggccaagctcaacaagagtttggagaggtgcttcaagggtaagaacactcttgacaaaattttgagtgagcaacggtgcatccttaacaaggagggacttggattcattccaaataagggtaagaaaccttctcaccgtgccactcgttttgtcaagagcaatggtaagtattgctccaagtgccgtgaggttgggcatttggtgaactaccgcaccgatggaagccattgggtgcttgatagtggatgcactcaacatatgactggtgatagggctatgttcaccacatttgaagtaggagggaaagaacaagagaaagtgacttttggagacaatagcaaaggaaaggtaattgggttagttgcaaaaacttcattgggttggctttggcataggaggctagcccatgttggcatgaatcaattgagcaaactttcaaaacgtgatctagttgtggtcttgaaagatgtgaagtttgagaaagataagctttgtagtgcttgtcaagccggcaagcaagttgcatgttctcatcctactaaaagtatcatatctacatctagaccattggagctcttgcatatgattttgtttggcccaccaacctataagagcattggtggtaatagtcattggcttgtgattgttgatgattattctcgctatacttgggagttctttttgcatgataagtctattgttgccgagcttttcaaaaagtttgcaaaaagggcccaaaatgaatttagttgcactcttgtgaaaattagaagtgacaatggttccgagtttaagaataccaatatcgaggactattgtgatgatcttggtattaaacacgaactttccgctacctactcacctcaacaaaatggtgtagtggagagaaaaaatcgtacattgattgagatggcaaggactatgcttaatgaatatggttatgcctcaaatagcaaggcataccgggtctacaacaagaacaaaggtattgtgtaagaaaccgccgatgttcaatttgatgagactaatggctcctaagaagggcacgagaatttggatgatgtaggtgatgaaggcttgatgagagctatgaagaacatgtcaataggagatgtcaagcctattgaagtggaagacaaaccatccacctccactcaagatgagccatctacttccgctacgccaagtcaagctcaagttgaagtggaggaggagaaggcacaagatccacctatgccaccaaggatacacaccgctctttccaaggatcacccaattgaccaagtgttgggtgacattagtaagggtgttcaaactcgatctcgtgtcgcttcgatttgtgaacattacttgtttgtttcttgtcttgagccaaaacatgtagatgaagctctttgtgatccggattggatgaatgccatgcatgaagagctcaacaactttgcaagaaacaaggtgtggactttggttgatagacctagagaccacaatgtcattgggacaaagtgggtctttaggatcaaacaagatgagaacgggttggtggtgagaaacaaagcaaggttggtggcacaaggtttcacacaattgaaggtttggactttggtgaaacttttgcccctgtggcaagacttgaggctattcgcatccttcttacatttgcatcatgctttgatataaaactatttcaaatggatgtgaaaagtgcttttctaaatggtgaaattgccgaacttgtctttgtttaacaacctcccggttttgaagatcctaaaaatcctaaccatgtttataaactctcaaaagttctttatggtttaaaacaagctcctagggcttggtatgaaagattgagagattttcttttgtcaaaggatttcaaaattggaaaagttgacaccacccttttcacaaaaatcattggtgatgatttctttttgtgtcaaatttatgttgatgacatcatattcggttctactaatgaggtattttgcaaggaatttggtgatatgatgtttagggaatttgagatgtccatgattggagagttgagcttcttccttggacttcaaatcaagcaactcaagaatgggacgttcgtgagccaaaccaagtacatcaaggatctactcaagaggtttggcttggaggatgcgaagcccatcaagacacctatggcaaccaacgggcatcttgaccttgatgagggaggtaaaccggtagatttaaagctttatcgttccatgattggtagcttgctttaccttaccgcatctaggccggatatcatgtttagtgtttgcatgtgtgcatggtttcaagccgctcctaaggagtgtcacttagtggccgtgaaaaggattctaagatatttaaagcattcctctactattggcttgtggtacccaaaaggtgaagcacgaggtgttcttcgatttgcaccaatagagggtagtttcttgtgatgcctccccgcactcgccatgatcgtcgtgcacccactccgaatcccgtgagtgagcctgaggaatcgagcggagatgagtacgctcaaaggggatagtgaggaggaaagtggagatgatgtcagtagaagtggagaggatgaggatgaaggaagtgatgatatatgcacattgatccctccatccagtttgttgtgaacatgaggaatccatcacaatataccatcttgaggcaccatgatcagtttttgaggcctcgggacaccccggatccccgttttcacaccgctttccagaagagtgtgtatgagcaagtttatgcagggaaagcttttgcagagcataaggggatttcttggagagacatcaatgtccagagtttgaggggttgcaggatctcttcaagactgttagcattgatcggattgttactctcaagcaagactacaatgaagatttgatccggcagttttatgctacattttatgaagatggagtgcggtacacacatgggaaggttgccggcttgaggaccatccccagtgtggttaacaggattgtgagagctaccatcctccctcgccttggcaacaatgatgacattatgggggcggattggcacgtcatcgatgccatcattcagggccgtcagttcgacattgtgtctcttatgatgcaagagattgccatctccaaggggaccttcacttagggaatctattatgccccttacatcatgaggttgattcaagacaagcttggggctgctgggcaaaatttgaagaagcacaagcagtacaagccccgcctttagcttggagctccccgtgctcctagggcggcgccctcctctcatcctggagctagctcaagctcagcacctcctcctcctcctgggtattatccaaatgctttcatccttccacttcatctttttaccgggagt

SEQ ID NO: 14037 - DNA, 1254 bp, Oryza sativa
  Clone ID: TFbOSC414535j.C1.o20.fg
atggctacagtttctgctgcaaattctgcttctaatatttctgctagcatcaattcaattcctgtgcttactggtgcaaactttaaagaatggaaagagaatgttttaatcgttcttggggttatggatctggaccttgcacttcggaaggaacaacctattctctcagacaaaagtactaaagatgaaaatatggaacatgagagatgggatcgttcaaatcgcatgagtcttatgatcatgaagcgttctataccggaagcttttcgagatagtacatctgaggaggtcactacagctaaggttttccttgaaacacttcagaagagatttgctagaaatgagaaggctgaaactagtactcttttagcaaagctcatctcaatgaggtataagggaaaaggaaacatgagggagtacatcatggagatgtctcatcttgcttcaaaattaaaggcacttaagttagacttatccgaggatttgctcatgcacttaattttgatatcacttcctacacaatttaaccagtttaaggtgagctataattgtcagaaggataaatggacagttaataagctcatctctcactgtgtgcaagaggaagaaaggttaaagcaagatagaatagaaagtgctcatttatctatgacctcaaataacaagaaaagaaagagcaaagaagctgtggatgtccaacctcctttgaagaaaagggaaaataactgtggcgaggagccctgttatttttgcaagaaggaaggacatatgaagaaaaactgcaccaaatatcacgcttggcgtgctaagaaaggggaaacagacgaatacaaggaaattaagtgcccaaagagctacagatgtcttagaactgattcatacagatatttgtgggccattccctacggcttcctggaatggtcaacgatattttatcacgttcatagacgatttctcaagatatggcaactcacaaccatggctacagtttctggcgatggctggtggaagaagcaactggaggcgggactcgggatgggagctcgccggttgacgatggagatgtttggaggctcgactcgaccccgtctcttcagcggttgggaatggcggcgacggctggtggcggaggcggggcttgggatgagagcggcggctggggcgaggctagcagcgggggcagtggccggtggcggaggccagggaggagaggcggtaattcgtactttttctattctaataatacgagagtag

SEQ ID NO: 14038 - DNA, 1659 bp, Oryza sativa
  Clone ID: TFbOSC10744j.C1.o11.fg
atggcaccagcacagccagctccaccagctcaagcaaaggagaccggggcaaagccagggccctgctacaactgtggcgagcatggccactttgctgacaagtgcccaaagccgtgccgtgccgggccaaggtttgttctagcccgcgtcaaccatgcgtctgcagaggaggcacaaacagcaccagaggttgtactagacctagatgtcattcgtgggatggattggctgaccatgttcaagggcgtcattgattgtgtgaatcgcacggtcaccttggtcaatgagaaaggagaaacagtggtgtacaagtctccagcctcacccaagcaaggagcctcattgaatctggttgaggcgaaaagttctgtgaccgcagaggagaagagttcgacgaaattggaagatattcctatcgtctatcaatatccagaagtgttccccgaggacctcactaccatgccacccaagagagagattgagttccggattgattttgcactgggaactgctccaatctacaagaggccgtatagaatggcagccaatgagctagcagaggtgaagaaccaagtcgacgaacagcagcagaaacgatacatccgaccgagtacttcaccttggggtgctccgatcatttttgtggagaagaaggacatgacgaagaggatgttcgtcgattatcgcgcacttaatgaggtcacgatcaagaacaagtatccgttgccgagaattgatgacctattcgatcagttgaaaggagctaaagtgttttccaagatagacctgcgatcaggctatcaccagttgagaatccgggaagaggatattcccaagtcgggagaagagcatgagcaacatcttcgtctggtactcgagaagttgcaagagtaccagctctatgccaagttcagtaagtgtgacttctggttgtcggaagtcaaatttcttggtcacgtcattactgctcaaggagtggcagtggacccatcgaatgtggagccagttacaaagtggaccccacctaagacagtgacccagattcgaagtttccatggacttatgggttattaccgtcggttcattgagaatttctccaggattgccaggcctatgactcagttgcttaagaaagatgagaaatttaagtggacagctgagtgtgataagagttttgaggaactcaagaggaaattagtgtctgctcaagaagaactactgcaacgccttgggtttgaagacatgagcgtcaaattgcaacaagagcttgaacatctcaatttgggaatcgtggaacataggtacgtggctgccctaaaagcacgacccacgctcgtggatcaagtccgagcacctcaggtaaatgatcctgaaatagctgaactgaaaaagaatatgaggttcggaaaagcccgtgatttccatgaggatgagcatggcacaatctggttgggagaaagattttgcgtacctgaagacaaggagttgaaagacctgatactcaccgaggctcatcagacccaatactccattcatcccggcagtaccaagatgtaccaggatctcaaagaaaaattttggtgggccagcatgaggagggaaatggcggagttcgtcgcagtctgtgatgtttgtcagcgagttaaggcagaacattag

SEQ ID NO: 14039 - DNA, 3282 bp, Oryza sativa
  Clone ID: TFbOSC31822j.C1.o2.fg
atgtgggatgcacttgaggccaagttcggagttctcgacgccggcagcgagctgtatgtcatggagcagttctgtgactacaagatgatgctggctaaggaacttgagaacaacaactgtgagttgccggacaagtttgtggcgggtggcattattgccaaattgccaccttcttggttggactttgccacttctctaaagcacaagagacaagagttcagtgtttctgatctcattggctctttgggtgttgaagagaaggcgaggataaaggacaaccggagcaaaaaggttgagggaggttctagtgccaatatggtacaaaagaagaaccctcatgcatcccacaacaacaagaaagtcaagcctgatgtcaaacccaaggctacaaccaattttaagaagaaaggcaagggaaaggcaaagggtgactactttgtgtgtggcaagtctgggcattgggccaaggactgtcctgagcgcaaagacaggaagtctaccaacatggtcattagcgaggagggcggaggaacatcggggtacggtaaattattacctacagttctctctgtttttcattcacctgattggtgggttgatactggtgctaatattcatgtcgggagaggttccttcttgttgatgggaaacgggtcacttgcggctgttcatggtgttggtacggtcgatctgaagtttacttcgggaaaggccgtgcagctgaagaatgtgcagcatgtcccttcaataaagaagaatctagttagcggctctctactgtgtagagaaggttttagacttgtgtttgaatccaataaatgtgtcgtatctaaatatggaacttttattagaaaaggttatgacaacggaggcttgttctgcttttctttggatgacatgtgtaataataataatgttgtgaaccatattagcgagaatgatgagtccaatgtgtggcattcgcgactctgtcatgtaaatttcggttgtatgatgcgcttggctaatatgagtttaattcaaaaattcactttggtcaaaggttccaagtgccatacttgtgttcaatcgaaacaacctcacaaacctcacaaggcatctgaggcaagggatttggcacctctagaacttgttcattccgatttgtgcgaaatgaacggcatgttgactaaagggggaaagaaatatttcatgacactgatagatgattgcactagattttgttatgtttatctattgaaaacaaaggatgaagcattgcattactttaagacctataaagctgaggtagaaaaccaacttgaaaggaaaatcaaacggttgaggtctaatagaggtggggagtatttctccaatgagtttacatccttttgcgaagagtttggaattattcatgagaggacgcctccctattcaccccaatcaaatggggtagccaaaagaaataactgtactctaactgagatggtgaatgccatgttagacactgcgggacatttcaaggaatggtggggtgaggcagttttgattgcgtgtcatgtcctgaataaaattccaatgaagcataaggaagtaaatgtacctatagccaaaaagcataaacttggaccgaatactgttgattgtgtgttccttggttatgctattcacagcgtgggttatagattcttaatagtaaactctggagtacccgacatgcgtgttggtacaattattgagtccagagatgctacattctttgagaatgaatttcccatgaaaaatacacctagcacttctagtcaagaaactgtcataccccatgagcactttgcaccgatagaacacaatgatcaaacgcttgagggaaatcctgaggaggataagattgtagatactcgtaagagtaagagacaaagggttgcaaaatcctttggagatgactacattgtataccttgtggatgacactccaagaaccatagaagaggcatattcatctcctgacgctgactactggaaggaagcagtacgcagtgagatggactcgattatgtccaatggtacttgggaagtctttgagcgtccatatgggtgcaagcctgtaggatgcaaatgggttttcaagaaaaagcttaggcctgatggtacaattgaaaagtacaaggcaaggcttgtggccaagggttatacccaaaaagaaggcgaggattttttcgacacctactcactagttgcccgtttgaccacgattcgagtactacttgctctggcagcctctcatggtcttctcgtccatcagatggacgttaagatagctttcctaaacggagagctagaggaggagatctatatggatcaaccagatgggtatgtactagaaggtcaggagggaatggtgtgtaaactgttgaaatccttgtatggccttaagcaagcacctaagcaaaggcatgagaagtttgacaccacacttacatttgcaggctttgttgtgaacgaagctgacaaatgtgtgtactatcgctatggtgggggagaaggagtgatcttgtgcttatatgtcgatgacatattgatctttgggaccagcctcaatgtgattgaggaggtcaaggactttctgtccaagagttttgaaatgaaggatttgggagaggctgatgttattcttaacattaagctactgagaggagatgagggtgggattacacttgtgcaatcccactatgtggacaaggctctaaaaagagtaatgcgctatctaaagggcactgagctatgggcactgagctatggaattcactataccgggtacccaaaagtactagaagggtatagtgactcaaactggatatctgatgctaatgagataaaagccacaagtggatatgtgttcacacttggaggtggcgctgtttcctggaagtcttgcaagaagaccatcttaacgaggtcaacaatggaagcagaacttacagcactagatactgcgacagttgaggccgaatggcttcgtgaactcctgatggatttgccggtggttgaaaaaccagtgccagctatcctaataaactgtgacaatcaaacagtgattattaaagtgaacagttcaaaggataacatgaagtcatctaggcatatcaaaagaagactgaaatctgtcagaaagcagaaaaactccggagtgatagcattggactatgtccaaacggctaaaaatctggcagatcagtttactaaggggctaccacgtaatgtgatagacagtgcatcgagggaaatgggcttgatacccacctaa

SEQ ID NO: 14040 - DNA, 4950 bp, Oryza sativa
  Clone ID: TFbOSC400722j.C1.o47.fg
atgaaggctttggtgtctagctcgtgcctgccgtcaagcgcctgtggtagtcgccctagtcttccgctgtttctcgtttgtctctgtgtgtgctgggccttcgctgcccatatggccggcagcgtcagccgtcgtggtttggacatgactggcttcgtcttggagctacggggcatgtgcgttgtcctggggtatccgcctggagtggactaccaggccaggccgcttccggagcaggagggtgacgatgcagagccccacgctgcgtgggaggttactgcagtgatcctcactggctctcccgagcggacttcgctggcagtcaccgcgggtggagattccttccccgccgcttgccagaacgccgctctcctcgccatcggcactcttcaccagcgctacccggacgagttgcagcactcgccctaccgctaccaccctcgctgcggaggagcccgcgacttcgccaccttccgggatgctagctcggaggatgacgctaccatcgtgcacctggcgcgcatggtggaggcgtacgacgcggctcgtatcgacttccaacagatggtgcgccgtgggatggtcgagaacaacatgaagatcctggagctgcgtcaggagaatctgcagctgaagaaggacctacacgcgttggaggcgcagctgtgtcagcttaaggtcgcccagggtgagatggtgatgaccaggagaagtgctaataccggtgatggcaaccaacctgagggcagcaaccacaacaaccatggcagcccacccccacctcctcctccgcctccaccaccaccaccagataccaacgctattctcacccaaatcctcgcccagcaggccaacatgatgactgctttcctccaccacctccaaaatccgccacaacataatgctccaccaccacctccccaacactcaaaactcgctgagttcctccgcatccgcccacctaccttctccagctccaacaaccccgtggatgcgttggattggttgcatgccgtggggaaaaagctagacactgtgcagtgcagcgatgaggagaaagtcgtcttcgccgcccaccagctgcaggggcccgcatctctatggtgggaccatttgcaggctacgcagccagagaggcagcctattacttgggcccgtttcaccgccgatttccggaggacccatgtgcccgccggagtcgtggcccttaagaaaagagaattccgagagttgaagcaaggcaaccgctccgatgtgcgggaagatgaggagaagcaagagaagttcttggcaggaatggaccctgagctgtccgtccgtctagtctccggggactatccggatttccaacgtctggtggacaagagcatccgcttggaagccaagcacaaggaactggagtcgcacaagcgccgcttggcgaatttccgcaatcaacagggtgctaaccaaagggtccgctacaccaatccctatccagggggatcctcctcgcagcagcaacaacagcagcagcaacctcgctccgcgcctcgacctcaattcgtggtgcgcgtcccacagccgcagcagcagcagaatcaacaagggactcgtgcgccccgtcctcctacgccaactgtgcagcctggtcaaggccgcagggacgctcaaggtccgcagcgtctgtgcttcaactgctacgagcccgggcactttgcggataaatgcccaaagccgaggcgccagcaaggcaaagcgcctccccgctccaacaatggtggtaacgatgtcattcggggtcgtgtgaaccacgtgacggccgagaacgtgctgacaactccagacgtcatcgttggtacgttcctcattcattccatccctgctaccattttgttcgactctggagcttcccactcgtttatatctgtgccattcgtggggagaaatcagttgggggtagaaaggcttaggaaccctctgctcatcaccacccctggagtggttatgacagcaaagtattatagccctgccgtccctatagaaattcaggggattccttttccctcggatcttattctgctagacaccaagaacttggatgtgatccttgggatgaattggttggctcaattccaaggagtagtggattgcgcgagacgcactgtcactctgtaccgagggccggaacaaccggttgttttctttgcgcccccaacctctgtcagtagttcagaacttcatcagataggactgtcagaaatccccatcgtcagagagttcggagacgtgtttccggaagaactactcggtatgccacccaagcgagagattgagttccggatagatcttgctccaggaaccactcctctgtacaagcgaccctaccgtatggcagcaaatgaactggctgaagtcaagaaacagttggaagagttgaaaggaaaggggtatatacgtccgagtacttcccccaggggtgctcctgtgatttttgtggagaagaaagacaagacgaagaggatgtgcgttgactacagaactctcaatgaagtcaccatcaaaaacaagtaccctcttccccggatcgatgatctgttcgatcagcttaaaggtgccactgtattctccaagattgatcttcgttccggatatcaccaattacgtattcgtgaagaagatattccgaagaccgcattcaccacacgatacggactcaattgtgagttctggttgtccgaagtcaaattcttagggcacatgatatctgctaaaggagctgctgtggaccccgaaacagtgaccgccgtcactgattggaagcaacccaagaccgtcactcaaattcgcagtttcttaggtttggcaggatactatcggaggttcatcgagaacttctcccaaatcgctcgacccatgacacagttgttgaagaaagaagagaaatttgtgtggagcccgcaatgcgagaaggcgtttcaaactctcaaggaaatgctggtttcctcgccagtgttagtcttgccagatactcgtaaggatttcatggtgtattgtgacgcttcgcgccaaggactgaggtgcgtgctcatgcaggaaggacatgtggtagcctatgcctcacgccagttacggccccatgaaggcaactaccctacccatgatttggagttagccgcggtggttcatgctctaaaaatctggcggcactatctcattgggaatcgctgtgaaatatatactgatcataagagtttgaaatacatcttcacccagtcggatctgaatcttcggcagaggagatggttagaactcatcaaggattatgatgtgggaattcactatcatcctggtagggctaacgtggttgccaacgctctaagccgaaaaagccattgcaacactcttaacatccgtggcattccacccgaacttaatcaacagatggcagccctgaaactaagcatagttagccgtggattcttggctgcgttggaagccaagcctaccttgctcgatcaaatccgcgaggctcagaagaatgatccggacatgcatggactcctcaagaatatgaaacagggtaaagccgctggtttcacagaggatgaacatggaaccctatggaacggaaatcgggtatgcgttccagataacagagaacttaaacagctgatacttcaggaagcccacgaaagtccttattccatccaccctggcagtacgaagatgtacttagacttgaaggagaaatactggtgggtcagtatgaagcgggaaattgcagagttcgtggccctttgtgatgtgtgccagcgtgtcaaggcagagcaccaacgaccggccggacttctccaacctctccaagtaccagaatggaaatgggatgaaattgggatggatttcatcaccggacttccaaaaacccaaggtggatatgattctatatgggtagttgtggatcggttaaccaaggtagctcgatttattcctgtgaagaccacctatggagggaacaaattagccgagctctacttcgctaggatcgtgagtctccatggcgttcccaagaaaatcgtatctgattggggaagccaattcacctctcacttttggaagaagctccaagaagagctgggtacccgattaaatttcagcaccgcatatcacccgcagacggatggacagaccgagtgtctaaatcagatcctagaagatatgcttcgcgcatgtgtcctagatttcgggaagacctgggataagagtctcccctacgccgagttctcctacaataacagctaccaagccagtatacaaatggcaccttatgaagcgttgtatgggcgcaaatgccggacaccgctcttgtgggaccaagttggggaaagccaagtgttcgggactgatatcttgagagaagctgaagcgaaggtcagaaccattcgggataatcttaaggtggcacagtcccggcagaaaagttatgcatataaccgtcgccgtgacctggaattcgcaatggatgactttgtgtatcttcgggtcacgccattgcgaggtgtacacaggtttcagacaaaagggaagctcgcacctcggttcgtgggtcctttccgtatcattgctcggcgcggagaagtcgcttaccagctggagctgcccgcctctttgggcaacgtgcatgatgtgttccatgtgtcgcaactcaagaaatgccttcgagtgccatccgagcaggccgactcagagcaaattgaagttcgcgaagacttgacctacgtggagaggccagtgaaaatcctggacaccatggaacgcaggaccaggaaccgggtaatccgtttttgcaaggtccagtggagcaaccacgccgaggaagaagctacttgggagcgtgaagacgagctgaaggcagcccatcccgatctcttcgccagttcttccgaatctcggggtcgagattccgtttaa

SEQ ID NO: 14041 - DNA, 6840 bp, Oryza sativa
  Clone ID: TFbOSC401013j.C1.o3.fg
atggtgaacaccgagggtactgaagaacaaagaaaggctgaggaggatgctgcactgcaggctgggaagaaggaaagtgtggcaggagaatcttcttttttcactaaaggtatgatgggtcttaggagtgggataggaccatctgagataaaattggaagtaatgccaaatgaagtgaggttggaggggaccaaaaactacttgagctggtctagaagggcaaggttgatgctgagagcaaaaggtgtagaacattatttggaggaaacttgtgttgaacctattgataaatctagtgtggaatggaagatgtggaatgccactaattctacagtggtagcatggctgatgacttcggtgtccccatctattgctaggatgatagaagctattcagaatgcaacaattatatggaagacattgagcaacatgtattcaggagagggaaatgttatgatgatggttgaggctcaagacaaggtagataatctgaagcaagaagggagaacagttcaagagtatgccagcgagttgcaacatttatgggcagatcttgatcattataatcccctacaattaaagcatgatgatgatattgtgattggaaataaatggctgcaaaggagaagagtcattcattttttaaaggggttgaacaaggagtttgaggatagaagagcagctatgtttcaccaagctacattacctaatatggaggaagctatttcagccatggttcaggaggagatgaggcagaaagtgatgaaaggaagtaatcctgtgaggtctgcatacatcacaattaatgacagggagtgttataattgtgggttaaaggggcatgtgagctacaattgtccttctcctaggaacaataatggtcggggtgtagctcgtggaggagcacgtggtggctatggtggcttcaatgggagccgtggtggctatggtggctatgtaggagaccgaggtggccgaggaggtgaacgtggaggccgtggtggaagtcgaggtagaggcctaggtggtcctagggccaatgttgtcatgggggagagctcatctatcactctaacaggtgaacaagctgcacaatgggaggaatggcaaaagaataagggccccgtggactccaatcaacaaaattctgctaaagcaacaaccagccacttcggtaactttgccaactacgcccacacgggcgaaggtactcaggcacatgcacttgcatccacatatagacatcatgtagactggataatagattcaggtgcatcaaaacatgtcacaggcttgcctaataatttctcctcatactcccctattgctccctctgaaactatccaaattgctgatggttcatctcaactcattcatggtatagggtcagtagagtgcactccatctattagcttgtcatctgttttgcatgtcccttcctttctagtcaacctcctctctgttagttctatcattgatcaattcaagtgcatcgttatatttgatgagaattcatgtctcttccaggagaaggggactgggaggaggattgggactggagtcaggcgtaatgggctgtggtacatcaatcaagaggagatgggattggctgtagtagtgggagatactgagaaggagattattttgcttcattgtcaattaggacatccatctttcgagagtttgagtaagctgtatcctgacctctttaccaaagtggacaagagtagacttgtttgtgatgcttgtgagtttggcaaacatacacggtctacatatgctggaattggtcttcgtagttgtgaaccttttatattaatacattctgatgtttggggaccatgcccagttacttctgtgagtggattcaaatggtttgttacctttattgattgttatactcgtatgacttggatttacatgcttagacataagaatgaggtccttcgttgctttcaagacttccacaaattggttaccaatcagtttgatgcaagggttcggattattcgaattgacaatgggacggagtatattaatagtgagtttgtgtcatatgtctcagatcatggaattattcatcaaaccacttgtcctggagccccccctcaaaatggtgtagctgagaggaagaatcggcatttgctagaggtggctcggtcattaatgtttcaaatgaacgtacctaagtatctgtggagtgaggcagtgatgacagccgcataccttatcaaccgcatgccatccaggatacttggtatgaaatcaccagctgaacttttacttgggaagcgagaatttaaagttcccccaaaggtatttggttgtgtttgttttgtgagagatcatcgaccttttgttggcaagttggatcctcatgcagtaaaatgtgtctttgttggctatgcatctaaccagaaaggttataagtgttgggaccctattgggaagaggttatttgttagtatggatgtaacatttcgagagtttgaaccttattacaggagtcgaggagaccttgatcaatttctagaggagttctcaactgtcatcgagatcgacagtcgagtgggggagatagttgaggttgatgcacataagcaaggtgatgaggatgtggttattgggtcaattccgagttttgttggtgatactattgagaaggttgtggacattggtgagaaggtagtagacattagttgtgacaaggatgagggggtagttgtcgggacaatcccatgtcctctggagcgtgtggaagtacaacaaactgaaatgagagtatatcaaagaaggaacaagaaccaagttgataaggtgacagggaaggagcaagtgcaccagaggagccaaattcagaatcagggggagagaagtggtgagcctatgcaagagcaagacaaggagtcacaacagctgcaacagtttgagtacccagtcccagattcctcctctagcctctctccaacaagttcctccctccttgagacaagtgtgcctattccaaaggactggagatgtgcaaaacaagatccaagatggaaggatgcaatgaaggaggagttgcgtgcccttgaaaagaataagacatgggaacttgtgaaactaccaatggggaaaagagcagtgggatgtaaatgggtatttacagtgaagcaaacccctgaagggaaagtggatagatataaagcaagattagttgcaaaaggttatagtcaaacatatggaattgactatgatgaaacatttgcacctgtggctaagatgagtacgatgtcaagaatgcttttctacatggtgatttacaagaggaggtttaggcgtgtattgtgcaatatgggatattcacaatgtaatggagatcacacagttttctatagacatagggggacacacatcactatcttggctgtttatgttgatgatatagtgatcactggagatgatgtagaagagatcaaatgcttaaagcagcgattaggagaggcctttgaggtgaaggatcttggacctcttcgatactttcttgggattgaggttgctcgatcatcaaaggggatagttctctctcaaagaaagtatgtccttgatttgttaacagaaaccggaatgcttggatgtcgtacaagtgctactcccattgataggaatcaccaattgagtgcacagtcaggtgatccagttgatagggaaacttatcagaggttggttggacgtttgatatatctatgccacactagaccagatatctcttatgcggtgagtgtggttagtaggtatatgcatgatcctagaacaactcatctagaggtggttcataggatcttgaggtacttgaaaggaactcctggtaaggggttgtggtttagaaagaaccaacacttggatgtggaaggatattgtgatgctgattgggcaagcagtgtggatgatagaagatctacatcaggatattgtgtatttgtgggtggcaatgttgtctgttggcgaagcaagaagcaggcggtagtggctcgatctaccgcggaagctgagtatagagccatggcattgagtttaagtgagatgttgtgggtgaagaatctattgttggagctacggttgttcagaaataataccgtggtgcttcattgtgacaacaaatctgctatcaacattgcaaacaatccagttcaacatgaccgcaccaaacatatcgaaattgataggttcttcatcaaagagaagatcgatagtggggctcttagactacaatacattaaatcttctgagcagctagctgattgtttaaccaagggattaggtcctagtgagagagatgagtgcatgattactgattatgccatcacaaagatatctaatatgtatagctcattaactgaagataagctcatatctagcttcttcacttgcgatgattctccaagtgagagttctattgggtcaccactaaagctttgtcagatttgtgaagcaaccaaggccaaccgtaggacgcagaagaagggtgatttcttcaatccccggtgtaatagctatctgaagccaactgttgagagaacttacattgatcttgccagaataacatattacaagcttgagtctcttcacaccaatgcccgagtggtttttcagaatgtggtcaactttgctagcgaaagcgcgtgctttaccaccctttcgacgtgcatcttgttccaagctcagtgtttcctcagtgaagatgagggcggctccggaccgttcaggaaaccgctttgcattgccctccaggctccaggcctcagccagtacggcccaactggagaagaggcagcccatgagacggacagcaacaaggcccagaagtcaacgtgtaggtccgatttgctcaccggagagatgcctcgtgtccaaacatcaaggttgggtaaaaatcccattgaagttgattctgatggaggtgaagattttcatgttgattatgaagttggtaatgatgttgatgaaggtcctgaacatggtgaaattgatggtttactctctgttgtgctcaggaaaatgattgttcaagaagtgaaaaagaatttggttgacacttcttctgtcaattttcacaatcccattgataagaaatctaaagttcattcgaagactgagccctcatatagcagattctcaacaaaatatttctcaacagttctatcttctttatctcctgatcagaagcgtattattggtgactatggttttaattctttgctgatgtttgacaatgcttatgtcccaaacaaatttgcttcttggattgcaaatcatgttgatgtgaagtcttctcaaattgttttgaaagataaagtcattgcaattaataaagaatgtgttcatcatattttgggtctgcctattggtggtatggagttcccaactgattgtgatgctggaaagtcttttattctttcaaagtttggcaagagcgctcttccatctgtgagattctttggtgatatgttcatccgaaaggaaactctctctgatgatgaagttattacttcatttttgattgttgcaatggcttgttttctttgtccaaactcttctttggtccctagcaccaagtatttgactgtgtttgagaatgttgatgagcttcggtcatatgattggtcaaaatttgtgtacgaatggatgatgacttccatcaaaaagatccaaaagtttaataccttgggtggatgctggtttctctgggcagtgctttatctggattatgttgagtttggtgacaagaatgttcctattggttttcctagaatttctcactggaagaataatatgattactttgtattctgaccttgacaaagttgatgaagaaaactttggccttaggcccattaaggatttcaatgatacaacttatttcaaggttgtaccccctgaaaatagaattaatacattcagagataaattggagtctgctattggtaccatgttacctgctttcattaaggagaaaatttattcaatggttgttagtcattgttctgccaatcacattgttgacagtgagtcttgtgaagatattgctatcagcattatgctcttgctatgtgaacatgctggttctagagatggtggtgatcctgatgaaaacttaatttttgatgatatcaaccctgggtttcagcctaactatgcaattgatgttgaaaatgaaatcccttgtgatgctcataacaatggaagtaccaataaatctgttgctagtaaagctaatgaaacaagttttcgccatacaccttctcatgataaggaattgggggtaaatgatgattctgttattgtctctaaatctgctgttagattttccctttcaccaaactttaaaaaagatcaaggcttactaacccctgaagttggatatgctaataactccaattcacgatttgaacattctcgatctgcttcaggtcctactgtatctgctgttgctgctgttaggaatgttgcaaataaaattaaatcaagattatctcaactcaacaatgatgacaaaagaggaccattgttccctgatttaattgattcttgtgaagatgaagctgttggttatgctaagtcactttcatgtcaaaaggaatatcttaaccctcgatatgtcacttcctcttcatcacagcctggtatatcttttcactgtcttgacaattcacctgttcaagtaattggtataaataataatgaaggaacaagcagaactcattgtattcagaatgtgaagaagaggcgttttgatgatgttactaattctcctgatgtggaatatcttggtcattctacatttcctgattgctgcaag

SEQ ID NO: 14042 - DNA, 4953 bp, Oryza sativa
  Clone ID: TFbOSC401018j.C1.o18.gm
atggttatgccgatggtgacgaccaggagaaatgctgccaccgatgatggcaaccaacctgagggcagcaaccacaacaaccatggcagcccacctccacctcctcctccgcctccaccaccaccaccagataccaacgccattctcacccaaatcctcgcccagcaggccaacatgatgactgctttcctccaccacctccaaaatccgccacaacataatgctccaccaccacccccacaacactctaaactcgccgagttcctccgcatccgcccacctaccttctctaactccaacaaccccgtggatgcgttggattggttgcatgcagtggggaaaaagcaagacactgtgcagtgcagcgatgaggagaaagtcatcttcgccgcccaccagctgcaggggcccgcatctctatggtgggaccatttccaggctacgcagccagagggacagcctattacttgggctcgcttcaccgccgctttccggagaacccatgtgcccgccggagtcgtggcccttaagaaaagagaattccgagagttgaagcaaggcaaccactccgtgatggagtatttgcatgagttcaacaacctggcccgttacgccccggaggatgtgcgggaagatgaggagaagcaagagaagttcttggcaggaatggaccctgagctgtccgtccgtctagtctccggggactatccggatttccaacgtctggtggacaagagcatccgcttggaagccaagcacaaggaactggagtcgcacaagcgccgcttggcgaatttccgcaatcaacagggtgctaaccaaagggtccactacaccaatccctatccagggggatcctcctcgcagcagcaacaacaacagcagcaacctcgctccgcgcctcgacctcaattcgtggtgcgcgtcccacagccgcagcagcagcagaatcaacaagggactcgtgcgccccgtcctcctacgctagccgtgcagcctggtcaaggccgcagggacgctcaaggtcagcagcgtctgtgcttcaactgctacgagcccgggcactttgcggataaatgcccgaagccgaggcgccagcaaggccaagcgcctccccgctccaacaacggtggtaaggatgtcattcggggtcgtgtgaaccacgtgacggccgaggacgtgctgacaactccagacgtcatcgttggtacgttcctcattcattccatccctgctaccattttgtttgactctggagcttcccactcgtttatatctgtgccattcgtggggagaaatcagttgagggtagaaaggcttaggaaccctctgctcatcaccacccctggaggggttatgacagcaaagtattatagccctgccgtccctatagaaattcaggggattccttttccctcggatctgattctgctagacaccaagaacttggatgtgatccttgggatgaattggttggctcaattccaaggagtagtgataggactgtcagaaatccccatcgtcagagagttcggcgacgtgtttccggaagaactactcggtatgctgcccaagcgagagattgagttccggatagatcttgctccaggaaccactccgctgtacaagcgaccctaccgtatggcagcaaatgaactggccgaagtcaagaaacagttggaagagttgaaagaaaaggggtatatacgtccgagtacttccccctggggtgctcctgtgatttttgtggagaagaaagacaagacgaagaggatgtgcattgactacagagctctcaatgaagtcaccatcaaaaacaagtaccctcttccccggatcgatgatctgttcgatcagcttaaaggtgccacggtattctccaagatcgatcttcgttccggatatcaccaattacgcattcgtgaagaagatattcctaagaccgcattcaccacgcgatacggactgtatgaattcacggtgatgtcgttcggtttaaccaatgcacctgccttcttcatgaacttaatgaacaaagtgttcatggaatacttggataagtttgttgtggttttcattgatgacattctgatatactcacaatcagaggaagaccatcagcaccatctccgtctggtgttgggaaagttgcgggaacatcaattgtatgccaaacttagcaagtgtgagttctggttgtccgaagtcacattcttagggcacgtgatatctgctaaaggagttgctgtggaccccgaaacagtgaccgccgtcactgattggaagcaacccaagacagtcactcaagttcgcagtttcttaggtttggcaggatactaccggaggtttatcgagaacttctccaaaatcgctcgacccatgacacagttgttgaagaaagaagagaaatttgtgtggagcccgcaatgcgagaaggcgttcaaaactctcgaagaaaagctggttgcctcgccagtcttaatcttgccggatactcgcaaggatttcatggtgtattgtgacgcttcgcgccaaggattggggtgcgtgctcatgcaggacggtcatgtggtggcctatgcctcacgccagctacggcctcatgaaggcaactaccctacccatgatttggagttagccgcggtggttcatgctctaaaaatctggcggcactatctcattgggaatcgctgtgaaatatatactgatcataagagtttgaaatacatcttcactcagtcggacctgaatcttcggcagaggagattgttagaactcatcaaggattatgatgtgggaattcactatcatcttggtaaggccaacgtggttgccgacgctctaagtcgaaaaagccattgcaacactcttaacgtctgtggcattccacccgaacctaaccaacagatggaagccctgaacctaagcatagttagtcgtggattcttggctacgctggaagccaagcctaccttgctcgatcaaatccgcgaggctcagaagaatgatccggacatgcatggactcctcaagaatatgaaacagggtaaagccgctagtttcacagaggatgaacacggaaccctatggaacggaaaccgggagaaatattggtgggttagtatgaagcgggaaattgcagagttcgtggccctctgtgatgtgtgccagtgtgtcaaggcagagcaccaacgaccggccggacttctccaacctctccaagtaccagaatggaaatgggatgaaattgggatggattttatcaccggacttccaaaaacccaaggcggacatgattctatatgggtagtcgtggatcgactaaccaaggtagcacggttcattcccgtaaagaccacctatggagggaacaaactagctgaactctacttcgctaggatcgtaagtctgcatggcgtccccaagaaaattgtatctgatcggggaagccagttcacctctcacttttggaagaagctccaagaagagctgggtacccgattaaatttcagcaccgcgtatcacccgcagacagatgggcagaccgagcgtctaaatcagatcctagaagatatgctttgcgcatgtgtcctagatttcgggaagacctgggataagagtctcccctatgccgagttctcctacaataacagttatcaagccagcatacaaatggcaccttatgaagcgttgtatgggcgcaaatgccggacaccgctcttgtgggaccaagttggggaaagccaagtgttcgggactgatatcctgagagaagctgaagctaaagtcagaaccatttgggataatctaaaggtggcacagtcccggcagaaaagttatgaaaataaccgtcgccgtgacctggaattcgcagtgggtgactttgtgtatcttcgggtcacgcccttgcggggtgtgcacaggtttcagacaaaggagaagctcgcacctcggtatgtgggtcctttccgtatcattgctcggcgtggagaagtcgcttaccagttggagctgcccgcctccttgggcaacgtgcacgatgtgttccatgtgtcgcaactcaagaaatgtcttcgagtgccatccgaacaggccgactcagaccaaattgaagtttgcgaagacttgacctacgtggagaggccagtaaaaatcctggacaccatggagcgcaggaccaggaaccgggtaatccgtttttgcaaggtccagtggagcaaccacgccgaagaagaagctacctgggagcgcgaagacgagctgaaggcagcccatcccgatctcttcgccaggccgccgccggcgaccataggggcgcgggcgcgccgcctcccgtcggccgtgtcggcgaggccgccttcgggcgcgccccgcggctgccaggtggggcccggccgtcagccgcccgcgccctcggcacctcggccatttaaggaccggtcttcgggcctctgttgcaaagcactaccgtacttccacatgtctagtggggcaaatgaaggctacacgagctgcggcccggtagtcgagatgtcatggcacagggccggtgtcctgctgctaggggctcagtcctgcctgcctgtcccgggggttccggccgtaggtgggattgggtggaccatcgtggctgctacaaacttggttgaatctggtagtcatgaaagctgtcaatcggccatccgtgaaaggagccgaatttccaagcttcgccgcatcctcgccgacctcgtccacccctccgtttcggtcgccgaccgccggagcaccgtcgaccccgtccacccgagccgcgccgccgccttcctccgctccggtcgccgtttccgtcgtcgccatcgacccggggggcgcgggcgcgccgcctcccgccgctgcgccggcgtggtcgccttcgggcgcaccgagcgcgtgccgcgtgggggcccgctgtcagccggcccgcgcccttag

SEQ ID NO: 14043 - DNA, 1992 bp, Oryza sativa
  Clone ID: TFbOSC401145j.C1.o2.fg
atgactggcttcgtcttggagctgcggggcatgtgcgtggtcttggggtatccacatggagtggattaccaggccaggccgctcccggagcaggagggtgaggatgcagagcctcacgctggttgggaggtcactgcagtgattctctccggctctcccgagcggacttcgctggcagtcaccgcgggtggggattccttccccgccgcttgccagaacgccgctctcctcgccatcggcacccttcaccagcgctacccggacgagttgcagcactcgccctaccgctaccaccctcgtcgcggaggagcccgcgactacgccaccttccgagacgccagctcggaggatgacgctaccgtcgtgcatctggcacgcatggtggaggcgtacgacgcggctcgtatcgacttccatcagatggtgcgccgtggcatggtggagaacaacatgaagatcctggagctgcgccaagagaatctgcagctcaagaaggacctcgacgcgttggaggcgcagctgcatcagctcaagatcgcccagggagaggacagccgtcccaagcgtcgccgcgtctgccgcagccagaagatcaccgcccgcaagagcacctccaggcctgagcttgtccgtcagtccctggcgtggacctgcttcgtcgagacccctcgtgccgagcctgcgcccgtggttccccaggagggggaagcctccggcgttggtagctcggaggctccttctctgtttgctggttctgggtggggttttcagatggtgacgaccaggagaaatgttaacaccggtgaaggcaaccaacccgaaggcagcaaccccaaccaccaaggcaatccacctccgccaccaccaccagacaccaacgccattctcacccaaatcctcgcccagcaagctaacctgatgaatgctttcctccaccaccttcaaaacccgccacaacagaatgctcccccaccacctccccaacactctaaactcgccgagttcctccgcatccgcccacctaccttctctagctccaacaaccccgtggatgctttggattggttgcatgccgtggggaagaagctagacacggtgcagtgcagtgatgaggagaaagtcaccttcgccgcccatcagctgcaggggcccgcatctctatggtgggaccatttccaggccacgcagccagaagggcaacctattacttggactcgcttcaccgccgctttccggagaacccatgtgcccgctggagtcgtggctcttaagaaaagggaatttcgggagttgaagcaaggcaaccgctccgtgatggagtatttgcatgagttcaacaatctagcccgttatgccccggaggatgtgcgggaagatgaggagaagcaagagaagttcttggcaggaatggaccccgagctgtctgttcgtctagtctctggggactatcctgattttcaacgactggtggacaagagcatccgcttggaagccaagcacaaggagctggaatcgcacaagcgccgcttggcgaatttccgcaatcaacagggtgctaaccagagggtccgctacaccaatccctacccagggggatcctcctcgcagcagcagcagcagcagcaacctcgcccagcgccccgacctcaattcgtggtgcgcgtcccacagcagcaacagcagcagaatcagcaggggactcgtgcgccccgtcctcctacgccaactgtgcagcctgttcaaggtcgcagggacgcttcaggtccgcagcgtctgtgcttcaactgcttcgagcccgggcactttgcggataaatgcccagagccaaggcgtcagcaaggccaagcgcctccccgctccaacaacggcgggaaggatgtcattcggggtcgtgtgaatcacgtgacggccgaggacgtgctgacaactccagacgtcatcgttggacggtcatgtggtagcctatgcctcacgccagctacgacctcatga

SEQ ID NO: 14044 - DNA, 2319 bp, Oryza sativa
  Clone ID: TFbOSC401769j.C1.o8.gm
atggcgcgcctggagctggagccgccggaggtggtgcgccaggagctggagccgcggagggccattctgcctggagctggagccgccggaggtggtgcgccaggagctggagccggtgccgtgaacaacaacatcaacggaggcaattctgcctcacaatccagcggagggccattctcgggtgtactcgctgacaacatagtggacgtgtacatgcacatgccttccgggaaggacatgtgggatgcacttgaggccaagttcggagtttctgacgccggcagtgagctgtatgtcatggagcagttctatgactacaagatagtcgatgatcgttctgtagtagaacaagctcatgagattcagatgctggctaacgaacttgagaacaacaactgtgagttgccggacaagtttgtggcgagtggcattattgccaaattgccaccttcttggtcggactttgccacttctgtaaagcacaagagacaagagttcagtgtttctgatctcattggctctatgggtgttgaggagaaggcgatggcaaaggatgtccggggcaaaaaggttgagggaggttctagtgccaatatggtacagaagaagaaccctcatgcatcccacaacaacaagaaagtcaagcctaatgtcaaacccaaggctgcaaccaactttaagaagaaaggcaagggaaaggcaaagggagactactttgtgtgtggcaagtctgggcattgggccaaggactgtcctgagcgcaaagacaggaagtctgccaacatggtcattagcgagggcggaggaacatcgggagatgctacattctttgagaatgaatttcccatgaaacatacacctagcacctctagtcaagaaactgtcatgccccatgagcactttgcaccgatagaacacaatgatcaaatgcctgaggaaaatcctgaggaggacaacattgtagatactcgtaagagtaagagacaaagggttgcaaaatcctttggagatgactacattgtatacctcgtggatgacactccaagaaccatagaagaggcatattcatctcctgacgctgactactggaaggaagcagtacgcagtgagatggactcgattatgtctaatggtacttgggaagtcgttgagcgtccatatgggtgcaagcccgtaggatgcaaatgggttttcaagaaaaagcttaggcctaatggtacaattgaaaagtacaaggcaaggcttgtggccaagggttatacccaaaaggaaggcgaggatttctttgacacatactcaccagttgctcgcttgaccacgattcgagtactacttgctctggcagcctctcatggtcttctcgtccatcagatggacgttaagacagctttcctaaacggagagctagaggaggagatctatatggatcaaccagacgggtatgtactagaaggctttgtcgtgaacgaagctgacaaatgtgtgtactatcgctatggtgggggagaaggagtgatcttgtgcttatatgtcgatgacatattgatctttgggaccagcctcaatgtgattgaggaggtcaaggactatctgtccaagagttttgaaatgaaggatttgggagaggctgatgttattcttaacatcaaactacaaagagaagatgagggtgggattacacttgtgcaatcccactatgtggacaaggttttgagtcgctttggatatagtgactgcaagctagctcctactccttatgatcccagcgtgctattaaggaaaaaccgaagaatagcaagggatcaactgagatactctcaaatcattggttcattgatgtacttggctagtgcaacgaggcctgacatctcatttgctgtaagcaagctgagccggtttgtctcaaatccgggagatgatcattggcaggctctggaaagagtaatgcgctatctaaagggcactatgagctatggaattcactataccggatatccaaaagtactagaagggtatagtgactcaaactggatatctgatgctgatgagataaaagccacaagtggatatgtgttcacacttggaggtggcgctgttttctggaagtcttgcaagcagaccatcttaacgaggtcaacaatggaagcagaacttacagcactagatactgcgacagttgaggccgagtggcttcgtgaactcctgatggatttgccggatggctcatgccttaatgtgatccgagtggcttttccaagcagagatgttgacctacagaacatctcggaaggaacacacctatatgagttcgactgctag

SEQ ID NO: 14045 - DNA, 6189 bp, Oryza sativa
  Clone ID: TFbOSC403382j.C1.o1.fg
atgtattcagaagagggaaatgttatgatgatggttgaggctcaagacaaggtagagaatctgaagcaagaagggagaacagttcaagagtatgccagcgagttgcaacatttatgggcagatcttgatcattatgatcccctacaattaaagcatgatgatgatattgtgattggaaataaatggctgcaaaggagaagagtcattcattttttaaaggggttgaacaaggagtttgaggatagaagagcagctatgtttcaccaagctacattacctaatatggaggaagctatttcagccatggttcaggaggagatgaggcagaaagtgatgaaaggaagtaatcctgtgaggtctgcatacatcacaattaatgacagggagtgttataattgtgggttaaaggggcatgtgagctacaattgtccttctcctaggaacaataatggtcggggtgtagctcgtggaggagcacgtggtggctttggtggcttcaatgggagccgtggtggctatggtggctatgtaggagaccgaggtggccgaggaggtgaacgtggaggccgtggtggaagtcgaggtagaggcctaggtggtcctagggccaatgttgtcatgggggagagctcatctatcactctaacaggtgaacaagctgcacaatgggaagaatggcaaaagaataagggccccgtggactccaatcaacaaaattctgctaaagcaacaaccagccacttcggtaactttgccaactacgcccacacgggcgaaggtactcaggcacatgcacttgcatccacatatagacatcatgtagactggataatagattcaggtgcatcaaaacatgtcacaggcttgcctaataatttctcctcatactcccctattgctccctctgaaactatccaaattgctgatggttcatctcaactcattcatggtatagggtcagtagagtgcactccatctattagcttgtcatctgttttgcatgtcccttcctttccagtcaacctcctctctgttagttctatcattgatcaattcaagtgcatcgttatatttgatgagaattcatgtctcttccaggagaaggggactgggaggaggattgggactggagtcaggcgtaatgggctgtggtacatcaatcaagaggagatgggattggctgtagtagtgggagatactgagaaggagattattttgcttcattgtcaattaggacatccatctttcgagagtttgagtaagctgtatcctgacctctttaccaaagtggacaagagtagacttgtttgtgatgcttgtgagtttggcaaacatacacggtctacatatgctggaattggtcttcgtagttgtgaaccttttatattaatacattctgatgtttggggaccatgcccagttacttctgtgagtggattcgaatggtttgttacctttattgattgttatactcgtatgacttggatttacatgcttagacataagaatgaggtcattcgttgctttcaagacttccacaaattggttaccaatcagtttgatgcaagggttcggattattcgaactgacaatgggacggagtatattaatagtgagtttgtgtcatatgtctcagatcatggaattattcatcaaaccacttgtcctggagccccccctcaaaatggtgtagctgagaggaagaatcggcatttgctagaggtggctcggtcattaatgtttcaaatgaacgtacctaagtatctgtggagtgaggcagtgatgacagccgcataccttatcaaccgcatgccatccaggatacttggtatgaaatcaccagctgaacttttacttgggaagcgagaatttaaagttcccccaaaggtatttggttgtgtttgttttgtgagagatcatcgaccttttgttggcaagttggatcctcatgcagtaaaatgtgtctttgttggctatgcatctaaccagaaagaggagttctcaactgtcatcgagatcgacagtcgagagggggagatagttgaggttgatgcacataagcaaggtgatgaggatgtggttattgggtcaattccgagttttgttggtgatactattgagaaggttgtggacattggtgagaaggtagtagacattagttgtgacaaggatgagggggtagttgtcgggacaatcccatgtcctctggagcgtgtggaagtacaacaaactaaaatgagagtatatcaaagaaggaacaagaaccaagttgataaggtgacagggaaggagcaagtgcaccagaggagccaaattcagaatcagggggagagaagtggtgagcctatgcaagagcaagacaaggagtcacaacagctgcagcagtttgagtacccagtcccagattcctcctctagcctctctccaacaagttcctccctccttgagacaagtggtaacatttctcctacctttaaacaagtagagttacctcttgcacaacgtagagaaactagatctaatgctggaagacctcctatacgccttggttttgaacaccttagttctagacatgacattgcaaactatatctcatactctcatatttcacctgcatataaagcattcattgcatcattgcaaatagtgcctattccaaaggactggagatgtgcaaaacaagatccaagatggaaggatgcaatgaaggaggagttgcgtgcccttgaaaagaataagacatgggaacttgtgaaactaccaatggggaaaagagcagtgggatgtaaatgggtatttacagtgaagcaaacccctgaagggaaagtggatagatataaagcaagattagttgcaaaaggttatagtcaaacatatggaattgactatgatgaaacatttgcacctgtggctaagatgagtacggtgaggattttgatatcatgtgcagttaactttggatggcctcttcatcagttagatgtcaagaatgcttttctacatggtgatttacaagaggaggtatatatggagattccccctggatttggaaatagccagactgttgggaaggtatgtaggctcaagaagtccttgtacggtttgaaacaatccccacgtgcatggtttgacaggtttaggcgtgcattgtgcaatatgggatattcacaatgtaatggagatcacacagttttctatagacataggggggcacacatcactatcttggctgtttatgttgatgatatagtgatcactagagatgatgtagaagagatcaaatgcttaaagcagcgattaggagaggcctttgaggtgaaggatcttggacctcttcgatactttcttgggattgaggttgctcgatcatcaaaggggatagttctctctcaaagaaagtatgtccttgatttgttaacagaaaccggaatgcttggatgtcgtacaagtgctactcccattgataggaatcaccaattgagtgcacagtcaggtgatccagttgatagggaaacttatcagaggttggttggacgtttgatatatctatgccacacgagaccagatatctcttatgcggtgagtgtggttagtaggtatatgcatgatcctagaacaactcatctagaggtggttcataggatcttgaggtacttgaaaggaactcctggtaaggggttgtggtttagaaagaaccaacacttggatgtggaaggatattgtgatgctgattgggcaagcagtgtggatgatagaagatctacatcaggatattgtgtatttgtgggtggcaatgttgtctgttggcgaagcaagaagcaggcggtagtggctcgatctaccacggaagctgagtatagagccatggcattgagtttaagtgagatgttgtgggtgaagaatctattgttggagctacggttgttcagaaataatactgtggtgcttcattgtgacaacaaatctgctatcaacattgcaaacaatccagttcaacatgaccgcaccaaacatatcgaaattgataggttcttcatcaaagagaagatcgataatggggctcttagactacaatacattaaatcttctgagcagctagctgattgtttaaccaagggattaggtcctagtgagaaaaaaatccccaaaactgaactttactatctaaggattgtgaaagggtattttcaagaattaagtctatccaacatcatttcaagattttatcacttgaggatccttgatgtacggcaatgcagtggtcactttaatttaccgagtgatatgagtaaccttataaagctgcggcattttcttgacccaaatgattcttttcactctgccattgctaatgtgggaaagctgaaatgcttacaagaattaaagagatttgaagtcaaaggacaagctgaggcatttgcattaagacagatagggcagttggaagagctaaaaggatcactgtgcatttataatcttgaaaatgcacagacaggggaggaagcaaaccttttaaacaaaaggcacttacacaagttagagctgcttggcataccacagctagcaaaatgggttggaaatgatgcttcccatgtgttctccctgctagaggtgttcattataagagattgcccagaacttatggagttgccattttcacattcaacttgccctcgatcaggacaggagatgaacttgacccaattccctacactaagggagcttgaggttgtaaattgtccaaagctgtcatcatttcctcacattccttggacaagctctccatgtcgtgttcttattgatgaagtgggatcagattttcagcggttggattactcaaaaaataaccaatctgaattttgcttgaaagttgtgggaaaggatggccatctagatatgtcattctggaatgtattggcatttagtaatctaactgaactgaaagtgttgtatttgaagaaatgtcctcctttgccactgaaacatctcctagtgctatcatgtttgaggagtcccacgatacatgattcaagtaatgtcttgttgaatgttgaagctgagaacactgtcggctaccaatttcagattgagggtctcagtatcgatgactgtagctgtagcgggaaggaactgacgctgttgctgtctcttttccccaagctgtcaatgttttcattacaaggttgtgggaagataagagtgcttggtgtggcgaaggagcagacaatggcaatgtcagcattgtcgtcgtcaccttctggtcataagttggaggatgcacatataggacaggagcaggagcaggagcaactaagaggagaggatgagaaagcagcagctgatgcaggactgctgctcttgcctcaccaacttcaggatttgtacatagagaatatctcaaagctgatcctgcagtttgattctctcgtagatggcatggcaggaggcttaagaagcataggaggaggattacaaggcctgcacttcctaagaacactcactattcggggttgccccaatttcctctcctcctactactcgtcctcctcctcgtcttgcttcccatttccatcctccctgcaatatctgcatcttgatggtgtgggaggcatggagactctggcgcctctctcaaacctcagctctctcaccagattaaccatacggaaatgtatggatttaagaggtgaggacttgtcttctctcctcgcccatggccaactcacaaacctgaacatcttcgagacccccaaattcttcgtcgggtgtggctctgactccttgcggctgcagtgcctccaaacagatgacatcacaaaggtccttgccgcgcccatctgcagcctccttgcttcctcactcaccagcctaaccattagttggaacgacgaggtggagcgcttcacaaaggagcaaagcgcggcacttctgctcctctcctccctccaggaccttgaattttggtactgctcggagctgcagtccctccccactgggttacacagactcaccagcctcaagagattaaagatctggtcctgtccagccatccgttcgctgcccaagggcggccttccgagttcactggaagtactagatgtccgttctagcaacaacgaggagctcaaaaggcagtgccgcgacctgagaggaaccattccgatcatcaaagacagacgatactactaa

SEQ ID NO: 14046 - DNA, 4914 bp, Oryza sativa
  Clone ID: TFbOSC420787j.C1.o26.fg
atggtgcattgctttgaattgtgttatgcagagggtattgtcacaatctctattcggtggtacatctctggccagagtaaaactattcaaatagccgtgcccgcggttatggcgggtctaacaatgtctttcgtgattagtttcacacctctcaccataataaatgatgttgtacttggtaataacttgtttagctcctggtttggaacgatgccgcgcttcaagcctgagtacttgttcagtactgagggatttgtccaggaattgcgtacgatgtccttcgccataggattcgggactgcccctttgtatgcccagattcctcatgatcgtgatgaagagaagtgccgtgtcaaaatcactctgaacagtaatcgtgaagatatcccatcggtggcaaggatcgccataggagagctccgcgatcgctacaatgatcagttggccgacactgagtatcgctaccatcctcgccaaccccagggaagtgactttggcagctaccttgaacctgcaggaattgagaatgatgctaccacaaggcatttggttgagatgctgtgggccatggatgagtcccgcgctgaagtcgtgatagctgctcaagatcgcgaaaaccggaatcgtggtaaaatttgcaagctggaggacaaggtggttcgtttggagaaggaactagccgcattgaagggagaagcaccaccacaaaaggccagggttcgtcttactgcaaggaagagagctctatttgtccctcgctaccagttggcgcctaaggttcgtgtggtggaagaagaagctgtcccagtcccagcgaatcctccgatcgttaacatggtgcttactcgcagcaatgggaatggccccaacaacaacaatcacaacaacaacaatggagagaatcccacgcttgcccaagtcctggctcaacaggcacagctcatgaacatgatgatgcagcaactccaaaaccagcagaaccaggggaacaatcatgcacctccccagaacaagttagcagaatttcttcgtgtgaggccgcctactttttctagcactaccaatccagtagaggctagtgattggctgcacgccatagaaaagaagttggacctgcttcagtgcactgatcaagaaaaagtctccttcgcttcacatcagcttcatggccctacctctgagtggtgggatcatttccgtctaaacaggaccactgcggaaccaattacttggcttgagttcactgctgctttcagaaaatctcacataccctcgggagtgttgtctctcaagaagaaggaattcaggaagctcactcagggatctcgctctatcactgaatacttgcatgaattcaatcgtctggcttgctatgctccggaagatgtgcgcactgatgaagagcgtcaagagaagttcttggaaggactgaatgatgagctctcttacccattaatgactggggattatcatgattttcagaagttggtggataaggccattcaccaggaggacaagtacaatcgtatggagcagaagaaacgcaggattgctcacttcaaagctcagcaggggaatagtcagaggccgcgtcttgctatgggacctcaggcagtgtcacagggaggatcttcgtctgttgttcgtccgcagcgtcagttcttcaacaacaatgctggcaacaacaaccacaaccaagctccacgtcctgttgcaactccaacccagcaccagcctgccaagagggagcaaggaaacaagccaggagtgtgcttcaactgtggtgaaccaggtcattattctgacaagtgtctgaagccccgccgcgtgaaggttgtccctgcacagaacaactccaccacaccagcgtcaaagtctcgtgtcaatcatgttgctgctgcagaagcccaaggtgctccagaagtgattttgggtatgttccctgttaactcagttcctgcaacagtgcttttcgattctggtactacacattccattttgtctatgagttttgcgggaaatcatgggatggagatagaagatcttagacgtcctttgatgatcagtaccccgagtaaccaagcactctcatcacaacgtagcccctctgtcagaatagaaattcaaggtgtaccatttctggccaaccttattttgttagaatccaaataccttgaagtcatcctagggatggactggttagccagatataaaggtgtgattgactgtgccaatagaaaagtaactctcaccagcaatgatggtcaagttgtaactgttcacgcattgccttctgagcctttaaggtcaagtttgaatcaaataactttggaagagattcccatactacgggactacccggatgtgttcccggatgatttacctggtatgccccctaaaagagatatagaattcagaatagatctggtaccaggaacaactccgatccataagagaccttatagaatggcagccaatgaattagcagaggtcaagaggcaagtagatgatttgcttcagaaaggatacattagaccaagttcgtctccatggggagctccagtcatttttgtggagaagaaagatcatacccagaggatgtgtatggattatcgtgcactaaatgatgtgaccatcaagaataagtaccctctgcctagaattgatgatttgtttgatcagcttaaaggagccaccgttttctccaaaatcgatcttcgatcggggtatcaccagttgaggattaaagaggaagatatacctaagacggcttttaccactcgatatgggttgtttgaatgtactgttatgtcttttggacttaccaatgcccccgctttcttcatgaacttgatgaataaggtgtttatggaatacctggacaagttcgtggtggtctttattgatgacatccttatctactaccgaaccaaagaagagcatgaagaacatcttcgccttgcactagagaagctacgagagcatcaactgtatgccaagtttagcaaatgtgaattttggctgtctgaagtaaagttccttggtcacgtcatctcagctggaggagttgccgttgatcctagtaatgtggaatccgtaaccaactggaaacaaccgaagacagtttcaaagattcgtagtttcttgggtcttgcaggctattaccgaaggtttatagagaatttttccaagattgctaagcctatgacacgactgcttcagaaagatgtgaagtacaagtggtcggaagaatgtgagcattgttttcaagagttgaaaaatcgcttgctatcagcacccattttgattttacctgatccaaagaagggtttacaagtgtactgcgacgcatctaagcttgggttaggttgtgttctgatgcaagatgggaatgtggttgcctatgcatctcgtcagttacgtccgcatgagaagaattaccctacccatgatcttgagttagctgcggtggttcatgcgttgaagatttggtgtcactacctctttggtactcgtacggaggtgtacacggatcacaagagtttgaagtatatctttactaagccggatctgaacatgagacagtggagatggttggaactgattaaggattacgacatgagaattcattatcaccccggaaaggttaatgttgtagcagatgctctcagcaggaaaggctattgcaatgctacggaaggacgacagttgccgtgggaattatgcaaggaatttgaaagattgaatttgggaattgtcagtagaggtttcgtagcagcattagaagcgaagcccactctcatagaccaggttagagaagctcaaatcaatgatcctgatattcaagagattaagaagaacatgagaagaggaaaggctattggatatttggaagatgagcaaggaaccgtatggttgggcgagagaatttgtgtcccagagaacaaggagttgaaagatgcaatcttgaaggaagctcatgacacgttatactccattcaccctggtagtaccaagatgtaccaagatctcaaggagaaatgttggtgggcaatcaaggcagaacatcagaaacccgcaggtttgctgcagcctttaaagataccaaaatggaggtgggaggaaattgggatggatttcatcaccggtctaccgacaacatcatcgggccatgactctatttgggtgatagtcgacaggcttaccaaggtggcccatttcatctctgtgagaacaacatattccggaagtcgtttggcagaattgtatatggcaaggattgtgtgtttgcacggtgttcctaagaaaatagtatccgatcgaggtagccagtttacttcaaagttttggaagaagcttcaggaagagatgggttccaagctgaactttactaccgcttatcacccgcagacagacagacaaactgaaagggtaaatcagattttggaagacatgttgagagcttgtgctttagacttcggtggaagttgggataagaatctgccttacgcggaattctcatacaacaacagttgtcaagctaggctccaaatggctccttatgaagcactgtatggtcggaagtgccgcactccgctttcgtgggatcaaacgggagaacgtcaggttttcgggaccgatattctaagggaagctgaagagaagttgaaaaagtgtttaagggtacctactgaagaagccagtcttgagcagatagaaatccaagaggatctgacatatgttgagaaaccaatccgtatcttggagacagatgagagaagaaccaggaatcgagttatgcgtttttgcaaggtccaatggagtaatcacttggaagaagaagctacttgggagcgagaagatgaattaaagtcagcccatccgcatcttttcgccagctcttcccaatcttga

SEQ ID NO: 14047 - DNA, 6047 bp, Oryza sativa
  Clone ID: TFbOSC874j.C1.o1.np
atggagcccgagagcgccgcgccggtttccttcccctccggccgccctctcccccttccaaccctatataaaccctccccgcacctcctccgttcgtttccgcctctcgccgcccttcctcctcgccggaatcgagcttgcgccgtcgctctctctctccgccgtcgccgccgagctccggtccgccgccgtcgtcgccccggaccacctcccacctcggcgccgcctccttcggcttcgccgcatcctcgtcgacctcgtccacccctccgtttcgctcgtcgaccgccggagcgcccccgtccccgtcgacccgagccgcgccgccgccttcctccgctccggccgccttttcgtcgtcgccgtcgacctagggtgagccgtggaccaccgcctcgtttccccctttccctcccttctctcggccgccgctccgccgtgcctatggccgccgccggcgaccataggggcgcgcgcgcgccgcctcccgccggccgcgccgccgtggccgccttcgagtgcaccgagcggctgccgcgtggggcccggtcgtcagccgcccgcgccctcgggtgcggctgacgcgtggggcccacggcgccggccggtgcgagcccgggtgcgcccggtccaccgtggacccgcctcggccatataaggaccggtcttcgggcctctgttgcaaagcactaccgtacttccacatgtctagtgggacaaatgaaggctacacgagctgcggcccggtagtcgagatgtcatggcacagggccggtgtcctgctgcaaggggctcagtcctgcctacctgtcccgggggttccggccgtaggtgggattgggtcgatgtacacctctgatcagagtataatctattcgaatagccgcgccctcggttatgggcaagccgagcaatgtacccaaatggccagcagcatcaaccgtcgtggtctggacctgactggcttcgttttggagctacggggcatgtgcgttgtcctagggtatccgcatggagtggattaccagggcaagcagctcccggagcaagagggtgacgatgcagagccccacgctgcttgggaggttactgcagtgatcctcactggctcacccgagaggacttcgttggcagtcaccgcgggtggtgattccttctccgccgcttgccagaacgccgcactcctcgccatcggcactcttcaccagcgctacccggacgagttgcagcactcgccctaccgctaccaccctcgtcgcggaggagcccgcgactacgccaccttccgggatgctagctcggaggatgacgctaccatcatgcacctggcgcgcatggtggaggcgtacgacgtggcccgtatcgacttccatcagatggtgcgtcgcgggttggtcgagaacaacatgaagatcctggagctgcgtcaggagaatctgcagctgaagaaggacctagacgcagtggaggcgcagctgcatcagctcaagatcgcccagggagaggtctatcgccccaagcgtcgtcgcgtctgccgcagcctgaagatcaccgcccgcaagagtacctccaggcccgagcttgttcgtcagtccctggcgtggacctgcttcgtcgagacccctcgtgccgagcccgcccccgttgttcctcaggaggatggagcctccggcgttggcagcacagaggatgcgttgctgctcaccttccatggtgacaaccaggagaagtgctgctaccggtgaaggcagtcacctcgaaggcagcaaccacaacaaccatggcagcccacctccacctcctcctccgcctccaccaccaccaccagacaccaacgccatcctcacccaaatcctcgcccagcaggccaacatgatgactggtttcctccaccacatccaaaatccgccacaacataatgctccaccaccacccccacaacattctaaactcgccgagttcctccgcatccgtccgcctaccttctctagctccaataaccccgtggatgcgttggattggttgcatgccgtggggaaaaagttagacaccgtgcagtgcagcgatgaggagaaagtcatcttcgccgcccaccaactgcaggggcccgcatctatatggagggaccatttccaggctacgcagccagaggggcaacctattacttgggcccgcttcaccgtcgctttccggagaacccatgtgcccgccggagtcatggcccttaagaaaagggaattccgggagatgaagcaaggcaaccgctccgtgatggagtatttgcatgagtttaacaacctggcccggtacgccccggaggatgtacgggaagatgaggaaaagcaggagaagttcttggcaggaatggaccctgagctatccgtgcgtctggtctccggggactatccggatttccagcgtttggttgacaagagcatccgcttggaagccaagcacaaggaactggagtcgcacaagcgtcgcttggcgaatttccgcaatcaacagggggctaatcaaagggtccgctacaccaatccctatccagggggatcgtcctcgcagcagcaacagcagcagcaacctcgctccgcgccgcgtcctcaattcgtggtgcgcgtcccatagccgcagcaacagcagagtcagcaagggactcgtgcgccccgtcctcctatgccagccgtgcagcctggtcaaggccgcagggacgttcaaggtcagcagcgtctgtgcttcaactgcttcaagcctgggcactttgcggataaatgcccaaagccgaggcgccagcaaggccaagcgcatccccgctccaacaacggtggtaaggatgtcattcggggtcgtgtgaaccacgtgacggccgaggacgtgctgacaactccagacgtcatcgttggtacgttcctcattcattccatccctgctaccattttgttcgactctggagcttcccactcgtttatatctgtgccattcgtggggagaaatcagttgggggtagaaaggcttaggaaccctctgctcatcaccacccctggaggggttatgacagcaaagtattatagccctgccgttcctatagaaatccagggaattccttttccctcggatctgattcttctagacaccaagaacttggatgtgatccttgggatgaattggttggctcaattccaatgtgtagtggattgtgcaagatgcactgtcactctgtaccgagggacggaacaaccggtcgttttctttgcacccccaacctctgtcggtagttcagaacttcatcagataagactgtcggaaatccccatcgtcagagagttcggagatgtgtttccggaagaactacccggtatgccgcccaagcgagagattgagttccggatcgatcttgctctaggaaccactcctctgtacaagcgaccctaccgtatggcagctaatgaactggccaaagtcaagaaacagttggaagagttgaaagaaaaggggtatatacggccgagtacttccccctggggtgctcctgtgatttttgtggagaagaaagacaagacaaagaggatgtgcgttgactacagagctctcaatgaagttaccataaaaaacaagtaccctcttccccggatcgatgatctgttcgatcagcttaaaggtgccactgtattctccaagattgatcttcgttccagatatcaccaattacgtattcgtgaagaagatatccctaagaccgcattcaccacgcgatacggactgtatgatttcacggtgatgtcattcggtttaaccaatgctcgtgctttcttcatgaacttaatgaacaaagtgttcatggaatacttggataagtttgttgtggttttcattgatgacattctggtgtactcacaatcagaggatgaccatcagcaccatctccgtctggtgttgggaaagttgcgggaacatcaattgtatgccaagcttagcaagtgtgagttctggttgtccgaagtcaaattcttagggcacgtgatatctgctaaaggagtcgctgtggaccccgaaatagtgaccgccgtcactgattggaagcaacccaagacagtcactcaaattcgcagcttcttaggtttggcaggatactaccagaggttcatcgagaacttctccaaaatcgctcgacccatgacacagttgttgaagaaagaagagaaatttgtgtggagcccgcaatgcgagaaggcgttccaaactctcaaggaaaggctggtttcctcgccggttttaatcttaccggatactcataaggacttcatggtgtattgtgacgcttcgcgccaaggattggggtgcgtgctcatgcaggaaggtcatgtggtagcctatgcctcacgccagctacggccccatgaaggcaactaccctacccatgatttggagttagccgctgtggttcatgctctaaaaatctggcggcactatctcattgggaatagctgtgaaatatatactgatcataagagtttgaaatacatcttcactcaatcggatctgaatcttcggcagagaagatggttagaactcatcaaggattatgatgtgggaatccactatcatcctggtaaggccaacgtggtcgccgacgctctaagtcgaaaaagccattgcaacactcttggcgtccgtggcattccacctgaacttaatcaacagatggaagccctgaacctaagcatagttggtcgtggattcttggctacactggaagccaagcctaccttgctcgatcaaatccgcgaggctcagaagaatgatccggatatacgtggactcctcaagaatatgaaacaaggtaaagccgctggtttcacagaggatgaacacggaaccctatggaacggaaatcggcgtgtcaaggcagagcaccaacgaccggccggacttctccaacctctccaagtaccagaatggaaatgggatgaaattgggatggatttcatcaccggacttccaaaaacccaaggcggatatgattctatatgggtagttgtggaccgactaaccaaggtagctcggtttattcctgtgaagaccacctgtggagggaacaaactagccgatctctacttcgctaggatcgtgagtctccatggcattcctaagaaaattgtatctgataggggaagccaattcacctctcacttttggaagaagctccaagaagagctgggtacccgattaaatttcagcaccgcgtatcacccgcagacagatggacagaccgaggtctaaatcagatcctagaagatatgcttcgcgcatgtgtcctagatttcgggaagacctgggataagagtctcccctatgccgagttctcctacaataacagctaccaagccagcatacaaatggcaccctatgaagcgttgtatggacgcaaatgccggacaccgctattgtgggaccaagttggggaaagccaagtgttcgggactgatatcctgagagaagctgaagctaaagtcaaaaccattcgggataatctaaaggtggcccagtctcggcagaagagttatgcagacaaccgacgccgtaatctggaattcgcagtggacgattttgtgtaccttcgggtcacgccattgcgaggtgtacacaggtttcagacgaaagggaagctcgcacctcggtttgtgggtcctttccgtatcattgctcgacgtggggaagtcgcttaccagttggagctgcccgcctccttgggcaacgtgcatgatgtgttccatgtgtcgcaactcaagaaatgccttcgagtgccgtccgagcaggccgactcagagcagattgaggttcgcgaagacttgacctacgaggagaggccagtgaaaatcctggacaccatggagcgtaggactaggaaccgggtaatccgtttttgcaaggtccaatggagcaaccacgccgaggaagaagctacttgggagcgtcaagacgagctgaaggcagcctatcccgatctcttcgccagttcttccgaatctcggggtcgagattccgtt

SEQ ID NO: 14048 - DNA, 291 bp, Oryza sativa
  Clone ID: TFbOSC874j.C1.o2.gm
atgacgaaaaggcggccggagcggaggaaggcggcggcgcggctcgggtcgaccgggacggcggcgctccggtggtcgacgagcgaaacggaggggtggacgaggtcgtcgaggatgtggcgaagccgaaggaggcggcgccgaggtgggaggtggtccggggcgacgacggcggcggaccggagctcggcggcgacggcggagagagagagcgacggcgcgagctcgattccggcgaggaggaagggtggcgagaggcggaaacgaacggaggaggagaactcggcatag

SEQ ID NO: 14049 - DNA, 5579 bp, Oryza sativa
  unsure (1)..(5579): unsure at all n locations
  Clone ID: TFbOSC900012j.C1.o13.np
acggccgggcccacctggcagccgcggggcgcgcccgaaggcggcctcgccggcacggccgacggaaggcggcgcacccgcgccccgatggtcgccgccggcgaccaacggcgcgacggagcggcgcccgagagaggggagggaagggggaagtgaaacaacggtcctcggctcaccccgggacgacgaggacggcggaaacgacgaccggagcggaggaaggcggcggcgcggttcggatcgacgaggacggcggcgctccgacggtcggcgggcgaaacggaggcgcggacgaggtcgacgaggacgcggcgaagccgatggaggtgacgccgagacgggaggaggtccggggcgacgacggcggcgaactgaagctcggcggcgacggcggagagagaggacgacggcgcgagcacgaatccgacggggagagtccttttttccccccttccctcttgggccggctcggcccacttccctccctctctctcctctcccccgcggcccaatcggcctcctccccgccgcgtgccgctgacgggcgggcccgcccgccaccctcgctgacgggtggggcccacccgcacgcacgtaaggaacgcccgttggtgatcctcgctggctctcccgagcggacttcgctgacagtcaccgcgggtggagattctttccccgccgcttgccagagcgccgctctcctcgccatcggcactcttcaccagcgctacccggacgagttgcagcactcgccctaccgctaccaccctcgccgcggaggagcccgcgactacgccaccttccgggatgctagctcggaggatgacgctaccatcatgcacctggcgcgcatggtggaggcgtacgacgcggctcgtatcgacttccatcagatggtgcgccatgggatggtcgagaacaacatgaaaatcctggagctgcgtcaagagaacctgcagctcaagaaggacctagacgcggtggaggcgcagctgcatcagctcaagatcgcccagggagaggtctgccgccccaagcgtcgccgcgtctgccgcagccagaagatcaccgcccgcaagagcacctccaggcccgagcttgttcgtcagtccctggcgtggacttgcttcgtcgagacccctcgtgccgagcccgcgcccgtggttccccaggagggggaagcctccggcgttggtagcacggaggatgcgctgttgctcaccttccgtcctggcccgtcgcagcagagaaatgctgccaccggtgatggcaaccaacccgaaggcagcaaccacaaccaccagggcagcccacctccacctccacctcctcctccgcctccaccaccgccagataccaacgccattctcacccaaatcctcgcccagcaggccaacatgatgactgctttcctccaccacctccaaaatccgccacaacataatgctccaccaccacctccccaacactctaaactcgccgagttcctccgcatccgcccacctaccttctctagctccaacaaccccgtggatgcgttggattggttgcatgccgtggggaaaaagctagacactgtgcagtgcagcgatgaggagaaagtcatcttcgccgccaaccagctgcaggggcccgcatctctatggtaggaccatttccaggctacgcagccagaggggcaacctattacttgggctcgcttcaccgccgctttccggaggacccatgtgcccgccggagtcgtggcccttaagaaaagagaattccgagagttgaagcaaggcaaccgctccgtgacggagtatttgcatgagttcaacaacctggcccgttacgccccggaggatgtgcgggaagatgaggagaagcaagagaagttcttggtaggaatggaccctgagctgtccgtccgtctagtctccggggactatccggatttccaacgtctggtggacaagagcatccgcttggaagccaagcacaaggaactggagtcgcacaagcgccgcttggcgaatttccgcaatcaacagggtgctaaccaaagggtccgctacaccaatccctatccagggggatcctcctcgcagcagcaacaacagcagcagcaacctcgctccgcgcctcgacctcaattcgtggtgcgcgtcccacagccgcagcagcagcagaatcaacaagggactcgtgcgccccatcctcctacgccaactgtgcagcctggtcaaggcagcaggcacgctcaaggtccgcagcgtctgtgcttcaactgcttcgagcccgggcacttcgcggataaatgcccgaatccgaggcgtcagcaaggccaagcgcctccccgctccaacaacggtgggaaggatgtcattcggggtcgggtgaaccacgtgacggccgaggacatgctgacaactccagacgtcatcgttggtacgttcctcattcattctatccctgctaccattctgttcgactctggagcttcccactcgtttatatctgtgccattcgtggggaggaatcagttgggggtagaaaggcttaggaaccctctgctcatcaccacccctggaggggttatgacagcaaagtattatagccctgccgtccccatagaaattcaggggattccttttccctcggatctgattctgctagacaccaagaacttggatgtgatccttgggatgaattggttggctcaattccaaggagtagtggattgtgcgagacgcactgtcactctgtaccgagggccggaacaaccggttgttttctttgcacccccaacctctgtcagtagttccgaacttcatcagataggactgtcagaaatccccatcgtcagagagttcggagacgtgtttccggaagaactacccggtatgccgcccaaacgagagattgagttccggatagatcttgctccaggaaccactcctctgtacaagcgaccctatcgtatggcagcaaatgaactggccgaagttaagaaacagttggaagagttgaaagaaaaggggtatatacgtccgagtacttccccctggggtgctcctgtgatttttgtggagaagaaagacaagacgaagaggatgtgcgttgactacagagctctcaatgaagtcaccatcaaaaacaagtaccctcttccccggatcgatgatctgttcgatcagcttaaaggtgccactttattctccaagatcgatcttcgttctggatatcaccaattacgtattcgggaagaagatatccctaagaccgcattcaccacgcgatacggactgtatgaattcacggtgatgtcattcggtttaaccaatgctcctgccttcttcatgaacttaatgaacaaagtgttcatggaatacttggataagtttgttgtggttttcattgatgacattctggtatactcacaatcagaggaagaccatcagcaccatctccgtctggtgttgggaaagttgcgggaacatcaattgtatgccaaacttagcaagtgtgagttctggttgtccgaagtcaaattcttagggcacgtgatatctgctaaaggagttgctgtggaccccgaaacggtgaccgccgtcactgattggaagcaacccaagacagtcactcaagtccgcagtttcttaggtttggcaggatactaccggaggttcatcgagaacttctccaaaatcgctcgacccatgacacagttgttgaagaaagaagagaaatttgtgtggagcccgcaatgcgagaaggcgttcaaaactctcaaagaaaagctggttgcctcgccagtgttaatcttgccggatactcgcaaggatttcatggtgtattgtgacgcttcgcgccaaggattggggtgcgtgctcatgcaggatggtcatgtggtggcctatgactcacgccagctacggcctcaagaaggcaactaccctacccatgatttggagttagccgcggtggttcatgctctaaaaatctggcggcactatctcattgggaatcgctgtgaaatatatactgatcataagagtttgaaatacatcttcactcagtcggacctgaatcttcggcaaaggagatggttagaactcatcaaggattatgatgtgggaattcactatcatcctggtaaggccaacgtggtcgccgacgctctaagtcgaaaaagccattgcaacactcttaacgtccgtggcattccacccgaacttagtcaacagatggaagcccctgacacctaagcaatagttggtcgcggatttttggctgcgtggaggnnnnnnnnnnnnnnnnnnnnnnnnnnnnnnnnnnnnnnnnnnnnnnnnnnnnnnnnnnnnnnnnnnnnnnnnnnnnnnnnnnnnnnnnnnnnnnnnnnnntagaattcacggagttncgnaccctttgtgatgtgtgccagcgtgtcaaggcagagcaccaacgaccggccggacttctccaacctctccaagtacctgaatggaaatgggatgaaattgggatggatttcatcaccggacttccaaagacccaaggtggatatgattctatatgggtagtggtggatcgattaaccaaggtagctcgattcattcctgtgaagaccacctatggagggaacaaactagccgagctctacttcgctaggatcgtgagtctccatggcgttcccaagaaaatcgtatctgataggggaagccaattcacctctcacttttggaagaagctccaagaagagctgggtacccgattaaacttcagcaccgcataccacccgcagacagatgagcagaccgagcgtctaaatcagatcctagaagatatgcttcgcgcatgtgtcctggatttcgggaagacctaggataagagtctcccctatgccgagttctcctacaataacagctatcaagccagcatacaaatggcaccttatgaagcgttgtatgggcgcaaatgccggacaccgctcttgtgggatcaagttggggaaagccaagtgttcgggactgatatcctgagagaagctgaagctaaagtcagaaccattcgggataatctaaaggtggcacagtcccggcagaaaagttatgcagataaccgtcgccgtaacctggaattcgcagtggacgattttgtgtatcttcgggtcacgccattgcggggtgtacacaggtttcagacaaaagggaagctcgcacctcggtatgtgggtcctttccgtatcgttgcccgacgcggagaagtcgcttaccaattggagctgcccgcctccttgggcaacgtgcatgatgtgttccatgtgtcgcaactcaagaaatgccttcgagtgccatccgagcaggccgactcagagcaaattgaagttcgcgaagacttgacctacatggagaggccagtgaaaatcctggacaccatggagcgcaggaccaggaaccgggtaatccgtttttgcaaggtccagtggagcaaccacgccgaagaagaagctatctgggagcgtgaagacgagctgaaggcagcccatcctgatctcttcgccagttcttccgaatctcggggtcgagattccgtt

SEQ ID NO: 14050 - DNA, 1782 bp, Oryza sativa
  Clone ID: TFbOSC900040j.C1.o2.gm
atggccctgcctctgagtggtgggatcacttccgtctcaacaggatcactgcggaaccaattacttggcttgagttcactgctgctttcagaagatgtgcgcactgatgaagagcgtcaagagaagttcttggaaggactgaatgatgagctctcttacccattaatgaccggggattatcatgatttccagaagttggtggataaggccattcgtcaggaggataagtacaacctgtcacaaggaggatcttcgtcagttgttcgtccgcagcgtcaattcttcaacaacaatgctggcaacaacaaccgcaaccaagctccacgccctgttgcaactccaacccagcaccagcttgccaagagggagcaaggaaacaagccaggagtgtgcttcaactgtggggaaccaggtcattattctgacaagtgtctgaagccccgacgcgtgaaggttgtccctgcgcagaacaactccaccgcaccagcgtcaaaggctcgtgtcaatcatgttgctgctgcagaagcccaatgtgctccagatgtgattttggccaatgaattagcagaggtcaagaggcaagtagatgatttgcttcagaaaggatacattagaccaagttcatctccatggggagctccagttatttttgtggagaagaaagatcataccaagaggatgtgtgtggattatcgtgcactaaatgatgtgactatcaagaataaatacccgttgcctagaattgatgatttgtttgatcaacttaaaggagccaccgttttctccaagatcgatcttcgtggttcatgcgttgaagtttggcgtcactacctctttggtactcatacggaggtgtacacggatcacaagagtttgaagtatatctttactcagccggatctgaacatgagacagcggagatggttagaactgattaaggattatgacatgggaattcattatcacccaggaaaggctaatgttgtagcagacgctctcagcaggaaaggctattgcaatgctatggaagtacgacagttgccatgggaattatgcaaggaatttgaaagattgaatatgggaatcgtcagtagaggttttgttgcagcattagaagcgaagcccactctcattgatcaggttagagaagctcaaatcaatgatcctgatattcaagagattaaaaagaatatgagaagaggaaaggctattgggtatttggaagatgagcaaggaaccatatggttgggcgagagaatttgtgtcccagagagcaaggagttgaaagatgcaatcttgaaggaagctcatgacactttatactccattcaccctggtagtaccaagatgtaccaagatctcaaggagaaattttggtgggcaagtatgaagcgtgagatagcagaccgtgcgccgccgccgctctggtcgtcgtcgtcgctcgggaaggccgccgtcgggatcgccaagtcatcaccgtcctcgtctcgtcctccatttccgtcgaagatcaccggagcaccgtcgtcgccgcttcaactcgtcgccgtcgccgtccgttgccgttcgccgtcgtttaaaccctcgattccgacgttcccggagagtccgaatttgcaggagaagactttgaagagttccaaggccagcaaggcaaaaactccggacgtaactggtcgcttgctcgctggtgggggcgcccggaaagagatgggcttgggaagccctgaagatggcttcgcccgcggcgtgtacgtgctcgccttgttcttgacctgttga

SEQ ID NO: 14051 - DNA, 2889 bp, Oryza sativa
  Clone ID: TFbOSC100369j.C1.o14.fg
atggatgccgaagactggctaagggctattgaaaagaaactaaccttggtcagaacaaacgaacaagagaagataacctttgcaacccatcaactagaaggaccagccaatgaatggtgggaagcatatcaagcttctatagaagatcctacacatattattacatggatggaatttactacagcttttagagatgcttttatacctacagctgtgatcaggatgaaaaagaatgaatttcgaagattgaggcaaggttttatgacaggacaagaatatttgaataaatttacacaactagctcgatatactgcctcagacattcaagatgaaaaagaaaagattgaaagatttatagaaggattacatgatgaacttcaaggatcaatgattagtcaagatcatgaaaattttcaaagcctagtcaataaagtggttaggctagaaaatgatcgtagaatggtggaaggactccgtaagagaagaatgaatttacaacgacaatcgccaactagaagttcactacaagttcggaggccttatccatttaaaccatctctacccaatccaaagccaggcatgccaccaatactaccaagacctggattaaaaatggaagactccccatgttatgtttgtgggaatattgggcatttcgcgagactctgccctaatcgtcaaaatatgggtggccaaacttcttatcagaaaccatctactacaggttttataaagaaaaatcctccaattattaagagtggacctaatattagacgtggtcaagtacatcatattaaagcagaagaagctcaacaagaccctaatatattgatggacatctatatgcgtataccaaaagaagaagttccagtagtgcaggaatatttggatatatttcctgaagaactaagttcattacctctagatcgggaaatagaatttattatagagttacttcctggaacgacacctatatcaaaaagatcctataggatgccaattaatgaattggaagaattgaagaaacagatagctgagctacaagaaaaaggttttattcgaccaagttcttcaccttggggagctcctgtattattcgtaaagaagaaagatggaagtttaagaatgtgtgtagactaccgagttctaaatgaagtaactattaaaaacaaatatcctctaccaagaattgacgatctatttgatcaattaaaaggagcaagtatattttctaaaatagatcttcgatcaggatatcatcagttgaaaattagacaagaggacataccaaagactgcttttgtgataaggtatggattatatgagtttacagtaatggcatttggattaaccaacgcccctgcttacttcatgaatcttatgaacaagatatttatggaatatctagatcaatttgtggttgtatttattgatgacattctgatatactccaagaatgaggaagaacataaacaacacctacgattggtattggagaagttaaggcaacatcagttatatgccaaattgagcaaatgtgaattttggctagatcaagttgcatttctaggacatataataactaaggaaggagttgccgtggatccgcaaaagattaaagcagtaatggaatggaaaacaccaacctcagtatctgagataaggagtttcttaggacttgctggatattatcgaagatttattaaagatttttctgctattgcaaaacccatgactagattacttaaaaaggacatgaaatttgaaaggacaccagaatgccagagtagttttcaaagattgaaacataagcttactactacaccagtattaatcttgccaaacatccaaaaagattttgagatctattgtgatgcctctcgacaaggattaggatgtgttcttatgcaagaagatcttaatcttcggcaaagaagatggttagaattaattaaggattataatttggaaattctataccatcctggaaaagctaacgtggttgatgatgctttaagtcgaaaagcttattgcaatttacaacaagaaataatatcagaacaattacaagcggaaatgcttaaactaaatttgggtattattaagtatggagaattaagcactttggagttaaaacctaccttgatggatcaaataaaagaatatcataaagaagattctgaaatacaaacttttaaggaatggaaggtgcatggaaaggctgcagatattaccgaagacttggaaggaatattatggtacggaaataggatcatcgtaccacaatcaggaaacttaaggaagataatactaaaggaagcacatgattcaccctactctttacacccaggtagtacaaaaatgtaccatgatttgaaagacttatactggtggcccaatatgaaacaacatattgcagaatatgttgcactatgtcatgtttgtcaacaagttaaagcagaacaccaaaagcctataggattactacagcctttacaaatacctgagtggaaatgggatgaaataggaatggattttatcactggattacctaaaacttctactggatatgactctatatgggtaatcattgatagacttacaaagactgctcgattcattcctgtaaaaacaacttatactggagcacaacttgcagaactctatatgacaaggatagtatgtttacatggagtgccaaaaacaattatttctgatcgcggtactcaatttacttcacatttttggcaaaaacaacattatgaattaggaagttatttggatttcagtacaacatttcatccacaaaccggaggacaaacgaaaagactgaatcaaacattagaagatataataagagcctgtgctctagattttgctgctagttag

SEQ ID NO: 14052 - DNA, 2358 bp, Oryza sativa
  Clone ID: TFbOSC32874j.C1.o1.fg
atggccggcagcgtcacccgtcgtggtttgcacatgactggcttcgtcttggagctgcgaggcatgtgcgtggtcttagggccgctcccggagcaggagggtgaggatgcagagcctcacgctggttgggaggtcacagcagtgatcctctccggctctcccgagcggacttcgctggcagtcaccgcgggtggggattccttccccgccgcttgccagaacgccgctctcctcgccatcggcacccttcacccgcgctacccggacgagttgcagcactcgccctaccgctaccaccctcgtcgcggaggagcccgcgactacgccaccttccgggatgctagctcggaggatgacgctaccgtcgtgcatctggcacgcatggtggaggcgtacgacgcggctcgtatcgacttccatcagatggtgcgtcgtggcatggtggagaacaacctgaagatcctggagctgcgtcaggagaacctgcagctcaagaaggacctcgacgcgttggaggcgcagctgcatcagctcaagatcgcccagggagaggacagccgtcccaagcgtcgccgcgtctgccgcagccagaagatcaccgcccgcaagagcacctccaggcccgagcttgttcgtcagtccctggcgtggacttgcttcgtcgagacccctcgtgccgagcctgcgcccgtggttccccaggagggggaagcctccggcgttggtagctcggaggttgtgtggggcatggttacaccgatggtgacgaccaggagaaatgttaacaccggtgaaggcaaccaacccgagggcagcaaccacaaccaccaaggcaatccacctccacctccacctccgcctccaccaccaccgccagacaccaacgccattctcacccaaatcctcgcccagcaagccaacatgatgaccgctttcctccaccacctccaaaacccgccacaacagaatgctccaccaccacctccccaacactctaaactcgccgagttcctccgcatccgcccacctaccttctccagctccaacaaccccgtggatgcgttggattggttgcatgccgtggggaagaagttagacacggtgcagtgcagcgatgaggagaaagtcgtcttcgccgcccatcagctgcagggacccgcatctctctggtgggaccacttccaggctacgcagccagagggacagccgattacttgggctcgcttcaccgccgccttccgaagaacccatgtgcccgccggagtcgtggccctcaagaaaagagaattccgagagttgaagcaaggcaaccgctccgtgatggagtatttgcacgagttcaacaacttggcccgttacgctccggaggatgtgcgggaagacgaggagaagcaggagaagttcttggcaggattggaccccgagctgtccgtccgtctagtctctggggactatccggattttcaacgactggtggacaagagcatccgcttggaagccaagcacaaggaactggagtcgcacaagcgccgcttggcgaatttccgcaatcaacagggtgctaaccagagggtccgctacaccaatccctacccagggggatcctcctcgcagcagcagcagcagcagcagcagcagcaacctcgctccgcgcctcgacctcaattcgtggtgcgcatcccacagccgcagcagcagcagggtcagcaagggactcgtgcgccccgtcctcctacgccagctgtgcagcccgttcaaggccgcagggacgctcaaggtcagcagcgtctgtgcttcaactgcttcgagcccgggcactttgcggataaatgcccgcagccaaggcgtcagcaaggccaagcgcctccccgctccaacaacggcgggaaggatgtcattcggggtcgtgtgaatcacgtgacggccgaggacgtgctgacaactccagacgtcatcgttgagaagaaagacaagacgaagaggatgtgcgttgactacagagctctcaatgaagtcaccatcaaaaacaagtaccctcttccccggatcgatgatctgttcgaccagcttaaaggtgccactgtattctccaagattgatcttcgttccggatatcaccaattacgtattcgtgaagaagatattccgaagaccgcattcactacgcgatacgggctatatgaattcacgagtttgtggctctatgtgatgtgtgccagcgtgtcaaggcagaacaccaacgaccggccggacttctccaacctctccaagtgccagaatggaagtgggatgaaattgggatggatttcatcaccggccttccaaaaacccaaggtggatatgattctatatgggtaa

SEQ ID NO: 14053 - DNA, 3969 bp, Oryza sativa
  Clone ID: TFbOSC400697j.C1.o7.fg
atgtcgaacgaggtgaaccatgtagggaaggctcctatgtttaatggcacaaactactccacttggaaaattaaaatgtctactcacctcaaagctatgagcttccatatttggagtattgtggatgtaggctttgctatcaccggcacgccattgacggagatagatcaccgctacctccaactcaatgcccaagctatgaatgctttgttcaactctttgagccaagaggagttcgatagagtgagcaaccttgagaccgcatatgagatttggaacaagttggcggagatccatgaggtcacaagcgagtacaaggatgccaagcttcatttcctcaagattcaatatgagacattctccatgttgcctcatgagagtgtgaatgacatgtatgggaggctcaatgtcattgtgaatgatctcaaggggcttggggtaaactacaccgatcttgaggttgcccaaaagatacttggggctctaccggagaagtatgagacccttgtcaccatgctcattaactccgacatatcaaggatgacacccgcaagcctcttggggaagatcaacaccaatgatatgtacaagttgaagaagaaggagatggaggaagcctcatcaccttccaagaagtgcattgctctccaagccgaagttgaagacaagggcaagggcaaggtgaatgaagccaatgaggacttggaggaagagattgcccttcttgctagaaggttcaatgatctcttgggaaggagaaaggagagaggaagaggctctaactccaataggagaagaaatagtagacccaataagactctctccaactttaggtgctttgagtgtggtgagaagggacactttgcttccaagtgcccttcgaaggatgatgatggagacaagtcatccaagaagaagagtggaggctacaagctcttgaagaagctcaagaaggaagggaagaagattgaggccttcatcggggaatgggactcaaatgaggagagctccgcctcatccgggtccgaggaagaaggtggtgatgatgcaagctccaagaagaagaagatgaccgttgttgccatcaaggaggctccatcactcttcgctccactttgtctcatggcaaagggctcctctaaggtaacatctcttagtgatagtgagagtaataatgattgtgatgatgtttcctatgatgagcttgtgagtatgtttgaggagctccatgcttatagtgagaaggagattgtcaagttcaagactctaaagaaggatcatgcttctttggaggtcttgtataaggagctaaagacctctcatgagagactcaccatttctcatgagaagcttaaggaagctcatgacaacctccttttcactactcaacatggagctcatattgatgttggcatatcttgtgatttgcttgatgatagtactacttgccatattgctcatgttgcatcatctagcatttctacctcttgtgatgatcttgtggatatgcctagctctagctcttgtgtttctatttgtgatacctcacttgttgttgagaacaatgagcttaaggagcaagtggctaagctcaacaagagtttggagagatgcttcaagggaaggctcatgatggtagcattgttgctagatatgtgggttcccctatactcggtggtgaactaccgcaccggtgggagccattgggtgcttgatagtggatgcactcaacacatgaccggtgatagggctatgttcaccacatttgaagtaggagggaaagaacaagagaaagtgacatttggagacaatagcaaaggaaaggtaattgagttagttgcaaaaacttcattgggttggctttggcataggaggctagcccatgttggcatgaatcaattgagcaaactttcaaaacgtgacctagttgtgggtttgaaagatgtgaagtttgagaaagataagctttgtagtgcttgtcaagccgaagccataaacaccgcttgccatgcaaccaataggctttatttgcatcgtctcttgaaaaagactttctatgagctaattgttgggaggaagcctaatgttgcctattttcgaatttttggttgcaagtgttatatttaccgaaagggtgttagactaaccaaatttgaaagtcggtgtgatgaagggtttcttctaggtaatgcctcaaatagcaaggcataccgggtctacaataagaacaaaggtattgtggaagaaaccgccgatgttcaatttgatgaaactaatggctcccaagaggggcacgagaatttggatgatgtaggtgatgaaggcttgatgagagctatgaagaatatgtctatcggagatgtcaagcctattgaagtggaagacaagccatccacctccactcaagatgagccatctacttccgctacgccaagtcaagctcaagttgaggtggaggaggagaaggcacaagatccacctatgcctccaagtatacacaccgctctttccatggatcacccaattgaccaagtgttgggtgacattagtaagggtgttcaaactcgatctcgtgtcgcttcgatttgtgaacattactcgtttgtttcttgtcttgagccaaaacatatagatgaagctctttttgatccggattggatgaatgctatgcatgaagagctcaacagctttgcaagaaacaaggtgtggactttggttgaaagacctagagaccacaatgtcataggtacaaagtgggtctttaggaacaaacaagatgagaatgggttggtggtgagaaataaggcaagattggtggcgcaactcaaggatgggacgttcgtgagccaaaccaagtacatcaaggatctactcaagaggtttggcctggaggatgcgaagcccatcaagacacctatggcaaccaacgggcatctcgaccttgatgagggagtgatgcctccccgcactcgccatagtcgtcgtgcgcccactccggatcccatgagtgagcctgaagaatcgagtggagaggattacgctcaaagtgatgaagaggttgaggcaaatgttgagggggctagtgaggaggcaagtagagatgatgtcagtgatagtggggaggatgaggatgaacaaagtgatgagatgaaaattgatccctccatccagtttgtggtgaacatgaggaatccatcgcagtataccatcttgaggcatcatgatcagttcttgaggcctcgggtcaccccggatccccggtttcacaccgttttccagaagacagtgtatgagcaggtttatgtagggaaagcttttgcagagtataagtggatttcttggagagacatcaatgagactccagagtttaagagcttgcaggatctcttcaagactgttggcattgaccggattgtgaccctcaagcaagactataatgaagatttgatccggcagttctatgctacagtgtgggtggctggagactatagtgatatgaagtggatgtccgacacccttcagtgttctatctctcggaggcagttccggcggctccttaacatacgcttggattttggacatgatttgcatgaggcgcacacccacaatccgctctccatagactatctctctcagttctatgaagatggagcgcggtacacacatgggaaggttgccggcttgaggactatccccagtgtggttaacaggattgtgagagccactatcctccctcgccttggcaacaatgatgacatttggggggtggcttggcacgtcatcgatgcaatcattcagggtcgtcagttcgacattgtgtcttttatgatgcaagagattgccatctccaaggggaccttcactcagggaatctattatgccccttacatcatgaggttgattaaagacaagcttggggctgctgggcaaaatttgaagaagcacaagcagtacaagccccgcctttag

SEQ ID NO: 14054 - DNA, 1920 bp, Oryza sativa
  Clone ID: TFbOSC401826j.C1.o26.fg
atggctcgagccctcctccgaataacccgcagctattgcccgctctccccgtccccacgcctcccgccgccgctccaccaccgcggcgccgcgcctcctctccgcttccgcttcctctccctctcatcttcctcggccccatcctcctctgctgcggcgaccgcgaatagctcggatggtcccggtgagaagggcggcggcggcggcgggtgggatgactacctggggatgagcgacgacgagctgatggggcagtgcgagatgggcacgttcaaggcgtccggccccggcggccagcaccgcaacaagcgcgagtccgccgtccgcctccgccaccgccccactggcatcatcgcccaggctgtggaggatagatcacagcatatgaatcgagcatctgccttgtctcggcttcgaaccttgattgctctcaaaggttttgccatcaccggtagccccttaacggaagctgatcaccacaacctccaactcaatgctcaagccatgaatgcattgttcaactctttgagccaagaggagtttgatagagtgaacaaccttgagaccgcatatgagatatggaacaagttgagtgagattcatgagggcactagtgagtacaaggatgcaaagcttcatttcctcaagatccaatatgaggcgtttgccatgatgttgaatgcgatagtcaatgatctcaaggggcttgaggcaatctactccgacattaaggtggctcaaaagatgctatgggctctatcggacaagtatgagcacttagtcaccttcgtcatcaactccgacatgtcaaggatgacaccagaagagattgctcttcttgctagaatgttcaatgatctattaggaagaaatgagagaggaaagggctctaactccaatagaagaagaaataggagacccaacaagactttctccaactttagatgctttgagtgtggtgagaagggacactttgcttccaagtgtccttcaaaggatgatgatggagacaagtcatccaagaagaagagtggaggctacaagctcatgaacaagcttcagaaggagagaaagaagattaaggcattcattgggcaatgggactcaaatgaagagagctccgcttcatccgggttcgaagcagaagatagtgatgatgatgcaagctccaagaagaagaagatggccgtagttgctatcaaggaagctccatcactcttcgcttcactttacctcatggcaaagggttcttttaagcttgtgagtatgatcatgcgtagtgagaaagagattgtcaagttcaaggctctaaagaaggatcatgcttctttcgaggtcttgtatgaggagctaaagacttcacatgagagactcaccatttctcaggagaagattaaggaagctcatgacaccctcctttccattactcaacatggagctcatattgatgttggcatatcttgtgacttgcttgatgatagtactacctgtcatattactcatgttgcatcatctagcatctctacttcttgtgatgatcttatggatatgcctaactctagctcttgtgattctatttgtgatgcctcacttgttgttgagaacaatgagcttaaggatgcggaacaatacgctcagagtgagaaagaggaagaagaagaggttaagggggctgaggaagaagaaaatgatgatggtaacgatgatggcgaggatgatgagggacctcttgatccttccattcagtttgtgctcaacttgaggaatcccactcaatacaccattcttcgccatcatgatcagttccgggtgcccagagactcagatgatccaagattccacacagtttcagaaggccgtattatagagtgctatgaagtggatgtcagggcctatgcagtgttctatcactcggcgtga

SEQ ID NO: 14055 - DNA, 1392 bp, Oryza sativa
  Clone ID: TFbOSC27819j.C1.o1.fg
atggcaagccgacgtcgggcgtcaaccagcaatgaagaagcttcgacacctgacctaaccaccctggccagagttatggccactgaaacccaacttctacaagccattgcgaataaccaaggcaaccgcggcggatcgagctttggagagtttatgaggaccaagccacccacgttcgctacggtagacgagcctatggaggcagaagattggctacgtatcatagagaataaactgacccttgtccggggacccgctggtgattggtgggatacttacaaggaagctcgggaagaggatgatggagaacccacttgggaagagttcactgcagcatttcgcgagaacttcgtgcctactgcggtaatgcgtatgaagaggaacgagtttagaaggctgcgacaagggaacacaacggtgcaggaatatctgaaccgattcactcagttggcccgctatgcaattggagacctcgcagatgaagaagaaaagatcgacaagttcatagaagggctgaatgatgagttgcgtggacctatgattgggcaagatcaagagagtttccagagcctaatcaacaaggtcgttaggctggagaacgatcaaaggactgtagagcacaaccgcaaaaggaggctttctatgaatcgcctacctcagggagtgcctcagcgactcaaggaagccacttcgtctgggtggaaaacccctattgtggcaaccaaccgccccgctgcacctagcaaattcaacaggtcggttgcgattcagaaccgcacccctacaccaaccctggctgcccctggagccaagaagaatgtggactgcttgaactgcggggagtatgggcactacgccaacaactgccctcatccacacaaaactcctgtccgtactggcgctaatgcaatgattgttcgtggaactactacccctactaccggacgaggtctattcaagactccgcaaactaacaggaccgctaccggatttggacgcggacaagtgaaccatgttcgagctgaagaggcccaggaagatcagggcgtactaatgggtatgttctctgtcaattctaccccggttaaagtcctcttcgattctggtgcatcgcattcattcatatctctgaaggctagtcaaaagcacaacttaaccctagtgggacttagaaagcctatgatagtacactcacctgggggcgagataactggttgtggtgtttccctccaaccttatggttttgataccccagaccctggatgttgtcacgcccagaaattcccgaatagaattccaagcagaatgtgcattaaaatccccgtccaggaccagccggggtacacaaacgacaatgttgacattcagatccacgtcttacaaacatcataa

SEQ ID NO: 14056 - DNA, 1992 bp, Oryza sativa
  Clone ID: TFbOSC420879j.C1.o2.np
atgggcgtacctcgcttagagggatacgtcattgagctacaccggctgatgaggcatctgcgataccccagatttccgatctaccgagtgagacagtgtggatctgtttgggaggctcgggtcgaggttcacacacgagttccttcagagtcagactaccgcttcccgacccgccaccgtcacgacttaccggagaccgcgatgcaggatgcagcccgggaggccttcctccgacttagctctatccaccgagctgagttggtgagtactgagtttgctcaccacctgtttcgagaggagagcaactccgtctgcacagttcaggacacaccttgctgctacaacccgatagtgaccctactgtcacgatgggctgaggcagtagacgacttttacgaggaggctctgttagagatcgacgaccagcagaggcatatgggagagttagagaccgaggtgactgacctcacagtgcagcagcttcagctggaagaggagcaccaggcttggggcagtgagatagactcactaaaggcacagctccagctgggttccagtttggagactccgatccaagtcgactccgagacagaggggaccgacaccgagccagagatcgagccagacatcactaatccttcagaggatgagacccctgttccccgcatcaccttcctcggaggccctcgcaccctcagcactgcccgcaagagcacccgacccccgagcaagaagcccaagccagatccagaggccactacttccgagccgtggggactcaggatcatagagaataaactgacccttgtccgggtacgcgaagccgacaaagtgatcttcgcagtaaattaactggagggacccgctggtgattggtgggatacttacaaggaagctcgggaagaggatgatggagaacccacttgggaagagttcactgcagcatttcgcgagaacttcgtgcctactgcggtaatgcgtatgaagaggaacgagtttagaaggctgcgacaagggaacacaacggtgcaggaatatctgaaccgattcactcagttggcccgctatgcaattggagacctcgcagatgaagaagaaaagatcgacaagttcatagaagggctgaatgatgagttgcgtggacctatgattgggcaagatcaagagagtttccagagcctaatcaacaaggtcgttaggctggagaacgatcaaaggactgtagagcacaaccgcaaaaggaggctttctatgaatcgcctacctcagggagtgcctcagcgactcaaggaagccacttcgtctgggtggaaaacccctattgtggcaaccaaccgccccgctgcacctagcaaattcaacaggtcggttgcgattcagaaccgcacccctacaccaaccctggctgcccctggagccaagaagaatgtggactgcttgaactgcggggagtatgggcactacgccaacaactgccctcatccacacaaaactcctgtccgtactggcgctaatgcaatgattgttcgtggaactactacccctactaccggacgaggtctattcaagactccgcaaactaacaggaccgctaccggatttggacgcggacaagtgaaccatgttcgagctgaagaggcccaggaagatcagggcgtactaatgggtatgttctctgtcaattctaccccggttaaagtcctcttcgattctggtgcatcgcattcattcatatctctgaaggctagtcaaaagcacaacttaaccctagtgggacttagaaagcctatgatagtacactcacctgggggcgagataactgtgagtcatgcttgcatagatgtacctattcgtcttagggttgtggtgtttccctccaaccttatggttttgataccccagaccctggatgttgtcatttatctctccaaactaacccgaagattttccggcatcgattcctctcgtttggagtccgatctctctagtcca

SEQ ID NO: 14057 - DNA, 3156 bp, Oryza sativa
  Clone ID: TFbOSC25185j.C1.o23.fg
atgtcgggccaaacgggggatggcaaagatggtgataagggagctacgtttccttatgactatccatccacatctacctcttatgtgagtacctatagcggcaaagctccatacttcaatggcacggactatgccgcttggaaacataagatgaagatgcatttgaagtctattaatccatctatttggagaatagtcgaaaaaggctatgttttgcagaaacccgaggatcccaccaaggaggatgacgagaacgaacacaagaacgctcaagccgctaatgtaatacttagtgccttgagtggaagtgagttcaaccgcgtggacgacattgagagtgccaaggtgatttgggacacgcttcggaatttgcatgaaggcacggatagtgttcgcgagtccaaggtggagatcctcaaagggcaatttgagaggtttgtgatgttggatggagagagcccaagcgacatgtatgaccatttgagcaagatcgtcaatgagatcaagggacttggctccaaggacatgaccgatgaggttgtggtcaagaagatggttcgagcaatcactctaaggaactctaccttggtaactatcattcgtgagcgtccggactacaagactctcacacctcatgatttgctcgggcgcatccttgcccatgacatgcttgtgcaagagtccaaggaggtcattcaatacatcaaccaaagctcaacgacaagcatcaagaaggaagacttggcattgaaggcaaaggaagaagaagaagagagccgcaagagcaagagcaaggaggagatcgatgatgaagaaatgactctcttcgtcaagaagtttggcaagttcatgaggcgaagcggcttcttcaagggaagttcttccaagcatcactccaacaagttaagtggaagacattccgcaagggtgtgctacgtgtgcaaagagcccggacacttcattgcggattgcccttacctcaaggatggttcccacatcaaggaagataagatgggcgagaagaaggatgagaagaaggagaagcacaagcatagcaagcgggaacgttatggccaagctcaccttgggaagattttcggctccgactccgagtcaagctcaagtgatgaagaaggaattgccacgttcgccgtcaagccttcatcaccaccgaggctcttcaactactcaagtgatgaggatgctcccatttgcctcatggcaaaggagcctaaggtaccttcctccctcaagtcattcaatgttgatcttgttagtgatgaggaggatgatgttgaggatgaggttatggatgaggaattgttcaagtccataaccaaggagtctctaccacacttgagtgagttgcttgggagaattgaggatcaatatgcaacccttgagaggcaagaggcattactcattcgtgagaaagagcggtctcatgaactcaagggtgagcttgctaaggagagagagaaaaatgaggctttggtacggctttacaagcaaaccaaagagtctcacgctaatcttgaggtgacgaatgctcaacttcaagagagagtggatggcttggataaagcttatctctctcttgaagagaagttcgaaaccttaaagaatagtgtctctctccctagcgaggcatcttgttccaaaattgttccaagcaatgaaccatgtgctaggtgtaaggatattgatattgatgcatgtgctactaactctacttccttgagtgccttgcaaaagcaaaatgagaagcttatgggactccttcacaatggcttgcttaagtgccatatgggtagtaaggccctaaaggagtacctaggctatcaaagggaccacttcaaccatgaaggccttgggtatgttcctccaccaaaaggaaaggtggacaagagtgtgttgatcaagaagccccaaggtcttagcaactttgttaaggccaaaagtatccttcccaatggtcatgcatcacattgtttttttgatgcatcttatgttcttaggaagaatgctagtggtcgtgtggttgctaaatatgttggacctaggggcaaaaatgtttccatcaagagagttctttgggtacctaaggcacttgtcactaacatgagaggacccaagcaagaatatcactccggtggaagaagttgggtgattgatagtggatgcacaaatcacatgaccggagaagaatcaatgttttcttcccttgatccaaatggctcttcgcaagagaacatagtcttcggggacgatggaaagggaaaagtaatgggattgggtaagattacaatctccaatgatctttccatctccaacgtcctcttgtctttaagggtgttctcaaggacaagcttttatcttgtggatttttcctcaactaaagccaaacataagacatgcttagtggctaagtccgacatggggtggctttggcatcggaggctagcctatgtcggtatgaggaatcttcacaagcttctaaagcacgatcacatccttggactaacaaatgttcaatttgagaaagataggatgtgtagtgcatgtcaagccgggaaacaaattggagcacatcacccggtcaagaacgtaatgactactacaagaccgttggagcttcttcacatggacctcttcgggccaattgcttatctaagcattggaggtaacaaatatggtcttgttattgttgatgacttttcacgcttcacgtgggtgttcttcttgcatgacaagagtgagacacaagccatcttcaagaagtttgaaagaagagcccaaaacgagttcgacctcaagatcaagaatattcggagcgacaacggcaaggagttcaagaacacttgcatcgagagtttccttgatgaagaaggcatcaagcatgagttctcagctccatactcacctcaacaaaatggagtagccgagaggaagaattggactctcatcgagatggcgaggacaatgttggacgaatacaagacatcggaccgcttttgggccgaagccgtcaacaccgcatgtcacgccatcaactgcctctatcttcaccgccttcttaagaagactgcctatgagcttcttaccggtgaagaggaggaccctagcgaagcaatcaaaaggttggctcttggagac

SEQ ID NO: 14058 - DNA, 4422 bp, Oryza sativa
  Clone ID: TFbOSC29459j.C1.o2.fg
atgaccaggaggagcgctaacaccggtgatggcaaccaacccgaaggcagcaaccaccaccaccagggcagcccacctccacctccacctcctcctccaccaccaccaccagataccaacgccattctcacccaaatcctcgcccagcaagccaacatgatgactgctttcctccaccacctccaaaatccgccacaacagaatgctccaccaccacctccccaacactctaaactcgccgagttcctccgcatccgcccacctaccttctctagctccaacaaccccgtggatgcgttggattggttgcatgccgtggggaaaaagctagacactgtgcagtgcagcgatgaggagaaagtcatcttcgccgctcaccagctgcagggacccgcatctctatggtgggaccatttccaggctacgcagccagagggacagcctattacttgggctcgcttcaccgccgctttccgaagaacccatgtgcccgccggagtcgtggcccttaagaaaagagaattccgagagttgaagcaaggcaaccgctccgtgatggagtatttgcatgagttcaacaacctggcccgttacgctccggaggatgtgcgggaagatgaggagaagcaagagaagttcctggcaggaatggaccctgagctgtccgtccgtctagtctctggggattatccggatttccaacgtctggtggacaagagcatccgcttggaagccaagcacaaggaactggagtcgcacaagcgccgcttggcgaatttccgcaatcaacagggtgctaaccaaagggtccgttacaccaatccctatccagggggatcctcctcgcagcagcaacaacagcagcagcaacctcgctccgcgcctcgacctcaattcgtggtgcgcgtcccacagccgccgcaacagcagagtcaacaagggactcgtgcgccccgtcctcctacgccaactgtgcagcctggtcaaggccgcagggacgctcaaggtccgcagcgtctgtgcttcaactgcttcgagcccgggcacattgcggataaatgcccgaagccaaggcgtcagcaaggccaagcgcctccccgccccaacaacggtggtaaggacgtcattcggggtcgtgtgaaccatgtgacggccgaggacatgctgacaactccagacgtcatcgttggtacgttcctcattcattccatccctgctaccattttgttcgactctggagcttcccactcgtttatatctgtgccattcgtggggagaaatcagttgggggtagaaagacttagaaaccctctgctcatcaccacccctggaggggttatgacagcaaagtactatagccctgccgttcctatagaaattcaggggattccttttccctcggatctgattctgctagacaccaagaacttggatgtgatccttgggatgaattggttggctcaattccaaggagtagtggattgcgcaagacgcactgtcactctgtaccgagggccggaacaaccggttgttttctttgcacccccaacctctgtcaaaagttcagaacttcatcagataggactgtcagaaatccccatcgtcagggagttcggagacgtgtttccggaagaactacctggtatgccgcccaagcgagagattgagttccggatagatcttgctccaggaactactcctctgtacaagcgaccctaccgtatggtagcaaatgaactggccgaagtcaaaaaacagctggaagagttgaaagaaaaggggtatatacgtccgagtacttccccctggggtgctcctgtgatttttgtggagaagaaagacaagacgaagaggatgtgcgttgactacagagctctcaatgaagtcaccatcaaaaacaagtaccctcttccccggatcgatgatctgttcgatcagcttaaaggtgccactgtattctccaagattgatcttcgttccggatatcaccaattacgtattcgtgaagaagatatcccgaagaccgcatgcaccacgcgatacggactgtatgaattcacggtgatgtcgttcggtttaaccaatgcacctgccttcttcatgaacttaatgaacaaagtgttcatggaatacttggataagtttgtggtggttttcattgatgacattctgatatactcacaatcagaggaagaccatcagcaccatctccgtctggtgttgggaaagttgcgggaacatcaattgtatgccaaacttagcaagtgtgagttctggttgtccgaagtcaaattcttagggcacgtgatatctgctaaaggagttgctgtggaccccgaaacagtgaccgccatcactgattggaagcaacccaagacagtcactcaagtccgcagtttcttaggtttggcaggatactaccgaaggttcatcgagaacttctccaaaatcgctcgacccatgacacagttgttgaagaaagaagagaaatttgtgtggagcccgcaatgcgagaaggcgtttcaaactctcaaagaaaagctggtttcctcgccggtgttaatcttgccggatactcacaaggacttcatggtgtattgtgacgcttcgcgccaaggattggggtgcgtgctcatgcaggatggtcatgtggtggcctatgcctcacgccagctacggcctcatgaaggcaactaccctactcatgatttggagttagccgcggtgtcggacctgaatcttcggcaaaggagatggttagaactcatcaaagattatgatgtgggaattcactatcatcctggtaaggccaacgtggttgccgacgctctaagtcgaaaaagccattgcaacactcttaacatccgtggcattccacccgaacttagtcaacagatggaagccctgaacctaagcatagttagtcgcggattcttggctgcgttggaagccaagcctaccttgctcgatcaaatccgcgaggctcagaagaacgatccggacatgcatgggctcctcaagaatatgaaacagggtaaagccgttggtttcacagaggatgaacacggaaccctatggaacggaaatcgagtatgcgttccagataacggagaacttaaacagctgatacttcaggaagcccacgaaagtccttattccatccaccctggcagtacgaagatgtacctagacttgaaggagaaatactggtgggttagtatgaagcgggaaattgcagagttcgtggccctttgtgatgtgtgccagcgtgtcaaggcagagcaccaacgaccggccggacttctccaacctctccaagtaccagaatggaaatgggatgaaattgggatggatttcatcaccggacttccaaaaacccaaggtggatatgattctatatgggtagtcgtggatcgattaaccaaggtagcccgatttattcctgtgaagaccacctatggagggaacaaactagccgaactctacttcgctaggatcgtaagtctccatggcgttcccaagaaaatcgtatctgataggggaagccaattcacctctcacttttggaagaagctccaagaagagctgggtacccgattaaacttcagcaccgcgtatcacccgcagacagatgggcagaccgagcgtctaaatcagatcctagaagatatgcttcgcgcatgtgtcctagatttcgggaagacctgggataagagtctcccctatgccgagttctcctacaataacagctatcaagccagcatacaaatggcaccttatgaagcgttgtatgggcgcaaatgtcggacaccgctattgtgggaccaagttggggaaagccaagtgttcgggactgatatcctgagagaagctgaagcgaaagtcagaaccattcgggataatctaaaggtagcacagtcccggcagaaaagttatgcagataaccgatgccgtgacctggaattcgccgtggatgattttgtgtaccttcgggtcacgccattgcgaggtgtacacaggtttcagacaaaagggaagctcgcacctcggtatgtgggtcctttccgtatcgttgctcggcgcggagaagtcgcttaccagttggagctgcccgcctccttgggcaacgtgcatgatgtgttccatgtgtcgcaactcaagaaatgtctccgagtgccatccgagcaagccgactcagagcaaattgaagttcgcgaagatttgacctatgtggagaggccagtgaaaatcctggacaccatggagcgcaggaccaggaaccgggtaatccgtttttgcaaagtccaatggaacaaccacgccgaagaagaagctacttgggagcgtgaagacgagctgaaggcagcccatcccgatctcttcgccagttcttccgaatctcggggtcgagattccgtttaa

SEQ ID NO: 14059 - DNA, 3771 bp, Oryza sativa
  Clone ID: TFbOSC400261j.C1.o12.gm
atggccggcttttctttgatcagttgcgctgtgggtatcatcttcttctccgtttgctacctgcctgcggctcctgccgccgccttgtccttcaactactccaccttcagctcggacaaccaggaggacttcacattcgaaggcaacgcctccatccacgacgggtgtattgatttcgttgcgaacgggacctggggcaggggctacaggccctacagcaccggacgggtgtcctacaaattgccggtgcggctctgggacgctgccaccggcgaggtggccagcttcaccacaaccttctccttcaacatcacgccgatgaatattagcgacaagggcgatggcatggccttctttctcgtcagctatccatcaaggatgccgctgaccgccgacggcgacactctcggcctcgtgagcaacaaacccgaaaacgctccggccggcggcgaccaattcgtcgccgtcgagtttgacacctacccaaaccccggcttggaccctaacgctaccggtgaccacatcggcatcgacatcaactcagtccgatcgttgacgaccgaacccttgaccaactccagcctcatcggtaacatgaccgccatcgtccactacgatagcagttcgagcatcctgtcggtgaagctgtggataaatgacacgacgaagccgccttacaaccttagctacgaaattgttgatctcaagaaaaaattgccggagaacgtcaccatcggcttctcggcggcaacgggcgcatcagatgagctacaccagctgacttcttggtacttcaactcgagctcgtcgttcgagcataagcatggacgtgccggggttgtagcgggagccaccgtcggcgcgacgttgttcgttgtgctgctcttcactgctgcagctatcctcatacggcgacgtcggatcaaaaacaggaaggaggcagaggatgagcaggacataagctcggacagcgaagacaatgacggcgagcccatcgtggagattgagatggggactgcgccaaggcgattgccatactatgagctcgtcgaggcgaccaagaacttcgcggtggaggagaagctcgggcaaggcggcttcggttcggtgtaccgaggctacctaagagagcagggcctcgccgtcgccattaaacgcttcgccaaagattcctccaagcaagggaggaaggagtataagtcggagatcaaggtgataagccggctgcgccaccgcaatctcgtgcagctcgtcggctggtgccatggacgcaacgagctcctccttgtctatgagctcgtccccaaccgcagtcttgacgtccatctccatggcaatggcaccttccttacttggccaatgaggatcaagattgttctcgggctcggatcagcactactctacctccaccaagagtgggaacaatgtgtcgtgcaccgtgacatcaaaccaagcaacgtcatgttggatgaatccttcagtgccaagctaggtgacttcgggctcgcgaggctcatcgaccacaccatcggtataaagacaatgaccgccatgtcaggaacaccgggctaccttgaccctgaatgtgtgatcaccggtagagcgagtgccgagtcctacgtttacagtttcggcattgtcctactggaggtggcatgcgggaggagaccgatgagcctactagacagccagaataacggcgtcttccgactggttgagtgggcctgggatttgtatggcaagggagatgttctcatggccgccgacaagcgtctcgacggcgactacgattctgcggagatggagcgtgtcatcgctctcgggctctggtgcgtgcaccctgacccaagtgtgcgaccgtctatcagagacgccatggccatactccagtcgagtggaggccaactgccagtgctatcggccaagatgcccgtgccaatgtacgcgccgccgatggcctcgtttgacgggctagctgtttgcgtcatctacagggatgtcgtcgtcctcaggtgtgacgcagtcgtcgtccacatcgacgacgagcggccatgctattcacacctcgtgttcctcgactactccatcccgatcgtcagcgtgcaccggcaatcgggagagcaggtctccggaacctctgccttcgacgtcctgcaccgggagaaggcggcaataaggcgctgtgattttactatggctggttttgccgatgcactgaggccggataaattcaccggtgtgcactttaagagatggcagatcagggtcgctttgtggctgacagctatgaaatgcttctgggtgagtactggtaaacctgaaggaattcttgctgctgatcagcataagcaattcgagaaagccactactctctttgtgggatgcattcttagcgttcttggcaatcgtctggtcgaggtgtatatgcacatgaccaacgctaaggagttgtgggatgcactgaatactaaattcggtgctactgatgctagcaatgatctgtacatcatggagcagtttcatgactacaggatggctgacaaccgttctgtagtcgaacaggctcatgaggaatactccgttgaggggttgatagtgtctcttgatgttgaggagaaagctcgggaaaaggacgccgcgtctaagggcgacggtgggcagtccagtgccaatgttgtgcacaaggcccagaacaagagcaaggggaaatacaaagctcagcagaccaccaacttcaagaagcagaagaagaacaacaacaatcctaatcaggatgagaggacttgctttgtgtgtagccaacctagtcatctggctaggaagtgtccacagcgcaaggggatgaaggcacctgcagggcagacttctaagtctgctaatgtgaccattggcaacactggagatggaagcgggtatggtcgcacggggttccaccgtcctaatggggaatgggtcacatgcttctgttcatggtgttggcacggtagatctgaagtttacttcgggaaagatcgtgcagctgaagaacactactggaaggaggctgtccgtagtgaaatggattccattatcgctaatggaacttgggaggtgacagagcgaccctatgggtgtaaacctgtggggtgcaagtgggtgttcaaaaagaagctgaggcctgatgcctcacatggtcttctcgttcatcaaatggacgttaagacaacttttcttaatggagagctggatgaggagatctatatggatcaacctgataggtttgtagttgaaggtcaagaagacaaggcttcgcagtcaatgaggcagataaatgtgtatactatcgccatggtgggggtgaaggagttattctgtgcttccatcgccgtcgctcgggaagaccgccgtcgtggtcgccaagtcgtcgccgtcctcgtccgccccttcgctgtcgccggagatcgccggagcttcatcgccgccgtcgacccgaaggtttcctccgtttcctcctcgtcgccgtcgccgtccgttgatcttccgccgccgttttggtcaccggtgagttcgccgtgtcgtcctctacgtgctggtggcctccgtttgcgtcctagtgccgccgttcgccggcgagcgtgcgccgcccgagctgtccgctccgccgagcccccgccgctgtcggtgacgtcattgccgacgtcatcggggtcgtccgccgtgagccggtcgtggaccgttcgatctcggccgtccgttttggattggatcgatctcggccgtccgtccgcgtga

SEQ ID NO: 14060 - DNA, 5724 bp, Oryza sativa
  Clone ID: TFbOSC400690j.C1.o5.fg
atgtcgggccaaacgggggatggcaaagatggtgataagggagctacgtttccttatgactatccatccacatctacctcttatgtgagtacctatagcggcaaagctccatacttcaatggcacggactatgccgcttggaaacataagatgaagatgcatttgaagtctattaatccatctatttggagaatagtcgaaaaaggctatgttttgcagaaacccgaggatcccaccaaggaggatgacgagaacgaacacaagaacgctcaagccgctaatgtaatacttagtgccttgagtggaagtgagttcaaccgcgtggacgacattgagagtgccaaggtgatttgggacacgcttcggaatttgcatgaaggcacggatagtgttcgcgagtccaaggtggagatcctcaaagggcaatttgagaggtttgtgatgttggatggagagagcccaagcgacatgtatgaccatttgagcaagatcgtcaatgagatcaagggacttggctccaaggacatgaccgatgaggttgtggtcaagaagatggttcgagcaatcactctaaggaactctaccttggtaactatcattcgtgagcgtccggactacaagactctcacacctcatgatttgctcgggcgcatccttgcccatgacatgcttgtgcaagagtccaaggaggtcattcaatacatcaaccaaagctcaacgacaagcatcaagaaggaagacttggcattgaaggcaaaggaagaagaagaagagagccgcaagagcaagagcaaggaggagatcgatgatgaagaaatgactctcttcgtcaagaagtttggcaagttcatgaggcgaagcggcttcttcaagggaagttcttccaagcatcactccaacaagttaagtggaagacattccgcaagggtgtgctacgtgtgcaaagagcccggacacttcattgcggattgcccttacctcaaggatggttcccacatcaaggaagataagatgggcgagaagaaggatgagaagaaggagaagcacaagcatagcaagcgggaacgttatggccaagctcaccttgggaagattttcggctccgactccgagtcaagctcaagtgatgaagaaggaattgccacgttcgccgtcaagccttcatcaccaccgaggctcttcaactactcaagtgatgaggatgctcccatttgcctcatggcaaaggagcctaaggtaccttcctccctcaagtcattcaatgttgatcttgttagtgatgaggaggatgatgttgaggatgaggttatggatgaggaattgttcaagtccataaccaaggagtctctaccacacttgagtgagttgcttgggagaattgaggatcaatatgcaacccttgagaggcaagaggcattactcattcgtgagaaagagcggtctcatgaactcaagggtgagcttgctaaggagagagagaaaaatgaggctttggtacggctttacaagcaaaccaaagagtctcacgctaatcttgaggtgacgaatgctcaacttcaagagagagtggatggcttggataaagcttatctctctcttgaagagaagttcgaaaccttaaagaatagtgtctctctccctagcgaggcatcttgttccaaaattgttccaagcaatgaaccatgtgctaggtgtaaggatattgatattgatgcatgtgctactaactctacttccttgagtgccttgcaaaagcaaaatgagaagcttatgggactccttcacaatggcttgcttaagtgccatatgggtagtaaggccctaaaggagtacctaggctatcaaagggaccacttcaaccatgaaggccttgggtatgttcctccaccaaaaggaaaggtggacaagagtgtgttgatcaagaagccccaaggtcttagcaactttgttaaggccaaaagtatccttcccaatggtcatgcatcacattgtttttttgatgcatcttatgttcttaggaagaatgctagtggtcgtgtggttgctaaatatgttggacctaggggcaaaaatgtttccatcaagagagttctttgggtacctaaggcacttgtcactaacatgagaggacccaagcaagaatatcactccggtggaagaagttgggtgattgatagtggatgcacaaatcacatgaccggagaagaatcaatgttttcttcccttgatccaaatggctcttcgcaagagaacatagtcttcggggacgatggaaagggaaaagtaatgggattgggtaagattacaatctccaatgatctttccatctccaacgtcctcttgtctttaagggtgttctcaaggacaagcttttatcttgtggatttttcctcaactaaagccaaacataagacatgcttagtggctaagtccgacatggggtggctttggcatcggaggctagcctatgtcggtatgaggaatcttcacaagcttctaaagcacgatcacatccttggactaacaaatgttcaatttgagaaagataggatgtgtagtgcatgtcaagccgggaaacaaattggagcacatcacccggtcaagaacgtaatgactactacaagaccgttggagcttcttcacatggacctcttcgggccaattgcttatctaagcattggaggtaacaaatatggtcttgttattgttgatgacttttcacgcttcacgtgggtgttcttcttgcatgacaagagtgagacacaagccatcttcaagaagtttgaaagaagagcccaaaacgagttcgacctcaagatcaagaatattcggagcgacaacggcaaggagttcaagaacacttgcatcgagagtttccttgatgaagaaggcatcaagcatgagttctcagctccatactcacctcaacaaaatggagtagccgagaggaagaattggactctcatcgagatggcgaggacaatgttggacgaatacaagacatcggaccgcttttgggccgaagccgtcaacaccgcatgtcacgccatcaactgcctctatcttcaccgccttcttaagaagactgcctatgagcttcttaccggtgaagaggaggaccctagcgaagcaatcaaaaggttggctcttggagacgtacgtcctagggagccacaacaaggggcctcttcctcaacacaagtggagccacgtatatcgacccaagccgacaatccctctacttcaagcttggatcaaggtgaagaaggcgagcaagtgccacccgctccgataaatctagctcacccaagaatccaccaaagtatccaacgagatcaccctaccaacagcatcttaggagacatcaacaagggagtatccactcgttctcgtattgtaaatttttgtgagcattactcgtttgtgtcttctcttgaacctctaagggtaaaagaagctcttaatgatccggattgggtgatggcgatgcaagaggagttgaacaatttcacctggaatgaagtgtggactttggtggagcgatctcgtcaaaatgtgattggcacaaagtggatctttcgcaacaagcaagacgaggccggggtcgtgataaggaacaaggcgaggatgtattttagagtcgttttgggacgtgacaagatcgggaaagctgattcaactctttttactaagaggcataataatgatatttttgtgtgccaaatatatgtcgatgacattgtatttggttctactaacaagtcttttagtgaagagtttagtaggatgatgaccaagcgttttgagatgtccatgatgggtgaattgaagttcttcctcggccttcaaatcaagcaactcaaggaaagaactttcatttgccaaacaaagtatttgaaggacatgctcaagaagtttggaatggagaatgcaaagccaatccacactcccatgccatcaaatggccacctcgacctcaacgagcaaggtaaagacgtcgaccaaaagggagcgaggtttgatctcattggctatgccgatgcggattatgccgggtgcaaagtggataggaaaagcacatcgggtacttgccaattcttgggtaggtcccttgttttttggtcttccaagaagcaaaactccgtcgctctatccaccgccgaagcggaatacgtttcggcggggagttgtgctcaacttctttggatgaagcaaaccttgagagactatggcctcaatgtgtccaaaatcccactcctatgtgacaatgagagcgccattaagatagccaataatctcgtccaacattcccgaaccaagcatatagatattcgccaccatttcttgagagaccattccacaagtggcgacatagacatccaacattgtatcctcatgatcaagggtcagttcaagaatcaagtttactctcgccgtggatcaatgagttctcgaggtcgctctccctcttccaaggctcgtcatgctatacggcgtatgtccgaatcccgcaaagatgccattgacgcgcaagctcaagcctctgaacaagcagctcaagtggctaatgtggagcgaggtgctccccttactcctcgccgcagccgagtcaatggagaaggatcaagtgcacctgctagcaaagtgaggagaggcaatcctacgggttcttctgagcagggtcaagtatatgaggagttgcatgatccaattattgatgaagtcattgaagcttgtgcttggcaaaacttgaaggaactcatgggcttgcaatacccatggtgcaaagagatcatcgcacaattctatgccaccgtttactttgagccaatcaaagaaaagactattcattggatgacagatggcatcatatactcagtgacatatgccaagtttgctgccattttggggtttccggctcgctctcgcaccaatcatgtcaagattcatgatgagaagcccatggacacaaattctcttcacttcttgtaccaagatgtggactatgagttaggaaccatcaaaggtcttcgtcccttctatgcctatctcaacaagcttttgcacaaaactctctatcccaaggaaggtgatgctagcaacgtccttgcctatacaagaaatttgctttacaagatgaaggctcacccacagctctttgacgcctttgacttcatctttgaagaaatccggcttatctccatgatgccgaaacgaggacttggctatgggccctacataatgaagatgattgagattgtgtcaaagaggaagtttcacaaggaagtggctcacaccggttaccaagtccgtcccatcaaggctgctgctgtgccggctggacgaaccactcgtgcttcttctcatgccggtccctccactactgtcaccacgtcggactccaactcttccttgaggttcttcaagtctatcttcaacttatgcaagaccatctcagtttggcaagccaaggaacgcagagcaaggaagaaggacactcggcggatcaagaacctccttcacaacgccaatttgccatgttctcccgatggttctgaggttgaggacagtggggaggatgtgattgaggacccttttgcagctgaggcaagctcctctcgtgcggatcgtggcaaggctcctttggaggaagaagaggaggaggaaggtgactatgctgaggagtcaagtgaggaggatgaggattctgatgaagatgagtga

SEQ ID NO: 14061 - DNA, 3672 bp, Oryza sativa
  Clone ID: TFbOSC401006j.C1.o6.fg
atggcatttaaagcagctcatgatagagaaaactggaatgggggcaggatttgcaagttggagagcaaggtgtaccatctgcagaaggaactggccgagcttaagggagaagcaccaccgccagcacccaagcttcgtctcaccatggtgaacacccgcactggaagtggaagtggaagtggaagtggtcacaatgaaggagatcccacacttgctcaagttttggctcagcaaacccagttgattaatttactagtacatcaagcgcagaaccagcaagcaaataacaacaatcaaccaccacctccacagaacaagttggcagattttcaacgtgtgagaccacctaccttctcaagcaccactaacccacctccacagaacaagttggcagattttcaacgtgtgagaccacctaccttctcaagcaccactaacccagtagaggcaggtgattggctgcatgctattgaaaagaagttagatttgattcagtgcaccgagcaggagaaggtttcctttgcttcgcatcagttgcatggtcctgctgctgagtggtgggatcactttcgtcaaaacagagctgtgggagagcctatcacttggcgggagtttactgctgctttcaagaagacacatataccatcaggtgttgtggcacttaagaagagagagttcagagcactcaatcagggatcctgttctgtcatagagtacctccatgactttaatcgcttagctcgttatgccccagaagatgttcgcactgacgaagaacgtcaggagaagtttttagagggactgaatgatgagttgtcttatgcattgatggctatggagtaccgggatttccagcagttggtggacaaggcgattcgtcaagaagacaagtacaataggatggaacagaagaagcgtagggctgctcatttcaaggctcaacaggctccaactcagaatcagcctgtcaggaaggaacagggaagcaagccaggggtgtgcttcaattgtggtcatccaggacattatgctgataagtgtccaaaggctcgacgtgtgaagaatgctcctgtccagaacaactccaatgctacagcactgaaggctcgtgttaatcacgttgcagctgcagaagcccagaattcacctgatgtggttttgggtacatttcctgttagctctgtacccgcaactgtgctttttgattccgttgctttgcaagagatcccaatagtacaagactacccagatgtgttccctgaggatttgccaggtgctacagtcttctccaagataaatctttgttccggatatcaccaactccgaatccgtgaggaggatataccaaagaccgcctttacaacacggtatggtttgttcgaatgtattgttatgtcgtttggactcactaatgccccggcctttttcatgaacttgatgaacaaagtgtttatggaatatctggagaagtttgtcgtggtgtttattgatgacatccttatctactccaagactaaagaagagcatgaagagcatcttcgtcttgctttagagaaactacgtgagcatcagctctatgccaagtttagtaaatgtgaattttggttgcccgaagtgaagttccttggtcatgtcatctcagctggaggagttgccgtggatccaagcaatgtggagtcagtgctaaattggaagcagcccaagacggtttcagagattctccttggtcttgcggggtattaccgaaggtttattgagaacttctcaaagattgctagaccagtgactcgactgcttcagaaggatgtgaagtataagtggacggaagagtgtgagcagagttttcaagaattgaagaaaaggctagtgactgcgctagtgttagtcttgcctgatccaaggaaaggtttccaggtgtattgtgatgcatctagacttggtttgggttgtgttttgatgcaagatgggaaggtggtggcctatgcatctaggcagttacgctctcatgagaataactatccaacgcatgacctagagttggcaactgtggttcatgcatcgaagatttggcgtcattacctttttggtaaccgtacggagatctatacggatcataaaagtttgaagtacattttcactcaacctgatctaaacatgcgtcaacatagatggctagagttgatcaaggactatgatatggaaattcattatcatccagaagctaaacctactctgtttgatcaagttagagaggctcaagtgaatgatcccgatatccaagaaatcaaaaagaacatgagaagaggaaaagccatcggttatatagaagatgagcaaggaattgtgtggctaggagaaagaatttgcttgcccgataataaggagttgaatgatactatcatgaaagaagctcatgaaactttgtattccattcatcctgggagcactaagatgtatcaagacctgaagcaacaattctggtgggccagcatgcgacgagagatagcggaatatgtggctttatgtgatgtgtgtcagcgagtcaaggcggagcatcggaagccagccggtctgctgcaaccgttgaagattccaaagtggaaatgggaggaaataggaatggattttatcaccggtctacccagaacatcggcaggacatgattctatttgggtagtggttgacaggcttactaaagtcgctcatttcatacctgtcaaaacaacttacacgggaaataagcttgcagagttatatatggcaagagttgtatgtttacatggtgctcccaagaaaatagtatcagacagaggtagtcagtttacttcgaagttttggcagaaactacaagaagagatgggtactcgtttgaattttagtactgcttatcaccctcaaactgatggtcagacagaaagagtaaatcaaattttagaagacatgttgagagcctgtgttctagatttcggtggaagttgggataagaatctgccgtacgctgaattctcttataacaacagttatcaagctagtcttcaaatggctccatatgaagcattgtatggtcggaagtgtcgtacaccgctcctttgggatcaaatcggtgagcgtcaagtttttgggacagatatattgcgagaggcagaagaaaaagtgaagattatccaagaaaggttgcgtattgcccagtcgcgtcagaagagctatgcagacaattgtcgtagggatttgactttcgaagaaggggattatgtatacctatgggttacaccgctgcggggagttcatcgttttcagaccaaagggaaattggcaccgcgatttgtgggaccttttaagagagagttgaagaaatgtttgcgtgtacctacggaggaagcagatcctaagcatatagagcttcaagaagatttaacttatgttgagaagccaatcagaattctgcagtttccgatgttccggaggagagcgtttacgtttagaaaggttcaaaagcgtttgaagaaggtcaaggtgggttgtgagcacatggttttgatggtcgtgctcatgacaattaaggaccggttcgcgagctactattgtgaaacatttaccatgccaaccacaagtcagtgtgggcaacggctttaccttttgtatagcatggttcattacggggtgccagactga

SEQ ID NO: 14062 - DNA, 4608 bp, Oryza sativa
  Clone ID: TFbOSC900295j.C1.o18.fg
atggccggcttttctttgatcagttgcgctgtgggtatcatcttcttctccgtttgctacctgcctgcggctcctgccgccgccttgtccttcaactactccaccttcagctcggacaaccaggaggacttcacattcgaaggcaacgcctccatccacgacgggtgtattgatttcgttgcgaacgggacctggggcaggggctacaggccctacagcaccggacgggtgtcctacaaattgccggtgcggctctgggacgctgccaccggcgaggtggccagcttcaccacaaccttctccttcaacatcacgccgatgaatattagcgacaagggcgatggcatggccttctttctcgtcagctatccatcaaggatgccgctgaccgccgacggcgacactctcggcctcgtgagcaacaaacccgaaaacgctccggccggcggcgaccaattcgtcgccgtcgagtttgacacctacccaaaccccggcttggaccctaacgctaccggtgaccacatcggcatcgacatcaactcagtccgatcgttgacgaccgaacccttgaccaactccagcctcatcggtaacatgaccgccatcgtccactacgatagcagttcgagcatcctgtcggtgaagctgtggataaatgacacgacgaagccgccttacaaccttagctacgaaattgttgatctcaagaaaaaattgccggagaacgtcaccatcggcttctcggcggcaacgggcgcatcagatgagctacaccagctgacttcttggtacttcaactcgagctcgtcgttcgagcataagcatggacgtgccggggttgtagcgggagccaccgtcggcgcgacgttgttcgttgtgctgctcttcactgctgcagctatcctcatacggcgacgtcggatcaaaaacaggaaggaggcagaggatgagcaggacataagctcggacagcgaagacaatgacggcgagcccatcgtggagattgagatggggactgcgccaaggcgattgccatactatgagctcgtcgaggcgaccaagaacttcgcggtggaggagaagctcgggcaaggcggcttcggttcggtgtaccgaggctacctaagagagcagggcctcgccgtcgccattaaacgcttcgccaaagattcctccaagcaagggaggaaggagtataagtcggagatcaaggtgataagccggctgcgccaccgcaatctcgtgcagctcgtcggctggtgccatggacgcaacgagctcctccttgtctatgagctcgtccccaaccgcagtcttgacgtccatctccatggcaatggcaccttccttacttggccaatgaggatcaagattgttctcgggctcggatcagcactactctacctccaccaagagtgggaacaatgtgtcgtgcaccgtgacatcaaaccaagcaacgtcatgttggatgaatccttcagtgccaagctaggtgacttcgggctcgcgaggctcatcgaccacaccatcggtataaagacaatgaccgccatgtcaggaacaccgggctaccttgaccctgaatgtgtgatcaccggtagagcgagtgccgagtcctacgtttacagtttcggcattgtcctactggaggtggcatgcgggaggagaccgatgagcctactagacagccagaataacggcgtcttccgactggttgagtgggcctgggatttgtatggcaagggagatgttctcatggccgccgacaagcgtctcgacggcgactacgattctgcggagatggagcgtgtcatcgctctcgggctctggtgcgtgcaccctgacccaagtgtgcgaccgtctatcagagacgccatggccatactccagtcgagtggaggccaactgccagtgctatcggccaagatgcccgtgccaatgtacgcgccgccgatggcctcgtttgacgggctagctgtttgcgtcatctacagggatgtcgtcgtcctcagatctaatgatgtgttactgctagtatacatctgcaatgttatgatttatttatggaatatattaaatcattatatgcctatattctcaacaatccaaaaaccttattataggcgctgtgattttactatggctggttttgccgatgcactgaggccggataaattcaccggtgtgcactttaagagatggcagatcagggtcgctttgtggctgacagctatgaaatgcttctgggtgagtactggtaaacctgaaggaattcttgctgctgatcagcataagcaattcgagaaagccactactctctttgtgggatgcattcttagcgttcttggcaatcgtctggtcgaggtgtatatgcacatgaccaacgctaaggagttgtgggatgcactgaatactaaattcggtgctactgatgctagcaatgatctgtacatcatggagcagtttcatgactacaggatggctgacaaccgttctgtagtcgaacaggctcatgaggtacaaaccatggctaaggaactcgaactccttaagtgtgtcttacccgacaaatttgtggccgggtgcattattgcgaaactacctctatcttggagaagtttcggtactgcactcaaatacaagagacaggaatactccgttgaggggttgatagtgtctcttgatgttgaggagaaagctcgggaaaaggacgccgcgtctaagggcgacggtgggcagtccagtgccaatgttgtgcacaaggcccagaacaagagcaaggggaaatacaaagctcagcagaccaccaacttcaagaagcagaagaagaacaacaacaatcctaatcaggatgagaggacttgctttgtgtgtagccaacctagtcatctggctaggaagtgtccacagcgcaaggggatgaaggcacctgcagggcagacttctaagtctgctaatgtgaccattggcaacactggagatggaagcggatttttctatgtgtacttgttgaaaacgaaagacgaggctctagactattttaaaacttataaggcagaagttgaaaatcaacttgacagaaagataaaaagacttaggtctgatcgtggtggagagtttttctcaaacgagtttgacttattctgtgaggaacatggcattatacatgagaggacgcctccctattctcccgagtctaatgggattgccgaaaggaataaccgcacactgactgacttggtgaatgccatgttggacaccgcgggactacctaaggcatggtggggggaggcattgttgacctcgaatcatgtgttaaacagagttcctaacagaaataaggacaaaacaccatatgagatatggattgggagaaaaccatcactttcttacttgcgcacatgggggtgcttggcgaaagtcaatgtactaataacgaagaagcgcaaacttggacctaagactgtggactgtgtctttctgggatatgctcatcacaacattgcctatagatttttaatagttaaatctgaggtaccagacatgcatgttggtacaattatggagtctcgtgatgctaccttctttgagagttttttcccaatgaaggatacacatagtagttctagccaaccctgtgaaataattcccagttcaatcacaccaccagaacaaactgaacatacacatgaacatgtcactgaggaggatgacagtgaagctcctcgaaggagcaaaagacaaaggacggctaagtcttttggtgatgatttcactgtgtacctcgtggatgacactcctaagtcaatttcagaagtatatgcatctcctgatgcagactactggaaggaggctgtccgtagtgaaatggattccattatcgctaatggaacttgggaggtgacagagcgaccctatgggtgtaaacctgtggggtgcaagtgggtgttcaaaaagaagctgaggcctgatgcctcacatggtcttctcgttcatcaaatggacgttaagacaacttttcttaatggagagctggatgaggagatctatatggatcaacctgataggtttgtagttgaaggtcaagaagacaaggtgtgcaaattgttgaagtctttgtatggtctgaaacaagctcctaagcaatgccatgagaaatttgatagaacattgacatctgtaggcttcgcagtcaatgaggcagataaatgtgtatactatcgccatggtgggggtgaaggagttattctgtgcttgtatgttgatgacatactgatatttgggacaaactttgaggtgataaatgaggttaaatcattcttgtctcaaaaatttgatatgaaggatttgggagtagctgatgttatcctaaacattaagctaattagaggtgagaatgggattacactcttgcagtcccattatgtggagaagatcttgaatcgttttggctacattgacagtaagccttctccaatatcttatgatcctagcttgttgcttcgcaagaacaagagaattgctaggaatcaattggaatactcccaaatcattggctcgctgatgtacctggctagtgcaactagcctgatatctcctttgctgtga

SEQ ID NO: 14063 - DNA, 5361 bp, Oryza sativa
  Clone ID: TFbOSC400299j.C1.o17.fg
atggcgaggggcgtagcgcgcgcggcgtcgttcggtggccgcgccgcgaccgcgaggtggtgctcgtaccggcgcatcacggtagccgtctgcctcgggaacctcgtcgccgcgctcctcgtgctccgctccctcacctccctcgcccccacaccgcccaaacgtgaggaagtggtggagtatacggaggagcagattaggaaggcggaggagtcgatccggattcgccgcgaggcggagcccgtcgagcttgtcgaggcggtgaagaatctgcggaagattttcaggcgggaggagaagaggcggaaggagttgccactggagttgaagcagaaggtctcgtatgagattgtgcagctcctgctcgatttgggggataacagcagtttcgctcagcaacgagctcggttgagctctcagccagcagcagcaccggctgctcctccttcccctttccctcccccctctccacgcagcagccccccggaggtgcgccatttccgacgttcggttgcctcgagcactcggcgtcagcaggacgccgagctcgccgcagcagaagagcgcaggcgagcaacggctcagaccgctgcagcagcagcgagggcggctagactggcggcagcggagttggcagcagccagggcggaggcggaagcagaggtggcggaagatgcggcacgtgcggcggaggtagaggttgagaccttgcgcagcagcatcaatggctccatcgccggcgacatcaccgccgacagggagcttgaggagctagcaagaggaagggcacgggagcgggcagagcggtgggcagcagcccacctccacggcggcggcggcggccaaagggaccgtgcgcccgctgacgggaacccagatgggcgcgggcgtgtcggcggcagcacggagcccgcgcgctgccctcgcaggcagcgtgactctctctcccttgaccggcgccatggccaccacggcgtccagacggtggtcagggactttggtcccggcggtgggtggcctaccctcaccaaaaccaactacatcgagtgggccgcggtgatgagggtgaggctccaggtgcggcacatgtgggaggcagtatggtacggcgacgtcgactacgacgaggatcggcgggcactggatgccctcatcgctacagtcccgcccgagatgcagttctcgctttcccagaagcggactgccaaggaggcctgggatgccatcgctgcggcacgcatctgcagtgaccgcgcccgcaagtccacactgcaggcactccgcaaggagtgggagaacatggccttcaagccagagaagtacaggcagatcgctcgctcgatcgagtctcagctggacctctccacgatgtcgatcgaggaggcgttaggtcgcctcaaggtcgtcgacggtgatgagccacagcctctctcggggcctatcaccattggcgggaagctccatctcactcgggaccagtgggaggcctctcagggtgacgggaggaagggggagtcatcttccccgacaggcggccgtaagctgcgcaaggtgcggggaggtgtccagctacggtgggcgcgaagacgtgccgagggtggcgcccgcagaggcgcccaaggcggcgccaccggcaaccacaagccggcacgagacgacgcctaccgcaactgtggcaagcttggccattgggccaaagactgtcgacagccacgacgcggccaggcccacgtcgcacgtgtggaggaggaagagccggctctgctcctggctcacgcaagcatcgagctacctccaacggcaccggccgcagcagtttttctccaccttgatgagccgaaggtactcgtctccctctgcaacggctctagcaacgacaaggctgatgggtggtacctcgacaccggcgccacccatcacatgaccggccgacgggagttcttcaccgagttcgactccagcgtccgaggctccgtcaagtttggggacgcctccggcgtggagatcaagggcgttggctccgtcaccttcaccgccaagtccggtgagcacaggttgctcaccggagtctactacatccccgcgttgaggaattctatcatcagcgtgggacagctggatgagaacggctcacgcgtgttggtcgaggacggtctcatgaggatttgggatcgccgtcgtcgccttcttgccaaggttgcacaaccagtttgcctcgccgctcgtcgagacgatgaggcgtggcagtggcacgagcgcttcgggcacctccacttcgaggcgttgaagcggctcaatgccaaggagatggtgcgaggcatgccgtgccttgaccacgtggagcaactctgcgacgtctgcgtggtaacgaagcaacggcgactcccctttccccagcagacgagcttccgagccaaggagcggctcgagctcgtgcacggggacttgtgtggcccagtgacaccggccacaccaggaggacgacgttacttcctgctgctcgtcgacgacctctcccgctacatgtgggtgatggtcctcgacagcaagggagaggctgcggacgccatcaggcgcgcgcaggctgctgcagaggcggagtgtggccgcaagctgcgcgtgctgcgcaccgacaacggcggcgaattcacggcggctgaatttgcttcgtactgcgctgatgagggcattcagcgccactacatcgcgccgtacagcccgcagcagaacgacgtcgtcgagcggcgcaaccagacggtggtggggatggctcgggctctcctcaagcagagggggatgccggccatcttctggggagaggcggtggtgacggccgtctatatcctcaaccgctctcctaccaagaccctcgatggcaggacaccgtacgaggcatggcatgggcgcaagccggcggtctcccacctgcgggtcttcggctacctcgcgttcgccaaggagcttggccacatcggcaagctcgacgacaggagcaccccaggggtgttcatcggctacgcggagggctcgaaggcctaccgcatcctcgacccggagacacatcgtgtgcgcacagcgcgcgacgtagtgttcgacgaagggcgagggtgggtatgggacaaggcggtggacgatggttcgactccgacgtacgacgacttcaccatcgagtacgtccacttcgagggagctgggggagtaggcagctcttcttcaccgagcgtgtctaccccagtccccgagcctccaccgactccgacatcaacacatcctcgggccacgacttcgactacgacgagctcttcgccgacaccaccccagccggtgaccccacgcactccagcaccaacagccactcctccaggcacgtatactcagacgccagctcgtgttgagcgcagcccggtggagttcgctactccgctctcccacgacggggagcgcatcgacgcataccacgacggcgagcagctacggtaccgtacgatggaggatcttctcggcgaccagccggtgccgggactggtgcctcgcgacctggaggcgcagttacaccttgcgtgcgacgacggtgagcctcggtcttttgcagaggccgagaaacacgcggcatggcgtgccgcgatgcagtcggagatggacgcggttcaggagaaccgcacctgggagcttgttgacctccctcgtggtcaccgcacgatcacccttaagtgggtgttcaagctgaagagggatgaagccggagccatcgtcaagcacaaggctcgcttggtggcacgcggtttcgtgcagcaagaggggatcgactacgacgatgccttcgctcccgtggcacggatggagtccgtgcgactccttgcgctggctactcaggaaggctggggcgtccatcacatggacgtcaagtcggcgtttctgaacggcgacttgaaggaggaggtctacgtgcaccagccgccgggatttgtgatccctggcaaggagggcaaggatgcggaggtcgcggcgttcaaggaggagatgaaggccaccttccagatgagtgatctcgggcctctctccttctacatggggatcgagaccgcctacgccaagcgcatcgttgagctggctgggctcaccgattgcaacccagctctcactccgatggaggagagactaaagctgagccgcgatagcacgacggaggaagtggatgctacacagtaccggcatcttgtggggagccttcgctacctcacccacacacggccggacttggccttctccgtcggctacgtcagtcggttcatgcagcgaccgacgacggagcaccagcaggctgtgaagaggatcatccgctacgttgcggggactctcgaccacggtctctactacccgaggtgtcctggcaaggcacacttcatcggctgcgaggccgagtacatggcggccttcgccgcttcgacccaggcgctctggcttgctcgactgcttagtgatctcctcggcagagacactggagcggtggagctcagggtggatagcaagtccgctctggccttggcaaagaaccccgtttttcacgaacagagcaagcacatccgggtgaggtaccacttcatccgaagctacttggaggaagggagcatcaaggcgagctacatcaacaccaaggaccagcttgcggacttgctcaccaagcctcttgggaggatcaaactaggagggtgcagcaataggcttgcagccagctatggttatatatatgtatccaacctccctcgggaagaagcagtggaatcatggcgtttcgagaagttaaaagatataaaaagtgcatctattcagaactcaacaaagttagacctctccaacgaggaagcaagaaccttaaagcgagcactacagttcaactggcatgtgctgctggaagacattggtctttggataccatcagaagtctcacacactgaacatgatgacaaacctgagaatgaaccagaagaagaagagataatagctggtccacctttgccctcacaatgcaatgctgagctacatactgattacgatggtgctgctgttagatggggcttaacacaccccaaagaatctgctgccgattgctgtcaagcatgtctagaccaggctaagaatgccaggccaggtgaactaaggtgtaatatatgggtttattgcccatcagagtttggatgtttctctccagataaatatgagcataaacatcaggagtgctggttgaaacaggctgaccaccctaaactcaacttcaaagacaagtattccgagtcatacagagattctcatcccactgcccctgtcgttgtgccctggatgtcaggtgtcatcagcgcatga

SEQ ID NO: 14064 - DNA, 4548 bp, Oryza sativa
  Clone ID: TFbOSC400321j.C1.o53.fg
atgtcgggccaagcgggggatgggaatgatggtgataagggagttaagattccttatgactatccccctacatctacatcttatgtgagtacatatagcggcaaagctccgtacttcaatggtacagactatgccgcttggaagcataagatgaagatgcatttgaagtctattaacccatctatttggagaatagtcgaaaaagtctatgttttgcagaatcccgaagatcccaccaaggaggacgacgagaacgagcacaaaaatgctcaagccgctaatgcaatacttagcgccttgagtggaagtgagttcaaccgtgtagatggcattgagagtgccaaaatgatttgggacacgcttcggaacttgcatgaaggcacagatagtgttcgtgagtccaaggtggagatcctcaaggggcaatttgagaggtttgtgatgttggatggacttggctccaaggacatgaccgatggggtggtggtcaagaagatggttcgagcaatcactccaaggaactctaccttagtgaccatcattcgtgagcgtccggactacaagactctcacacctcacgatttgctcggacgtattcttgcccatgacatgctcatgcaagagtccaacgatgtcatccaatacatcaaccaaagctcaaccacaagcatcaagaaggaagacttggcattaaaggcgaaggaagaagaagaagagaaccgcaagagtaagagcaaggcggagatcgatgatgaagagatggctctcctcgtcaagaagttcggcaagttcatgaggcgaagcggtttcttcaaaggaggttcttccaagcactactccaacaagtcaagtggaaaacactccgcaagagtgtgctacgtgtgcaaagagcccggtcacttcattgcggattgctcccacctcaaggatggttctcacatcaaggaagataagaagaagggtgagaagaaggagaagcacaagcatagcaagcaggaacattatggccaagctcaccttgggatgatcttcggctccgagtccgagtcaagctcaagtgatgaaggagtcgccacgttcgccgtcaagccttcatcaccaccgagactcttcgactactcaagtgatgaggatgctcccatttgcctcatggcaaagaagcctaaggtaccttctcctcccaagtcatttaatgttgaccttgttagtgatgaggaggatgaggttatggatgatgaattgttcaaatccataactaaggaatccctaccacacttgagtgagttgcttgggagaattgaggaccaatatgctactcttgagaggcaagaggttttgctcattcgtgagaaagagcggtctcatgaactcaagagtgagcttgctaaggagagagagaaaaatgaggctttgcaaaatgagaagcttatgagactccttcacaatggcctacttaagtgccatatgggtagtaaggccctaaagaagtacctaggctatcaaagggacaacttcaatcatgagggtcttgggaagaatgatagtggtcgtgttgttgctaagtatgtaggcccaaggggcgagaatatttctatcaagagagtactttgggtgcctaaggcacttgttactaacatgagaggacccaagcaagaatatgtttccggtggaagaagttgggtgattgatagtggatgcaccaatcacatgaccggagaagaatcaatgttttcaactcttgatccaaatggcacttcacaagataatatagtcttcagggatgatggaaagggaaaggttatgggattggtggctaagtccaacacgaggtggctttggcatcggaggctagcccatgttggtatgaggaatcttcacaagcttctaaagcacgatcacatccttggactaacaaatgttcaatttgagaaagatagggtgtgtagtgcgtgccaagccggcaaacaaattggagcacatcatcccgtcaagaatgtgatgaccacttcaagaccattggagcttcttcacatggacctcttcaggccaattgcttacctaagcattggaggtaacaaatatggtcttgttattgttgatgacttttcacgcttcacgtgggtgttctttttgcatgacaagagtgagacacaagccatcttcaagaagtttgcaagaagagcacaaaacgagttcgatctcaagatcaagaacattcgaagcgacaacggcaaggagttcaagaacacgtgcatcgagagtttccttgatgaagaaggcatcaagcatgagttctcggctccatattcacctcaacaaaatggagtagccgagaggaagaataggactctcattgagatggcgaggaccatgttggatgagtacaagacatcagaccgtttttgggtcgaagccgtcaacaccgcatgccacgccatcaaccgcctttatcttcaccgccttcttaagaagactctctatgagcttcttactggtaacaaaccaaatgtctcttactttcgtgttttcggtagtaagtgttacattcttaataaaaaggctagatcctctaagttcgctcctaaagtggatgagggattcttgcttgggtatgggtcaaatgaatgcgcataccacgttttcaacaaaacctccggtattgttgagatcgcgtgtgatgtgacatttgacgaaactaatggctctcaagtagaacaagttgactcacatgtgttaggtgaagaggacccgagcgaagcaatcaaaaggttggctcttggggacgtacgtcctagggagccacaacaaggggcctcttcctcaacacaagtggagccacctacatcaacccaagccgacgatccctctacctcaagcttggatcaaggtgaagaaggcgaacaagtgccaccctcaccgatcaatttagcttgcccaagaatccaccaaagtatccaaagagatcatcccaccgacaacattttaggagacatcaacaagggagtatccactcgttctcgtattgcaaatttttgtgagcattactcgtttgtgtcttctcttgaacctctaagggtggaagaagctcttaatgatccggattgggtgatggcgatgcaagaggagttgaacaacttcacccggaatgaatggatcttccgcaacaagcaagacgaggccgaggtcgtaataaggaacaaggcgaggttggtggcgcaagggttcacccaaatcgaaggattagatttcggtgaaacttttgcgccggtagctagacttgagtcgattcgcatattgcttgcttttgctactaacctcaattttaagctatatcaaatggatgtcaaaagcgccttcctcaacgggcctatcaacgagttggtatacgtggagcaaccaccgggcttcaaggatccaaagtatcccaaccatgtgtacaagctccacaaggcactctacgggcttaagcaagcccctagagcttggtatgagtgtcttcgcaattttcttgtgaaaaacggctttgaaatcgggaaagccgattcaactctttttactaaaagacatgataatgatatttttgtgtgccaaatatatgtcgatgacattatatttggttctactaacaagtcttttagtgaagagtttagtaggatgatgaccaaacgttttgagatgtccatgatgggtgaattgaagttcttcctcggccttcaaatcaagcaactcaaggaaggaaccttcatttgccaaaccaagtatttgaaggacatgctcaagaagtttgggatgaagaatgccaagccaatccacactcccatgccatcaaatggccacctcgacctcaacgagcaaggtaaagacgtcgatcaaaaggtataccgttccatcattggctcacttctttacctttgtgcatctaggcccgatattatgcttagtgtgtgcatgtgtgcaagatttcaagccactccgaaggagtgtcatcttgtggccgtgaagagaattcttagatatttggtgcacacacctaaccttggtttttggtatcctaagggagcgaggtttgatctcattggctatgccgatgcggattatgccgggtgcaaagtggataggaaaagcacatcgggtacttgccaattcttgggtaggtcccttgtttcttggtcttccaagaagcaaaactccgtcgccctatccaccgccgaagcggaatatgtttcagcggggagttgttgtgctcaacttctttggatgaagcaaaccttgagagactatggcctcaatgtatccaaaatcccactcctatgtgacaatgagagcaccattaagatagccaacaaccccgtccaacactcccaaaccaaacatatagatattcgccatcatttcttgagagaccattccacaaaaggcgacatagatatccaacatgtgagaaccgacaaacaattggcggatatcttcaccaaaccactagatgaaactaggttttgtgagttgagaagtgaactaaatatcttggattctcggaatgtggcttga

SEQ ID NO: 14065 - DNA, 1012 bp, Oryza sativa
  Clone ID: TFbOSC11150j.C1.o2.gm
atggcatccgtgcagcaggtgagggcagcagcggtgaagaacgcaccgacggtggacatcccaatagtgcctctggcaacgtccaagctgccggagttcttacgcgtcaggccacccaccttctccagcaccaccaaccctatggaggcaaatgactggctccacgctatagagaagaagctaaatctcctacagtgcaatgatcaggagaaggttgccttcgccacacaccagctccagggtcccgcgtcaacttggtgggacaatcacatggctacccgtccgccaggtacggaggtcacttgggcggagttctgtcgcagctttaggaaggcgcaggtgcccgacggggtcgtgccacaaaagaagagagaattctgggcactccaccagggcaaccggacggtgactgagtacctccatgagtttaatcgtctagcgcgatatgcaccagaggatgtccgcatcgacgccgagaaacaggagaagttcctagcaggcctggatgacgagctgaccaaccagttaatctctggagactacgccgactttgagaagctggttgacaaggccatccgtcaggaagatcagcacaacaaaatggacaggaagagaaaggcagcgcagttccggtccaaccaaggaagtcaccagcgaccgcgcttcgctcctggacagcagggtggacctaccaccatgatcgtccgccagcaccgccctttcaacacgagcagcttccaccagggtgccagtggcagccagaaccaccagggaggccagcccaaccgcagtacagctccgcgcccaccgatggcaccagcacagtcagctccatcagcccaagccaagaaggagactggagcaaagccagggtcctgtttcaattgtggtgagcatggccactttgctgacaagtgcccgaagccaagccgtgccggggcaaggtttgcccaagctcgtgtcaaccacgcatccgcagaggaggcgcaagcagcaccagaggtcgtactag

SEQ ID NO: 14066 - DNA, 3534 bp, Oryza sativa
  Clone ID: TFbOSC13105j.C1.o1.fg
atgatcgtccgccaacatcgccctttcaactcgagcagcttccaccagggcgctagtggcagccagaaccaccagggaggtcagcccaaccgcagtgcagctccacgcccaccattggcaccagcacagtcagctccatcagcccaagccaagaaggagactggagcaaagccaggatcctgcttcaactgtggcgagcatggccactttgctgacaaatgcccgaagccaaggcgtgccgggccaaggtttgcccaggctcgtgtcaaccacgcgtccgcagaagaggcgcaagtagcaccagaggtcgtactgggtacgtttcctgttaactcaatccctacaacagtacttttcgattctggtgcaacgcattcgttcattggaaagaagtttgttgggatacatgggttaataagggaagaacttagtacaccaatgcgggttcataccctagggaatagctccacttcggttcaattcagcccttctataacaatagaaatccaaagatcaccatttctagccaacctcattcttctcgaatccaaagacctagatatcaatcttgggatggattggctaaccaagttcaagggtgtcattgattgtgtgaatcgcacagtcaccttgaccaatgagaagggagaaacagtagtgtacaaatctccagtctcaccaaagcagggggtctccttgaatcagattgaggtggaaattccagtggtcaccgaggagaagagttcgaggaagttggaagatatccccatagtctgcaagtatccagaagtgttccccgaggacctcactaccatgccacccaagagagagattgaattccggattgatttggcaccgggaactgctccaatttacataagaccgtacagaatggcagccaacgagctagcagaggtcaagaagcaggttgatgagcagctgcagaaagggtacattcgaccgagtacttcactttggggtgctccagtcatttttgtggagaagaaggacaagacgaagagaatgtgtgtcgattatcgcacactcaatgaggtcactttcaagaacaaatacccgttgccgcggattgatgatctgttcaatcagctgaaaggagccaaggtgttttccataatagacctgcgatcaggctacaaccagttgaggatttgggaagaggatattcccaagtcagcctttaccacttggtatgggttgtatgagtgcacggttatatcttttggacttaccaatgcacctgcattcttcatgaacctgatgaacaaagtgttcatggaatttctcgataagtttgttgtggtattcattgacgacatacttatctattcaaagtctgaagaagaacatgagcaacatctccttctagtactcgagaagttgaaggagcaccagttatatgccaagttcagttattaccgtcggttcattgaaaatttctccaggatcgctagacccatgactcagttgcttaagaaagatgagaaatttaaatggacggccgagtgtgacaagagttttgaggagctcaagaagagattagtgtctgctccagttctgattctgcccgaccaaacaaaggacttccaagtctattgcgacgcgtcccgccacgggcttggatgtgttctaatgcaagacggcagagtggtcgcttatgcctcgcggcagttgcgtccacatgaagggaactatccaacacatgacctggaattggcagcggtggttcatgctttgaaaatctggaggcaatatctgattggcaaccactgcgaagtatatatagatcacaagagtctgaaatatatcttcacccaacctgatctaaatctccgacagcgaagatggttggagttaatcaaagattatgacatgagcattcactaccatccaggcaaagccaatgtggtggcagatgcattaagcaggaagagctactacaatgctttatgcaccgaaggcatgtgtaaggaattgcagcaagagcttgaacgtctcaacatgggaatcgtagaacacgggttcgtagctgctctagaggcacgtcctacgctcgtggatcaagtcagagcagctcaagtaaatgatcctgagatagctgaactgaaaaagaatatgtgggttggaaaagcccgggatttccttgaagatgaacatggcacaatctgcatgggagaaagattgtgtgtgcctgatgacaaagagctaaaagatctgatactcactgaggctcatcaaactcaatactccattcatcggggtagtaccaagatgtaccaagatctcaaagaaaatttttggtgggccagcatgaggagggaaatagctgaattcgtcgcgctctgcgatgtttgtcagcgagttaaagcagaacatcagaggcccgcaggattgttacaacctcttcagatcccggaatggaaatgggaagaaattgggatagatttcataacaggtctgcccaggacatcatcgggccacgattcaatctgggtggtcgtggatcgacttaccaaagttgctcatttcattcctgtgcatactacatatacaggcaaaaggttggcagagctctatctctcgagaatcatgtgtctgcatggagtacccaaaaagatagtatctgatcgagggagccaattcacttcaaagttctggcagaaattgcaagaggaattgggaacccggctgaacttcagcacagcctaccatccgcagaccgatggtcagaccgagcgggtcaatcaaatattggaggatatgttaagggcttgtgcgcttgattttagtggagcatgggacaaaagcttgccgtatgcggagttctcctacaacaacagctatcaggccagtctacaaatggcaccgttcgaagcgttgtatggccggaagtgccgcacacctctcttctgggatcaaataggcgaaagtcaactgttcggaacagaagtgttaacggaagcagaagagaaagtcagaaccgtcagagagaggctgagaattgcccagtctcgacagaagagctatgcggacaaccgccgaagggagctcacttttgaagcaggggattacgtgtactttcgtgttactccgctccggggagtacaccgtttccaaacgaaaggcaagttggcaccacgcttcgtgggaccatacaaaatcttggaacgaagaggagaagttgcttatcagctagaacttccacccaaaatgatcagtatccatgacgtgttccatgtgtcccagttaaagaagtgtttgagggtacccgaagaacaagccgattcggaggagcacatcgacattcaagaagatctaacctatgtggaaaagccagtttgtattcttgagaccagtgaaagaagaaccagaaacaaggtcactaggttctgccgggttcaatggagccaccactcagaagaagaagcaacctgggaaagggaagatgagttgaaggccgcccatccgcacctcttcaccggctcttccgaatctcggggtcgagattccgtttaa

SEQ ID NO: 14067 - DNA, 2742 bp, Oryza sativa
  Clone ID: TFbOSC13112j.C1.o1.fg
atgatcgtccgccaacatcgccctttcaactcgagcagcttccaccagggcgctagtggcagccagaaccaccagggaggtcagcccaaccgcagtgcagctccacgcccaccattggcaccagcacagtcagctccatcagcccaagccaagaaggagactggagcaaagccaggatcctgcttcaactgtggcgagcatggccactttgctgacaaatgcccgaagccaaggcgtgccgggccaaggtttgcccaggctcgtgtcaaccacgcgtccgcagaagaggcgcaagtagcaccagaggtcgtactgggtacgtttcctgttaactcaatccctacaacagtacttttcgattctggtgcaacgcattcgttcattggaaagaagtttgttgggatacatgggttaataagggaagaacttagtacaccaatgcgggttcataccctagggaatagctccacttcggttcaattcagcccttctataacaatagaaatccaaagatcaccatttctagccaacctcattcttctcgaatccaaagacctagatatcaatcttgggatggattggctaaccaagttcaagggtgtcattgattgtgtgaatcgcacagtcaccttgaccaatgagaagggagaaacagtagtgtacaaatctccagtctcaccaaagcagggggtctccttgaatcagattgaggtggaaattccagtggtcaccgaggagaagagttcgaggaagttggaagatatccccatagtctgcaagtatccagaagtgttccccgaggacctcactaccatgccacccaagagagagattgaattccggattgatttggcaccgggaactgctccaatttacataagaccgtacagaatggcagccaacgagctagcagaggtcaagaagcaggttgatgagcagctgcagaaagggtacattcgaccgagtacttcactttggggtgctccagtcatttttgtggagaagaaggacaagacgaagagaatgtgtgtcgattatcgcacactcaatgaggtcactttcaagaacaaatacccgttgccgcggattgatgatctgttcaatcagctgaaaggagccaaggtgttttccataatagacctgcgatcaggctacaaccagttgaggatttgggaagaggatattcccaagtcagcctttaccacttggtatgggttgtatgagtgcacggttatatcttttggacttaccaatgcacctgcattcttcatgaacctgatgaacaaagtgttcatggaatttctcgataagtttgttgtggtattcattgacgacatacttatctattcaaagtctgaagaagaacatgagcaacatctccttctagtactcgagaagttgaaggagcaccagttatatgccaagttcagttattaccgtcggttcattgaaaatttctccaggatcgctagacccatgactcagttgcttaagaaagatgagaaatttaaatggacggccgagtgtgacaagagttttgaggagctcaagaagagattagtgtctgctccagttctgattctgcccgaccaaacaaaggacttccaagtctattgcgacgcgtcccgccacgggcttggatgtgttctaatgcaaaacggcaaagtggtcgcttatgcctcgcggcagttgcgtccacatgaagggaactatccaacacatgacctggaattggcagcggtggttcatgctttgaaaatctggaggcaatatctgattggcaaccactgcgaagtatatatagatcacaagagtctgaaatatatcttcacccaacctgatctaaatctccgacagcgaagatggttggagttaatcaaagattatgacatgagcattcactaccatccaggcaaagccaatgtggtggcagatgcattaagcaggaagagctactacaatgctttatgcaccgaaggcatgtgtaaggaattgcagcaagagcttgaacgtctcaacatgggaatcgtagaacacgggttcgtagctgctctagaggcacgtcctacgctcgtggatcaagtcagagcagctcaagtaaatgatcctgagatagctgaactgaaaaagaatatgtgggttggaaaagcccgggatttccttgaagatgaacatggcacaatctgcatgggagaaagattgtgtgtgcctgatgacaaagagctaaaagatctgatactcactgaggctcatcaaactcaatactccattcatcggggtagtaccaagatgtaccaagatctcaaagaaaatttttggtgggccagcatgaggagggaaatagctgaattcgtcgcgctctgcgatgtttgtcagcgagttaaagcagaacatcagaggcccgcaggattgttacaacctcttcagatcccggaatggaaatgggaagaaattgggatagatttcataacaggcaaaaggttggcagagctctatctctcgagaatcatgtgtctgcatggagtacccaaaaagatagtatctgatcgagggagccaattcacttcaaagttctggcagaaattgcaagaggaattgggaacccggctgaacttcagcacagcctaccatccgcagaccgatggtcagaccgagcgggtcaatcaaatattggaggatatgttaagggcttgtgcgcttgattttagtggagcatgggacaaaagcttgagtattctatag

SEQ ID NO: 14068 - DNA, 1479 bp, Oryza sativa
  Clone ID: TFbOSC14148j.C1.o1.fg
atgccgcgctacaagcctgagtacctgtttggtgttgagggttttgtccaggagttgcgtacgatgtcctttgtcattggatttgggactgcccctttttatgcccagattcctcatgatcgtcatgaagagaagtgtcgagtcaaagtcactttgaacagtaatagtgaagaggaggtggcaaggatcgccataggagagctccgcgatcgctacagtgatcagttggccgacactgagtatcgctaccatcctcgtcaaccacagggaagtgaccgtggcagttaccttgagactgaaggaattgaaaatgatgctaccacaaggcatttggttgagatgttgtgggctatggatgaaagtcgtgcggagactgtgttagcagctcaagatcgtgaagatcggaatcgtggtaagatttgtaagctcgaagacaaggtggatcgtttggagaaggaactagccgcattgaagggagaagcaccgccgcagaaggccaggattcgtcttaccgcaaggaagagagctctatttgtccctcgttatcaattggcgccaaagatggtgaatactcgcagcaacgggaatggtcccaacaaccccaataacaacaatggagagaatcccactcttgctcaagttcttgctcaacagacacagctaatgaacatgatgatgcaacaacttcagaatcagcagaaccaaggaaataaccatgtacctcctcagaataagttagcagaatttcttcgtgagaaggtctcatttgcatcacaccagttgcatggccctgcctctgaatggtgggatcacttccgccttaacaggactactgctgaacctatcacttggcttgagttcaccgctgctttccggaagacgcatataccatcgggagtggtgtctctcaaaaagaaggaattcaggtcgcttacccagggatctcgctctgttacggagtatctgcacgagttcaatcgtctggctcgttatgctccggaagatgtgcgcaatgatgaagagcgtcaggagaagtttttggaaggacttaatgatgagctttcttacccactcatgactggagattatcatgatttccagaagctagtggataaggctattcgtcaggaggacaaatacaatcgcatggagcagaagaaacgtcggattgctcaattcaagacacaacaggggaataatcagaagccgcgtcttactttaagaccccagtccatgccacatggaggttcttcgtttgttgttcgtccgcagcgtcagttcttcaacaacaatgctggcaacaacatccgcaatcaagctccacgtcctgttgcagctccaacacagcaacaacctgccaagagggagcaaggcagcaagcccgtggtgtgtttcaactgtggagacccacgacattatgctgacaagtgtccgaagccccgacgcgtgaaggctgtccctacccagagcaactgtacg

SEQ ID NO: 14069 - DNA, 4393 bp, Oryza sativa
  Clone ID: TFbOSC26121j.C1.o1.np
ggccatgatgcagcagatgctgcagcagcaccagcagatgcaccagaggatgtagcagcaagtcgaacagtagcagcagcagtttggtccccctccccctcagtccaagctgccgaagtttctacgcgtcagtccacccaccttctctagcaccaccaaccccatggaggcgaatgattggtccatgccatagagaagaagctcaatcttctgcagtgcaatgatcagaagaaggtcacctacgccacacaccagctccagggtccctcgtcagcttggtgggacaatcacatggctacccgtccgccaggtacggaggtcacttgggcggagttctgtcgcagcttcaggaaggcacaggtgccagacggggtcgtggcacaaaagaagagagaattctaggcactccaccagggcaacagggcagtaactgagtacctccatgagttcaatcgccaagcgcgatatgcaccggaggatgtccgcactgacgcggagaagcaggagaagttcctagcaggcctggatgacgagctgaccaaccagttgatctctagggattacgctgacttcgagaagctggtagacaaggcaatccgccaggaggatcagcgcaacaaaatggacaggaagagaaaggcagcgcagttccggtccaaccaaggaagtcaccagcgaccgcgcttcactcccggacagcagggtggacctaccaccatgattgtccaccagtatcgcccgttcaactcaagtagcttccaccaggtcgccagtggcagccagaaccacccgggaggtcagcccaaccgcagtgcagctccgcgcccaccaatggccacagcacaggcagctccatcagtccaagccaagaaggagactggagtaaagccagggtcctgcttcaactgtggcgagcatggccactttgctgacaagtgcccgaagctaaggcgtgctgggccaaggtttgcccaagctcgtgtcaaccacgcgtccgcggaagaggcgcaagcagcactagaggtcgtactgggtacgtttcctgtcaactcaatttatgcaacagtacttttcgattctggtgcaacgcattcattcatttcaaagaagtttattggggaacatgggctaataagagaagagcttagtacaccaatacgggttcatacccccgggaatagttccacctcggtttaattcagcccttctgtaacaatagaaatccaaatatcaccatttctagccaacctcgtccttctcgaatccaaagacctagatgtcattcttgggatggattggctgaccaagttcaagggtatcattgattgtgcgaatcgcacggtcaccttgaccaatgagagaggggaaacagtggtgtacaagtcaccagtcgcactgaagcagggaatctccttaaatcagattgaggtggagaattcggtggtcaccgcggagaaaagttcgaggaaattggaagatatccccatagtctgcgagtattcagaggtgttccctgaggacctcactaccatgccacccaagagagagattgaattccggattgatttggcaccggggactgctccaatttacaagagaccgtacagaatggcagccaatgagctggcagaggtcaagaagcaggttgatgagcaactgcagaaagggtacattcgaccaagtacttcaccttggggtgctccggtcatttttgtggagaagaaggacaagacgaagagaatgtgcgtcgattatcgcgcactcaatgaggtcacaatcaagaacaaataccctttgccacggattgatgatctgtttgatcagctgaaaggagccaaggtgttttccaaaatagacctacgatcaggttaccaccagttgaggattcgggaagaggatattcccaagacagctttcaccactcggtatgggttgtatgagtgcacggttatgtcttttggacttaccaatgcacctgcattcttcatgaatctgatgagcaaagtgtttatggagtttcttgacaagtttgtcatggtgttcattgacgacatacttatctattcaaagtccgaagaagaacatgagcaacatctccgtctggtactcgagaagttgaaggagcaccagttatatgccaagttcagtaagtgtgacttctggttgtcggaagtcaaatttctgggtcacgtcattactgctcaaggtgtggcagtggatccatcgaatgtggagtcagttaccaagtggaccccacctaagacagtgtcacagattcggagtttccttggacgtgcgggttattaccgtcggttcattgaaaatttttccaggattgccagacctatgactcagttgcttaagaaagacgagaaattcaagtggacagccgagtgtgacaagggttttgaggagctcaagaagaaattagtgtctgctctagttctgaatttgcccgaccagacgaaagacttccaagtctattgcgacgcgtctcgtcatgggcttggatgcattctaatgagggcagagtggtcgcttatgcctcacggcagttgcgtctgcatgaaggaaactatccaacacatgacctggaattggcagcggtggttcacgccttaaaaatctggaggcattacctgattggcgatcgctgtgaagtatatacggaacacaagagtttgaaatatatcttcacccaacctgacctgaatctccgacagcgaagatggttggagttaatcaaagattatgacatgagcattcactaccatccgggcaaagccaatgtggtggcagatgcattgagcaggaagagctactgcaatgctttgtgcactgagggcatgtgtaaggaattgcagcaggagcttaaacatctcaacttgggaatcgtagaacacgggtttgtggctgctctagaggcacggcctacgctcgtggatcaagtcagagcagctcatgtaaatatcctgagatagctgaactgaaaaagaatatgagggtcggaaaagcccgggatttccacgaagatgaacatggcacaatctggttgggagaaagattgtgcgtacctgatgacaaagagctgaaagatctgatactcaccgaggctcaccagactcagtactccattcatccaggtagtaccaagatgtaccaagatctcaaagagaaattttggtgggccagtatgagaagagaaatcgctgaattcgtcgcactctgcgatgtttgtcagcgagtcaaagcagaacataagaggcccgcaggactgcttcaacctcttcagatcccggaatggaaatgggaagagattgggatggatttcatcacaggtttgcccaggacatcatctagccacgattcaatttgggtagtcatggatcgactcaccaaagttgctcatttcataccagtgcacgctacttatacaggcaaaaggttggtagagctctatctctcaagaatcatgtgtttggatggagtacccaaaaagatagtatctgatcgagggaggtagttcacctcaaaattttggcagaagttgcaagaagaattgggtacccgtttgaatttcagcacagcttaccatccgttgacagatggccagaccgagagcgtcaatcagattttggaggatatgttgcgagcctgtgcgcttgattttggaggagcttgggataaaagtctgccttatgcggagttctcctacaacaacaattaccaggctagtctgcaaatggcaccgttcgaagcgttgtatggccggaagtgccgcacacctctcttctgggatcaaacaggcaaacgtcaactgtttggaacagaagtgctaacggaagcagaggagaaagtcagaaccatcagagagaggctgagaattgcacaatctcgacagaagagctacgcagacaaccgccgaagggagctcacttttgaagcaggggattatgtgtaccttcgtgttactccgctccggggagtacaccgtttctagatgaaaggcaagttggcaccacgcttcgtgggaccatacaaaatttttgaacgaagaggagaagttgcctatcagctagaacttccatccaacatggtcggtatccatgacgtattccacgtgtcccagttaaagaagtgtttgacggtacccgaagaacaagccgattcggaacacattgacattcaagaagatctgacatatgtggagaagccagttcacatccttgagaccagtgaaaggaggactaggaacaaggtcaccaggttctgcagggttcagtggagccaccactcagaagaagaagcaacctgggaaaaggaagatgagttgaaggccgcccatccgcacctcttcaccagctcttccgaatctcggggtcgagattccgtt

SEQ ID NO: 14070 - DNA, 1188 bp, Oryza sativa
  Clone ID: TFbOSC31965j.C1.o1.fg
atggcgccgacagctcaacaaggagtttcaaaggctttgaagggtgtcaaaccggccaagatagaggatgacgattgggaggagatgcagttgcaggcggctgcgacaataaggctatgtctctcagatcgggtcatgtaccatgtgatggaggagacctcaccaaagataatttggaaaaagttggaagctcagtttatgtccaagactctgaccaataaactgtatctgaagcagaagttgtatgggttaaaaatgcaggaaggggcggatctgacagcacatgtgaacgttttcaatcaactagtcactgatcttgtgaagatggatgtggaagttgacgatgaagacaaggccatagttcttttgtgttcgttacctaaatcgtatgagcatgtggtgactactttgacgtacggcaaggagaccatcaaaactaaagatatcacttctgcgttgctggctcgtgatcagatgagaaagaataaagagggtgaaacatctcaagcggagggtttgctagtcaaagaagatcatgctgggcataaggtaaagaagaacaaaaagaagaagatggtgcaatgcttcagatgtgatgagtgggggcatataagcagggagtgtccaacactgaagggaaaagcaaaggctaatacagtgacttcttcaaatgactcggatagcgatggttgtgattttctcacgatgtcaagtgcacagtctaaggatgcagaagcgtggatattagattcagctagcttgtttcatatgacgccaaggaaggagtggttctcttcatacaagtctggtgagtttggttttgtctacttaggcgatgacacaagttatccggccatgggagtaggtgaagtcaaaatcaagctagaagatggaggtgaacatgttcttcagggagtcaggcatgtaccagggctaaagaggaatctgatttcgcttggaaccttgcatgaagaagggttaatattccgcggtaatcggaataggaagaccattgagatcatgaatggcaagatggctgtgatgactggagagaaggtggagtcgcatctttataagctgcgtgggtgcactgttgcaggtggagtccaggaggaagcggttgctgggatagcaattgcttttggtggcggcgggtctggcgcagactcgtcgggcggcttgcagtga

SEQ ID NO: 14071 - DNA, 3639 bp, Oryza sativa
  Clone ID: TFbOSC400481j.C1.o8.np
atgatcaacaccaggaatggcagccgtgcagcaggtgagggcagcaacggtgaagaacgcaccgacggtgggcatcccaacagcgcctccagcaatggtccgccaccgcttctcgagaacccgattcttgcacaagtgatggcccatcagacacagatgatggaagccatgatgcagcagatgcagcaccagcaccagtagatgcaccagaggatgcagcagcaagctgagcagcagcagcagcagtttggtccccctccccctctgtccaagctgccggagtttctacgcgtcaggccacccaccttctctagcaccaccaaccccatggaggcgaatgactagctccatgccatagagaagaagctcaatcttctgcagtgcaatgatcaggagaaggtcgccttcgccacacaccagctccagggtcccgcgtcagcttggtgggacaatcacatggctacccgtccgccaggtacggaggtcacttgggcggagttctgttgcagcttcaggaaggcgcaggtgccagacggggtcatggcacaaaagaagagagaattccgcgcactccaccagggcaacaggacagtaaccgagtacctgcatgagttcaatcgcctagcgcgatacgcaccggaggatgtccgcactgacgcattgaaacaggagaagctcctagcgggcctggatgacgagcgtaccaaccagctgatttctagagactacgccgactttgagaagctggttgagaaggcaatccgtcaggaggatcggcgaaacaaaatggacaggaagagaaagacggctcagttccggtccaacccaagaagtcaccagcgaccacgcttcacttccggacaacagggtggaccaaccatcatgattgtccaccaacatcgccctttcaactcaagcggcttccaccagggcgccagtgggagccagaaccaccaaggaggtcagcccaactgcaatgcagctccgcacccaccaatggcaccagcacaatcagctccatcagcccaagccaagaaggagactggggcaaagccagggtcctgtttcaactgtggcgagcatggccactttgctgacaagtgcccgaagccaacgcgtgccgggccaaggtttgcccaagcccgtgttaaccacgcgtccgcagaagaggcgcaagcagcaccagaggtcatactgggtacgtttcctgttaacacgatccctgcaacagtacttttcgattctggtgcaacgcattcattcatttcaaagaagtttgctggggtgcatgggttaagaaaagaagagcttagtacaccaatgagggttcataccccgggaaatagttcaacctcggtcagttatagcccttccgtgctaatagaaatccaaagatcaccatttctagccaacctcatccttctcgaatccaaagacctagatgtcattcttgggatggattggcttaccaagttcaaaggtgtcattgattgtgtgaatcgcacaatcaccttgaccaatgagaagggagaagcagtggtgtacaagtcaccagtctcactaaagcaggggatctccttaaatctgattgaggtgaaaaatccggtggccaccgaggagaagagttcgaggaaattggaagatatccccatagtatgcgagtatccagaggtgttccctgaggacctcactaccatgccacccaagagagagattgaattccggattgatttggcaccggggactgctccaatttacaagagaccgtacagaatggcagccaacgagctagtagaggtcaagaagcaggtggatgagcaactgcagaaagggtacattcgaccaagtacttcaccttggggtgctccggtcatttttgtggagaaggacaacacgaagagaatgtgtgttgattatctcgcactcaatgaggtcaccataaaaaacaaataccctttaccacggattgatgttctgtttgatcagctgaaaggaaccaaagtgttttccaaaatagagctgcgatcgggctaccaccagttgagaatccgggaagaggatattcccaaaacagccttcaccactcggtatgggttgtatgagtgcacggttatgtcttttggactcactaatgcacctgcattcttcataaacctgatgaacaaagtgttcacggaatttcgggataagtttgttgtggtattcatcgatgacattctaatctattccaagtcggaagaagagcatgagcaacatcttcgtctggtactcgagaagttgcaggagcaccagctttatgccaagttcagcaaatgcgacttttggttatcagaggtcaaattcttgggtcacgtcattacagctcagggcgtggcagttgatctatcgaatgtggagtcagttaccaagtagaccccgcctaagacagtgtcacagattcggagttttcttggacttgcgagttattaccgtcggttcattgaaaatttctccaggattgccagacctaggactcagttgcttaagaaagacgagaaattcaagtggacagccgagtgtgacaagagtttcgaggagcttaagaagaaattagtatctgctccagttctgattcttcccgatcagacgaaagacttccaaatctattgcgatgcatcccgtcacgggcttggatgtgttctaatgcaagagggcagagtggtcgcttatgcctcgcggcagttgcgcccgcatgaaggaaactatccaacacatgatttagaattggcagcggtggttcatgctttgaagatctggaggcaatctgattggcaaccgctgcgaagtatatacggatcacaagagtctgaaatatatcttcacccaacctgatctaaatctccgacagcgaagatggttggagttaatcaaggattatgacatgagcattcactaccatcctggcaaagccaatgtggtggcagatgcattaagcaggaaaagctactgcaatgctttatgcaccgaagacatgtgtaaggaattacagcaggagcttgaacacctcaacttggggctagtagaacacgggtacgtggctgccctagaggcacgacctacgctcgtggatcaagtcagagcagctcaggtaaatgatcctgaaatagcagagctaaaaaagaatatgagggtcgaaaaagcccgggatttccacgaagatgaacacagcacaatctggttgggagaaagattgtgcatacctgacgacaaggaactaaaggacctgatactcaccgaggctcaccagactcactactccattcacccaggcggtaccaaaatgtacccaagacctcaaagaaaagttctggtgggtaagcatgagaagggaaatagctgaatttgtcgcactctgtgacgtatgccaacgagtaaaggcagagcaccaaaggccagcaggtttgctacagcctcttcggatcccggaatggaaatgggaagagattgaaatggatttcataacaggtctgcccaggacatcatctggtcatgattcaatctaggtagtcgtggatcggctcactaaagttgcccatttcattccagtgcataccacgtatacgggaaagaaattggcagagctgtacttagcaaggatca

SEQ ID NO: 14072 - DNA, 2319 bp, Oryza sativa
  Clone ID: TFbOSC400588j.C1.o3.fg
atggcggccgccggcgttccgcgagcgggaaccggcggacggcggccggaaggacctggggaggacaagggaaaggttaggaatgggataggggctcccagcggcgggaatcgccagccggaggggaggggaggtcggaccgagcccgggagaggcggagtcggggcggcaaccgccggcggcgtgggcggcatcgtggggtgtgggtggcggttttggaagggagaggtgggggatgaggaggacgtggggcggcggggtcccacggccggcggactcgtgcgcggggtggagaaggagggcggaaacggcagcgtcgtggggaggctcaggcggccatggcggcgagaaggctacattcgctgcatactacctgcaaggagcatcagctgcttggtgggagacatacaagactctcattcctctgatgagcctaacaattggactgttttctgggaaggattcatatctgctcacatccctcctggtctcatggagatcaaaaagaaagagtttcttaacttgaagcaaggaaacatgaccttcatggagttcatggaacgcttcaactatctgggtagatatgtcgctgctgacatgaacactgaagcaaagaaggttgagctatgcagagatcgtcttgcacctgaactcaaccatgctattactgctcatgaaatcactagcatgaagtcactggttgaaaaagcccttcgtgtcgaatcaagtgagaaggaagtcgttgaagatcgtaagcgcaagtgggctgcaaagaaatttgcaagtggcagcagctccactcggcctcgtcttgctccatctcctgtggttcgtcccatggcgcctcagccaccacggcagatgtatgtgcctccacgtccacaaactcagatagtccgtcaagttcctcgcacagttcaagctgcgggagatgcatctcgtaatgataatgtcgcatgttataattgcggcaagaaggggcattattctcctaactgtccttacccgaagactggaaaatctggaccgcatacacagggagcaccacaaaggagaaatgtggcggatgagttcgctgaacatctgccaacttggaagtggtggcagtacgtcgactacccccggcacggtctgcagagtgagctccagagcgagtatttgtcatcctgcactcaagacctggatagtaattggcagttgcttgatttgtacgagttggaaaatagtgaaagaacccatccatccctggcctgtggtgtcggtaatacacaatcgcttgaaatgcggcctcatgcattgctgagggtgcatcccaaccataagcttgaaagtaaaggggtgattcatgggtccaaaatccttgtatacacagctcagccatataagctcggagagatgaactccgttcaagagaaaagaaatgatactccggaaaaatgtgagggtttcttaattaagttgggtagctactggagcaagagggtgaaatcttctccaccccaccttgacacactcaaaaaagctgctggaaagggaaaagcaataggaaaggtgcaagggactcttctggctccgaagaagctagatcttggcaagacgccatcagctcatcctaagcctccgacagaattcacattagacatgccattggtcagagatgacgtgttagtgaagatgggccctgcatgcaaggagttgcacggctactgcatggagaggtccaacgcaaggaggaagaatagagagacctccatgacgggctactatgatagacagccattcctcgggcctgaagccttcatcgccatagacttcaaagatctatgggacctctacagggtgcggttaacttggaagcatgtctgtcgtcatgcaccccatgttgccttactcgatctagctgtcatcaacgagacaattataaacagcgatcgagccaacatggtagaatatatcaaggactgcttatggtaccatcaagacaaggaattcattatgtgcgcctacaatcaacagcgtcattggattcttttggtcatagtgcggaagtggaatttggtatactaccttaactccaatatcaaaaaagacatatgcgattggtcggcgattgaagctgctttgaacaacgcctgggaccaatatgtggcaaaaggcgggtggcataaggaagggcatcccacactcggtcacaaaaaagacttcccaatgcatcaacaagttggcgaccagtgtgggttccatgtctggcataacatgaggagcttcgcaaaaaaggtgacattgctcgaccttgaggcatggctagcaaaggcctga

SEQ ID NO: 14073 - DNA, 768 bp, Oryza sativa
  Clone ID: TFbOSC400774j.C1.o33.fg
atgacgccgacagatcttgtgaagatggatgtggaagttgacgatgaagacaaggccatagttcttttgtgttcgttacctgaatcgaatgagcatgtggtgactactttaacgtatggcaaggataccatcaaaactaaatatatcacttctgtgttgctggctcgtgatcagttgagaaagaacaaagagggtgaaacatctcaagcggagggtttgctagtcaaagaagatcatgttgggcgtaaggtaaagaagaacaaaaagaagaagatggtgcagtgcttcagatgtgatgagtgggggcatataagcagggagtgtccaacactaaaggaaaaagcaaaggctaatgcagtgacttcttcaaatgactcagatagtgatggttgtgatcttctcacaatgtcaagggatgacataagttatccggccgtgagagtaggtgaagtcaaaatcaagctagaagatggaggcgaacatattcttcagggagtcaggcatgtagcagggctaaaaaggaatctgatttcgcttggaaccttgcataaagatgggttaatattccacggaaatcggaataggaagaccatggagatcatgatgggcaagacaactgtgatgactggagagaaggtggagtcccaactttacaagctgcgagggtgtattgttgcaggtggagtctatgaggaagcggttgctgggatagcaattgcttttggtggtggcgggtctggcgcagattcatcgggcggcttgcggtga

SEQ ID NO: 14074 - DNA, 1617 bp, Oryza sativa
  Clone ID: TFbOSC401054j.C1.o79.fg
atggtctgcatgagggacaatttcatcggatcaggatcccgtcagtttcatggatcaactcagctcaattctataagcttcccacgtcaacctctcaaagatcagccacaaccccaagtcatggctaatcagactcagacagtggaagagttgttacagcagatgcgacatcggtaccagatctatctgatgcagcagatgcaacggcaatgtcaggagccgcgtcaagtccaccagccacaaatgcaagtccaggtgccagcccggaacctgaatcagagtcagagtcaggagttcccaacatcggcaccgaagacccctgtcaaaatgcggtccagatacccgaagataacgatagccaagtcaacgtcagaccaaaggaaagtaagtgcttcctgttatgactgtggtgagcaagatcattatgtaaggaactgtccatggaaggtgttcgccaggtcacctgaaaaatacaagaagcagtgcccaggaagtaaccaagctccaagtcagtctaccgaccagaaggatgaatttactcctgaagacgcagcaaggatacccaagcgtcagagaggaagaaataccttccgtggagcacgccagctaacccgacatctcataaagtacggtccgcccagacccgaagatgatatatcaggagaacggttctctactgatgacgacgatgatgatgatgatgatgatgatgatgatgatgatgaggatgaggcgacccttaacagtttcatggaaagaggattggagttcaaagcatgtactagatgtgggatagtcgaacacactgctagtttatgcctccccacatgccgctgtggtgaatacacccattactcagatgaatgccctttgaggaaggtcacatgtttcctgtgtgagggaacagatcatgtgcctaaggattgtcagcggaactcggtcctagctttgaccaagaaagaacaagggacaaccgtgcaacccattcgtcaaccaatggcagtcgacgacatcagtcacaatccttctgctcttcctccaattccagccccagtggaagccaaccatggaagaagcaacgtcgctagggatgttcataaatcactacttgttccagtttcagctgtcaatgtgcataaccagaagcttgcacctcaggaccaagcaagtcggttttgtctcaattgtcttaccagcactgcccacgacaccaatcgacacctgaatgtgcaacctccgcctcaacggattatcgtcaagggcaccgtcagaggccgcattgttccaccggccatcgtttcaagcctacagcaccagcgccagcagggtaagcaatgccaggagaacaacagctcgctacagctacaaagaggcagtacgctccttcgtcagcacccgcagcaagtgttgtcagcaccaggtcaacccactgctgtcaattctagcaatgcaccttgtattgctccaatccggaggcccatctgtaaatcaccgctcggtaatcccatgagcaagaagatcccatctgccatagctgtcaagaggattgccattccctccctgaagatcaatgcccagagcaatgtttctgatgcaacttctggtagtaggaactaa

SEQ ID NO: 14075 - DNA, 3135 bp, Oryza sativa
  Clone ID: TFbOSC401847j.C1.o5.fg
atggcgcactgtggtgagttgtgttgtgtgagaggtattgtcacggttcctttccaagaaattccaggcgtgacacgtagctcctccagcacctcccgcagttcccgcagcgctcgcagctccagctccggttccggctcccgttccagtgtcagctccggcgtccgctctctccttctctccagcgtcagccgccaggggtccagccagtggcaacggagatggtcaacatcaggaatggcagccgcgcagccggtgagggcagcaatggcgaagagcacaccgacagtggatatcccaacagcgcctctggcaatgggcaacagggcagtaactgagtacctccatgagttcaatcgccaagcgcgatatgcaccggaggatgtccgcactgacgcggagaagcaggagaagttcctagcaggcctggatgacgagctgaccaaccagttgatctctagggattacgctgacttcgagaagctggtagacaaggcaatccgccaggaggatcagcgcaacaaaatggacaggaagagaaaggcagcgcagttccggtccaaccaaggaagtcaccagcgaccgcgcttcactcccggacagcagggtggacctaccaccatgattgtccaccagtatcgcccgttcaactcaagtagcttccaccaggtcgccagtggcagccagaaccacccgggaggtcagcccaaccgcagtgcagctccgcgcccaccaatggccacagcacaggcagctccatcagtccaagccaagaaggagactggagtaaagccagggtcctgcttcaactgtggcgagcatggccactttgctgacaagtgcccgaagctaaggcgtgctgggccaaggtttgcccaagctcgtgtcaaccacgcgtccgcggaagaggcgcaagcagcactagaggtcgtactggaaatccaaatatcaccatttctagccaacctcgtccttctcgaatccaaagacctagatgtcattcttgggatggattggctgaccaagttcaagggtatcattgattgtgcgaatcgcacggtcaccttgaccaatgagagaggggaaacagtggtgtacaagtcaccagtcgcactgaagcagggaatctccttaaatcagattgaggtggagaattcggtggtcaccgcggagaaaagttcgaggaaattggaagatatccccatagtctgcgagtattcagaggtgttccctgaggacctcactaccatgccacccaagagagagattgaattccggattgatttggcaccggggactgctccaatttacaagagaccgtacagaatggcagccaatgagctggcagaggtcaagaagcaggttgatgagcaactgcagaaagggtacattcgaccaagtacttcaccttggggtgctccggtcatttttgtggagaagaaggacaagacgaagagaatgtgcgtcgattatcgcgcactcaatgaggtcacaatcaagaacaaataccctttgccacggattgatgatctgtttgatcagctgaaaggagccaaggtgttttccaaaatagacctacgatcaggttaccaccagttgaggattcgggaagaggatattcccaagacagctttcaccactcggtatgggttgtatgagtgcacggttatgtcttttggacttaccaatgcacctgcattcttcatgaatctgatgagcaaagtgtttatggagtttcttgacaagtttgtcatggtgttcattgacgacatacttatctattcaaagtccgaagaagaacatgagcaacatctccgtctggtactcgagaagttgaaggagcaccagttatatgccaagttcagtaagtgtgacttctggttgtcggaagtcaaatttctgggtcacgtcattactgctcaaggtgtggcagtggatccatcgaatgtggagtcagttaccaagtggaccccacctaagacagtgtcacagattcggagtttccttggacgtgcgggttattaccgtcggttcattgaaaatttttccaggattgccagacctatgactcagttgcttaagaaagacgagaaattcaagtggacagccgagtgtgacaagggttttgaggagctcaagaagaaattagtgtctgctctagttctgaatttgcccgaccagacgaaagacttccaagtctattgcgacgcgtctcgtcatgggcttggatgcattctaatgagggcagagtggtcgcttatgcctcacggcagttgcgtctgcatgaaggaaactatccaacacatgacctggaattggcagcgaggcacggcctacgctcgtggatcaagtcagagcagctcatgtaaatatcctgagatagctgaactgaaaaagaatatgagggtcggaaaagcccgggatttccacgaagatgaacatggcacaatctggttgggagaaagattgtgcgtacctgatgacaaagagctgaaagatctgatactcaccgaggctcaccagactcagtactccattcatccaggtagtaccaagatgtaccaagatctcaaagagaaattttggtgggccagtatgagaagagaaatcgctgaattcgtcgcactctgcgatgtttgtcagcgagtcaaagcagaacataagaggcccgcaggactgcttcaacctcttcagatcccggaatggaaatgggaagagattgggatggatttcatcacagatggccagaccgagagcgtcaatcagattttggaggatatgttgcgagcctgtgcgcttgattttggaggagcttgggataaaagtctgccttatgcggagttctcctacaacaacaattaccaggctagtctgcaaatggcaccgttcgaagcgttgtatggccggaagtgccgcacacctctcttctgggatcaaacaggcaaacgtcaactgtttggaacagaagtgctaacggaagcagaggagaaagtcagaaccatcagagagaggctgagaattgcacaatctcgacagaagagctacgcagacaaccgccgaagggagctcacttttgaagcaggggattatgtgtaccttcgtgttactccgctccggggagtacaccgtttctag

SEQ ID NO: 14076 - DNA, 4677 bp, Oryza sativa
  Clone ID: TFbOSC418835j.C1.o1.fg
atggccgaccacccacccaaccaccgcgaagaaggcatggacgattttgtggcagagttggctcgcatgaccatggtggtgggctaccacaacgcgccggagtactcgactgttccgccgctcagtggcgagcttccttaccgtgttcgtctggaggttcatggctatgtgggcacctgcctcgctaacatggtggttgaggcatctggaggcacagcagatcacgcctgtcaggaggcagcatatctgatgatggctagacttcgtgagcgccacaactacatcttctgcaacacagcataccgtttccaccctcgccgagcaagtggtggcggtgtcagcaccttccgtccgacagcgggcgagaacgacaccaccttcggtcacatgtgcgccgtgatgaggggaatggacaggatgcactcagatatgcacaaggcgtccaaggccttgaatgatgggaagctcgtgaggatcatagctctgaaggatgagatagcacgcctgaagaaggagaatgctcagttgaagggtctccccattcccggaggagtccggatccgcaccacgccccgcaagtcgatgactgcacccgtgcgcattcagcttgcgcccaggaacccacctccgcccgcagctcccgcagctcctctagttccgcctgcagttcccgcagctcctgcagctccagctccagtcccggctccagtcccagtgtcagctccctgcgtccgctctctccttcgctccagcatcagccgccaggggtccagccagtggcaatggaggttggttgcctgctactcccagtggcagccgcgaccacagcagcagcagttcagtggctcagagtcgggcagtggcgagacgtttgttcgcttgtggatggtcaacaccaggaatggcagccgtgcagtaggtgagggcagcaacggcgaagaacgcaccaacggtgggcatcccaacagcgcctccggcaatggtccgcccccgctccccgagaatccgactcttgcccaagtacggaggtcacttaggcagagttctatcgtagctttaggaaggcgcaggtgcccgacggggtcgtggcacaaaagaagagaattccgggcactccaccagggcaaccgaacggtgactgagtacctccatgagttcaatcgcctagcgcgatatgcaccagaggatgcccgcactgacgcagagaagcaggagaagttcctagcaggcctagatgacgagctgaccaaccagttgatctctggagactacgccgactttgagaagctggttgacaaggcaatccgtaaagaggatcagcgcaacaaaatggacgggaagagaaaggcagcgcagttccggtccaaccaaggaactccatcagcccaagccaaggagactggagcaaagccagggtcgtgtttcaactgtggcgagcatggccactttgctgacaagtgcccgaagccaaggcgtgctaggccaaggttttcccaagctcgtgtcaaccacgcgtctgcagaggaggcgcaagcagcaccagaggtcatactgggtacgtttcctgtcaacttagtccctgctacagtactttttgattctggtgcaacgcattgtttcatttcaaagaaatttgtggggatgcatgggttaagaaaagaagagcttagtacaccaatgagggttcatactccgggaaatagttcaacctcggtcagttatagcccttcagtgctaatagaaatacaccgatcacaatttctagccaacctcatccttctcgaatccaaagacctagatgtcattcttgggatggattggctgaccaagttcaagggagtcattgattgtgcaaatcgcacagtcaccttgaccaatgagaagggagaaaccgtggtgtacaagtcactagtctcaccgaagcagagaatctccttaaatcagattgaggtggaaatccctgtgaccaccgaggagaagagttcacggaaattggaggatatccccatagtctgcgagtatccagaagtgtttcccgaagacctcactagcatgccacccaagagagagattgaattccggattgatttggcaccgggaactgccccaatttacaagagaccgtacagaatggcagccaatgagctagcagaggtcaagaagcaggttgatgagcagctgcaaaaagggtacattcgaccaagtacttcaccttggggtgctccggtcatttttgtggagaagaaggacaagacgaagagaatatgcgtcgattatcgcgcactcaatgaggtcacaatcaagaacaaatattctttgccgcggattgatgatttgtttcatcagctgaaaggagctaaagtgttttctaaaatagacttgcaatcaggctatcaccagttgagaattcgggaagagaatattcccaagacagccttcaccactcggtatgggttgtatgagtgcacggttatgtcttttggacttaccaatgcacccgcattcttcatgaacttgatgaacaaagtgttcatggaatttctggataagtttgtggtggtattcatcgatgacattcttatctattccaaatcggaagaagaacatgagcgacatctctgtctggtactcgagaagttgaaggagcaccagttatatgccaagttcagtaaatgcgacttttggctatcggaggtcaaattcttgggtcacgtcattacagctcagggcgtggcagtcgatccgtcgaatgtggagtcagttaccaagtggaccccacctaagaccgtgtcacagattcggagttttcttggactttgtgacaagagttttgaggagctcaagaagaaattagtatccgccccagttctgattttgcccgaccagacgaaagacttccaagtctattgcgacgcatcccgtcacgggcttggatgtgttctaatgcaagagggcagagtggtcgcttatgcctcgcggcagttgcgtccgcatgaagggaactatccaacacatgacttggaattggcagcggtggttcatgctttgaaaatctggaggcattatctgattggcaaccgctgcaaagtatatacggactacaagagtctgaaatatatcttcacccaacctgatctaaatctccgacagcgaagatggttggagttaatcaaggattacgacatgagcattcactatcacccgggcaaagccaatgtggtggcagatgcattaagtaggaagagctactgcaatgctttgtgcaccgaaggcatgtgtaaggaattgcagcaggagcttgaacacctcaacttggggcttgtagaatacgggtacgtggctgccctagaggcacgacttacgctcgtggatcaagtcggagtagctcaggtaaatgatcctgaaatagcgaagctgaaaaagaatatgagggtcggaaaagcccgggatttccacgaagatgaacatggcacaatctggttgggagaaagatggtgcgtacctgacgacaaggaactaaaggatctgatactcatcgaggctcatcagactcagtactccattcatccaggcagcaccaaaatgtaccaagacctcaaagaaaagttctgctgggtcagcatgagaagggaaatagctgaatttgtcgcactctgcgacgtttgccaacgagtgaaggcagagcaccaaaggccagcagtgcataccacgtatacggggaagaaattggcagagctgtacttggcaaggatcatgtgtctgcatggagtacccaagaagattgtatctgatcgagggagtcagttcacctcaaaattttggcagaagctgcaggaagaattggggacccgtttgaatttcagcacagcctaccatccgcagacagatgaccagaccgaaagggtcaatcagatcttggaagatatgctgcgggcgtgtgcactcgattttggtggagcatgggataaaagtctgccttatgcggaattctcgtacaacaacagttatcaggccagtctacagatggcaccgttcgaagcgttgtttggccggaagtgccgcacacctctcttctgggatcaaacaggcgaacgtcaactgttcggaacagaagtgttaatggaagcagaagagaaagtcagaaccgtcagagagaggctgagagttgcccagtctcaacagaagagctacgcggacaaccgccgaagggagctcacttttgaagcaggggattatgtgtatctccgtgttactccgctccggggagtgcacagtttccagacgaaaggcaagttggcactacgcttcgtgggaccatacaaaatcttggaacgaagaggagaagtcgcctatcagctagaacttccatccaacatgatcggcaaccatgacgtgttccatgtgccccagttaaagaagtgcttgagggtacccgaagaacaagccgattcggagcacattgacatccaagaagatctgacctatgtggagaagccagttcgtatccttgagaccaatgaaaggaggactagaaacaaggtcaccaggttctgcagggttcagtggagccaccactcaaaagaagaagcaacctgggaaagggaaggtgagttaaaagccgcccatccgcacctcttcaccagctcttccgaatctcggggtcgagattccgtttaa

SEQ ID NO: 14077 - DNA, 1209 bp, Oryza sativa
  Clone ID: TFbOSC900205j.C1.o17.fg
atggcgctgacagaccatggtcaaagatttgttagctcaacaaggagtttcaaaggctttgaaggtgtcaaacaggccaagatggaggatgacgattgggaggagatgcagttgcaggcggctgcgacaataaggctatgtctctcagatcaggtcatgtatcatgtgatggagaagacctcaccaaagataatttgggaaaagttggaagctcagtttatgtccaagactctgaccaataagctatatctgaagcagaagttgtatgggctaaagatgcaggaaggggcggatttgacagcacatgtgaacgttttcaatcaactagtcacaaatcttgtgaagatggatgtggaagttgacgatgaagacaaggccatagttcttttgtgttcgttacctgaatcgtatcagcatggggtgactactttgacgtacgacaaggagaccatcaaaactaaagatatcacttctgcattgttggctcgtgatcagatgagaaagaacagagagggtgaaacatctcaagcggagggtttgctagtcaaagaagatcatgctgggcataagataaagaagaacaaaaagaagaagatggtgcagtgcttcagatgtgatgagtgggggcatataagcagggagtgtccaacactgaagggaaaagcaaaggctaatacagtgaattcttcaaatgactcggatagcgatggttgtgatcttctcacaatgtcaagtgcacagtataaggatgcagaagcgtgcatattagattcagctagctcgtttcatgtgacgccaaggaaggagtggttctcttcatacaagtccgatgagtttggttttgtctacttaggcgatgacacaagttatccggccgtgggagtaggtgaagtcaaaatcaagctagaagatggaggtgaacatgttcttcagggagtcaggcatgtaccagggctaaagaggaatctgatttcgcttggaaccttgcatgaagaagggttaatattccgcggtaatcggaataagaacaccatggagatcatgaagggcaagacgactatgatgactggagagaaggtggagtcgcaactttacaagctgcgagggtgcactattgcaggtggagtccaagaggaagcggttgctgggatagcaattgtttttgaagacggcaggtctggtgcagactcgtcgagtggcttgtggtga

SEQ ID NO: 14078 - DNA, 2486 bp, Oryza sativa
  Clone ID: TFbOSC900213j.C1.o8.np
tacggccagtgagaacgacaccaccttcagccacatgtgcgccgtgatgaggggaatggacaggatgcactctgacctgcacaaggcatccaaggccttgaatgatgggaagcttgtgaggatcatagctctgaaggatgagatagcacgcttgaagaaggaaaacgcttagttgaagggtctcccagcgccaggaggagtccagatccgcaccacgcctcgcaagtcaacgaatgcacccgtgcgcattcagcttgcgcccaggaacccacctcctcccgcagctcctccagcacctcccgcagttcccgcagcgcccgcagctccagctccagctcccgcgtccgctctctctttcgctccagcgtcagccgccaggggtccagccagtggcaacagaggttgctcccttcagatggtcaacaccaggaatggcagccgtgtagcaggtgagggcagcaacggcaaagaatgcaccgacggtggatatcctaacagcgcctctggcaacggtccgccaccgctccccgagaacctgactcttgcacaagtgatggcccatcagactcagatgatggcggccatgatgcaacagatgcagcagcagcaccagcagatgcaccagaggatgtagcagcaagccgagcagcagcagcagcagtttggtccccctccccctcagtccaagctgccggagtttctacgcgtcaggccacccaccttctctagcaccaccaaccccatggaggcaaatgactggctccatgacatagagaagaagctcaatcttctgcagtgcaacgatcaggagaaggtcgccttcgccacacaccagctccagggtcccgcgtcagcttggtgggacaaccacatggctacccgcccgccaggcacagaagttacttgggcagagttctgtcgcagcttccggaaggcgcaagtgccagacggggtcgtggcacaaaagaagagagaattccgggcactccatcagggcaacaggacagtaacagagtatctgcatgagttcaatcgcctagcgtgatatgcaccggaggatgtccgcactgacgcagaaaagcaggagaagttcctagcaggcctggatgacgagctgaccaaccagttgatctccggggattacgctgacttcgagaagctgcatcgccctttcaactcaagcagcttccaccagggcgccagtggcagccagaaccacccgggaggtcagcccaaccgcagtgcatctccgcgcccaccaatggccacagcacaggcagctccatcagtccaagccaagaaggagactggagcaaagccagggtcctgcttcaactgtggcgagcatggccactttgctgacaagtgcccgaagccaaggcgtgccgagccaaggtttgcccaagctcgtatcaaccacgcatccgtagaagaggcgcaagcagcaccagaggtcgtactgggtacgtttcctgtcaactcaatttctgcaaaagtacttttagattctggtgcgacgcattcattcatttcaaagaagtttgttggggtacatgggttaataagagaagaacttagtacaccaatgcaggttcatacccccgggaatagctccacctcggttcaattcagcccttctgtaacaatagaaatccaaagatcaccatttctagccaacctcatccttctcgaatccaaagatctagatgtcattcttgggatggattggctgaccaagttcaagggtgtcattgattgtgcgaatcgcacggtcaccttgaccaatgagaaaggggaaacagtggtgtacaagtcaccagtcgcactgaagcagggaatctccttaaatcagattgaggtggaaaatccggtggtcactgaggagaagagttcgaggaaattggaagatatccccatagtctgcgagtatctagaggtgttccttaaggacctcactaccatgccacccaagagagagattgaattccggattgatttggcaccggggactgctccaatttacaagagaccgtacagaatggcagccaacgagctagcagaggtcaagaagcaggttgatgagcaactgcagaaagggtacatttgaccaagtacttcaccttggggtgctccggtcatttttgtggagaagaaggacaagacgaagagaatgtgcgtcgattatcgcgcactcaatgaggtcaccatcaagaacaaataccctttgccgcagattgatgatctgtttgatcagctgaaaggagccagggtgttttccaaaatagacctgtgatcaggctaccatcagttgatgattcgggaagaggatattctcaagacagccttcaccactcggtatgggttgtatgagtgcacggttatgtcttttggacttaccaatacacctgcattcttcatgaacctgatgaacaaagtgttcatggaattttaagacgaatagaagatcatcttcatcgtcgatcgtc

SEQ ID NO: 14079 - DNA, 3339 bp, Oryza sativa
  Clone ID: TFbOSC900247j.C1.o12.fg
atgatcgtccgccagcaccgccctttcaactcgagcagcttccaccagggcgccagtggcagccagaaccaccagggaggtcagcccaactgcagcgcagctccgcgcccaccaacggcaccagcacagtcagctccatcagccgaagccaagaaggagactggaacaaagccagggtcctgcttcaattgtggcgagcatggccactttgctgacaaatgcccgaagcctaggcgtgctgggccaaggtttgtccaggctcatgtcaaccacgcgtccgccgaagaggcgcaaccagcaccagaggttgtactgggtacgtttcctattaactcagtccctgctacagtactttttgattctggcgcaacgcattctttcatttcaaagaagtttgtagggatacatgggttaagaaaagaagagcttagtacaccaatgagggttcataccccgggaaatagttcaaccttggtcagttatagcccttcagtgctcatagaaatacaccgatcacgatttctagccaacctcatccttcttgaatccaaagatctagatgtcatccttgggatggattggatgaccaagttcaagggagttattgattgtgcgaatcgcacagtcaccttgactaatgagaagggagaaaccgtggtgtacaagtcaccagtctcacggaagcaaggaatctccttaaatcagattgaggtggaaaaccctgtagccatcgaggagaagagttcgcggaaattggaagatatctccatagtctgcgagtatccggaagtgttccccgaagacctcactaccatgccacccaagagagagattgaattccggattgatttggcaccggggaccgctccaatttacaagagaccgtacaggatggtagccaacgagctagcagaggtcaagaagcaggttgatgagcaactgcagaaagggtacattcgaccaagtacttcaccttggggtgctccggtcatttttgtgcagaagaaggacaagacgaagagaatgtgtgtcgattatcgcgcactcaatgaggtcacaatcaagaacaaatatcctttaccgcggattgatgatctgttcgaacagctgaaaggagccaaggtgttttccaaaatagacctgcgatcaggctaccaccagttgaggattcgggaagaggatatctccaagacagccttcactactcggtttgggttgtatgagtgcacggttatgtcttttggacttaccaacgcacctgcgttcttcatgaacctgatgaacaaagtgttcatggaatttctggataagtttgttgtggtattcatcgatgacatacttatttattcaaagtctgaagaagaacatgagcaacatctccgtctggtactcgaagagttgaaggagcaacagttatatgccaagttcagcaagtgtgacttttggttgtcggaagacaaatttctgggtcacgtcattacagctcagggcatagcagttgatccagcaaatgtggagtcagttaccaaatggaccccacctaagaccgtgtcacagattcggagttttcttggacttgcgggttattaccgtcggttcattgaaattttctccaggatcgcccgacccatgactcagttgcttaagaaagatgagaaatttaaatggacggccgagtgtgacaagagttttgaggagctcaagaagaaattggtgtctgctccagttctgattctgcccgatcagacgaaagacttccaagtctactgcgatgcgtcccgccacgggcttggatgtgttctaatgcaagagggcagagtggttgcttttgcctcgcgcaaccgctgcgaagtatatacagatcacaagagtctgaaatatatcttcacccaaccagatttgaatctccgacaacgaagatggttggagctaatcaaagattatgacatgagcattcactaccatccgggtaaagccaatgtggtggcagatgcattaagcaggaagagctactgcaatgccctatgcaccgagggcatgtgtaaagaattgcagcaggagcttgaacgtctcaacatgggaatcgtagaacacgggttcgtagccgccctagaagcacggcctacgctcgtggatcaagtcagagcagctcaagtgaatgatcctgagatagctgaactaaaaaagaatatgagggtcagaaaagcccgggacatccttgaggatgaacatggcatgatctggatgggagaaagattgtgcgtgcccgatgataaagagctgaacgatctgatacttactgaggctcatcagactcaatattccattcatccgggtagtaccaagatgtatcaagatctcaaagaaaaattttggtgggccagcatgaaaagggagatagctgaattcgtcgcgctctgcgatgtttgtcagcgagttaaagcagaacatcagaggcccgcaggattgctacaacctcttcaaatcccggaatggaaatgggaagaaattggaatggatttcataacaggtctgcccaggacatcatctggtcacgattcaatctgggtagtcgtggaccgacttaccaaagttgctcatttcattccagtgcatactacttatacgggcaaaagttctcttacaacaacagctatcaggccagtctacatatggcgccgttcaaagcgttgtacggttggaagtgttaacagaagcattgtacggcctctcttctgggatcaaacgggcgaacgtcaactgttcggaacagaagtgttaacggaagcagaagagaaagtcagaaccgtcagagagaggctaagaattgcccagtctcgacagaagagctacgcagacaaccttcgaagggagctcacttttgaagcaggggattacgtgtaccttcgtgttactccgctccggggagtacaccgttttcaaacgaaaggcaagttggcaccacgcttcgtgggaccatacagaatcttggaacgaagaggagaagttgcttatcagctagaacttccatccaatatgatcggtatccatgacgtgttccacgtgtcccagttaaagaagtgtctgagggtacccgaagaacaagccgattcagagcacatcaatatccaagaagatctgacgtatgtagagaagccagttcgtattcttgagaccagtgaaaggagaaccagaaacaaggtcactaggttctgcagggttcagtggagccaccattcagatgaagaagcaaccttggaaagggaagatgagttgaaggccgcccatccgcacctcttcaccagctcctccgaatctcggggccgagattccgtttaa

SEQ ID NO: 14080 - DNA, 2565 bp, Oryza sativa
  Clone ID: TFbOSC900257j.C1.o11.np
ctacgttaagctcttagcatgtcctaattttagtgcggatttttcatgcttgcatcatattttaaaaattgcaaaaaccctatgctgcgcagattctcacaccacacctcaggcttcacccccgcccccagcaggtagcggacagtcccctctcgtggctaggtgaatccggaagcgacagaggccgtcgcagggcccgccctgctccatcacgcccacccttgcctggatgcgtcaaccagagaaaagctacacttcaaggcaggcagttacccattcccgcttgtggcaagcgttgtatgtcttctagtgcatcccgcgaaccggtccttaattgccatgggtgcgaccagcaaaaccatgcacccacaacccgctattcagtcgtattttagttggataattatgaccatgaaacatggccagatgtctcgagcacgtagctcatcataatactaacatgtctaatactgcaattatcccatctactgagctagtggtaattaagcatcgctaagcatatagttctagctaggtcatcaaagtaacataagcgggaggccggcgccgacacgcgggccccgcacgtcagcggcacaaaggggcggcgcacggtggaccaagtccgcacatggcctcgggtgcgcgtccaccacgtggacggcccaaatcggcccgagccgatcgagcggccgaggggagcggcggccaggggcacgggtgcggcacaaagccggcccggcagagccaaggcacggcggcgacggccagcaacagcgtggcgagcggcggcgacggcacgacttgaggtggctaggagcggcgggaggcggcggctggagcacgccgatgagtggtggggagagggagcgccgtggggaggtggtttcggcgacacaatggggaagcggaggggatgccggggtatggcacgacgcggcgaagccgctgatggcggtcgcgcggagcggcggcggcaggagcagcggtggcggccggctggaggatcaccggcgagaggtgcagcggtggcggcgtggttttcgtgcacaggagggctcgggagagaggggaaaatggagagggaggtgcggggaatgtttttataggggaggggaggtcggaccgagcccgggagaggcggagtcggggcggcaaccgccggcggcgtgggcggcatcgtggggtgtgggtggcggttttggaagggagaggtgggggatgaggaggacgtggggcggcggggtcccacggccggcggactcgtgcgcggggtggagaaggagggcggaaacggcagcgtcgtggggaggctcaggcggccatggcggcggttggagccggaggaaggggccggccccacctgtcagcgaagggagagaggaagggacgcaaaaaagactttttgcgagggaggataggagggaggccgagggaggggaaagggaggccggcctagccgggaaagactccttccaagttggcagatgttcagcgaactcatccgccacatttctcctctgcagctgatccactcgcagcagatgattggcttcgtgatattaaaatcaagctaaatctttgccagtgtgatcctgtagagaaggctacattcgctgcatactacctgcaaggagcatcagctgcttggtgggagacatacaagactctcattcctcctgatgagcctaacaattggactgttttctgggaaggattcatatctgctcacatccctcctggtctcatggagatcaaaaagaaagagtttcttaacttgaagcaaggaaacatgaccttcatggagttcatggaacgcttcaactatctgggtagatatgtcgctgctgacatgaacactgaagcaaagaaggttgagctatgcagagatcgtcttgcacctgaactcaaccatgctattactgctcatgaaatcactagcatgaagtcactggttgaaaaagcccttcgtgtcgaatcaagtgagaaggaagtcgttgaagatcgtaagcgcaagtgggctgcaaagaaatttgcaagtggcagcagctccactcggcctcgtcttgctccatctcctgtggttcgtcccatggcgcctcagccaccacggcttcctcgcacagttcaagctgcgggagatgcatctcgtaatgataatgtcgcatgttataattgcggcaagaaggggcattattctcctaactgtccttacccgaagactggaaaatctggaccgcatacacagggagcggacgccgcactcgctggctgccggccaacccatcgctaatcgtccagtccaggggcacagccagcatccggccaaactttcacaatatcagccacgaataagtccatcaaggtaacaaataatgcttcatctatttatttttcaatcaacttcactggttatagacaaaaccaattggatgatgctgacagtgcagcaatgtccagcacgatcctcaacagagctgtatcatctgacaaaagccccactaacgtcacgtggaggcacagactaccacctttctctctctagccctcctcctacggcgactc

SEQ ID NO: 14081 - DNA, 1410 bp, Oryza sativa
  Clone ID: TFbOSC900321j.C1.o7.fg
atggcggaaaatgaccggaagacggggccgggcgtggccgaaggcgactggagagatctgaggggtagcgccatggacggcgcgcccgacgcacgtgccgaagagagagccgaaccaaagcaacaaagcggcagcgatttttgggcggctcggcaggacattggtcaaacatggtacaaggggctcaataggcttgctgtgcagaggctcgtgacaaagtgcgcgcgtatgggtcgaccaagccaggccgacgagatcatgcggagtagaggcacatcgagggtggaagattggtcacatcggattatagcgaacacgactagggtcaaagatttgttagctcaacaaggaggttcaaaggctttgaagggtgtcaaaccggccaagatggaggatgacgattgggaggagatgcagttgcaggcggctgcgacaataaggctatgtctctcagatcagaagttgtatgggctaaagatgcaggaaggggcggatctgacagtacatgtgaacgttttcaatcaactagtcacagatcttgtgaagatggatgtggaagttgacgatgaagacaaggccatagtttttttgtgttctttacctgaatcgtatgagcatgtggtgactactttgacgtacggcaaggagaccatcaaaactaaagatatcacttctgcgttgctggctcgtgatcagatgagaaagaacaaagagggtgaaacatctcaagcggagggtttgctagtcaaagaagatcatgctgggcataaggtaaagaagaacaaaaagaagaagatggtgcagtgcttcagatgtgatgagtgggggcatataagcagggagtgtccaacactgaagggaaaagcaaaggctaatacagtgacttcttcaaatgactcagatagcgatggttgtgatcttctcacgatgtcaagtgcacagtctaaggatgcagaagcgtggatattagattcagctagctcgtttcatgtgacgccaaggaaggagtggttctcttcatacaagtctggtgagtttggttttgtctacttaggcgatgacacaagttatccggccgtgggagtaggtgaagtcaaaatcaagctagaagatggaggtgaacatgttcttcagggagtcaggcatgtaccagggcaaaagaggaatctgatttcgcttgaaaccttgcatgaagaagggttaatattccgcggtaatcggaataggaagaccatggagatcatgaagggcaagatgactgtgatgactggagagaaggtggagtcgcatctttacaagctgcgagggtgcactgttgtaggtggagtccaggaggaagcggttgctgggatagcaattgtttttggtggcggcgggtctggcgcagactcgtcttgcggcttgcggtga

SEQ ID NO: 14082 - DNA, 5291 bp, Oryza sativa
  Clone ID: TFbOSC900337j.C1.o10.np
atggccgatcacccacccaaccaccgcggagaaggcatggatgattttgtggcagagttggctcgcatgaccctagtggtgggctaccccaacgcgccggagtactcgaccgttccaccgctcaatggcgagcttccccaccgtgttcgtctggaggttcatggctatgtgggcacctgcctcgctaatatggtggttgaggcatctgggggcactgcagatcatgcctgctaggaggcagcatatctgatgatggccagacttcgtgagcgccacaactacatcttctgcaacacggcataccatttccaccctcgtcgagcaagtggtgacgatgtcaacaccttccgcccgacagccggcgagaacgacaccaccttcggccacatgtgcgccgtgatgaggggaatggacaggatgcactcggatctgcacaaggcatccaaggccttgaatgacaggaagctcgtgaggatcatagctttaaaggatgagatagcgcgcctgaagaaggagaacgcttagttgaagggtctctctgcgctaggaggagttcggatccgcaccacgccccgcaagtctacgactgctcccgtgcgcattcagcttgcgcccaggaacccacctcctcctgcagctcctcccgcagctcctcctgcagttcctgtagcgcccgtgtcagctcccgcgtctgctctctccttcgctccagcgtcagccgccaggggtctagccagtggcagccacgaccgcagcagtagcatggtcaacaccaggaatggcagccgtgcagcaggtgaggacagcaacagcgaagaacgcaccgatggtggacaccccaacagcgcctctggcaacggtccgccactgctccccgagaacccgacgctcgcacaagtgatgacccatcagactcagatgatggcagccatgatgcagcagcagcaccagcagatgcaccagaggatgcagcagcaaaccgagcagcagcagcagtagcagtttggtccccctctcccccagttcaagctgccggagtttctacgtgtcaggctacccaccttctctagcaccaccaaccccatggaggcgaatgactagctccatgccatagagaagaagctcaatctcctgcagtgcaatgatcaggagaaggttgccttcgccacacaccagctccagggtcccacgtcagcttggtgggacaaccacatggctacccgttcgctaggcacagaagtcacttgggcggagttctgtcgcagcttcaggaaggcgcaggtgcctgacggggtggtggtacaaaagaagagggaattccgggcactccaccagggcaacaggacagtgactgagtatctctatgagttcaatcgtctagcgcgatatgcaccggaggatgtccgcactgacgcagagaagcaggagaagttcctagcaggcctggatgacgagctgaccaaccagttgatctctggagactacgccgactttgagaagctggttgacaaggcaatccatcaggaggatcagcgcaacaaaatggacaggaagagaaaggcagcgcagttccggtccaaccaaggaagccaccagcgaccacgcttctttcctggacagcagggtggacctaccaccatgatcgtccgccagcatcgccctttcaactcaagcagcttccaccagggagccaatggcagccagaaccaccagggaggtcagcccaaccgcagtgcagctccgcgcccaccaatggcaccagcatagtcagctccatcagcccaagccaagaaggagactggaacaaagccagggtcctgcttcaactgtggtgagcatggccactttgctgacaaatgcccgaagccaaggcgtgccgggccaaggtttgtccaggctcgtgtcaacaacgcaacagtactttttgattctgcaccagaggtcgtactgggtacgtttcctgttaactcaatccctgcaacagtacttttcgattctggtgcaacacattcgttcatttcaaagaagtttgttgggatacatgggttaataagagaagaacttagtacaccaatgcgggttcataccccagggaatagctccacttcggttcaattcagcccttctataagaatagaaatccaaagatcaccatttctagccaacctcattcttctcgaatccaaagacctagatgtcattcttgggatggattggttgaccaagttcaagggtgtcattgattgtgcgaatcgcacagtcaccttgaccagcgagaagggagaaacattagtgtacaaatcaccagtctcaccaaagcagggggcctccttgaatcagattgaggtggaaattccagcggtcaccgaggagaagagttcgaggaaattggaagatatccccatagtctgcgagtatcccgaagtgttccccgaggacctcactactatgccacccaagagggagattgaattccggattgatttgacaccgagaactgctccaatttaaaagagaccgtacagaatggcagccaatgagctagcagaggtcaagaagcaggttgatgagcagctgcagaaagggtacattcgaccgagtacttcaccttggggtgctccggtcatttttgtggaggagaaggacaagacgaagaggatgtgtgtcgattatcgcgcactcaatgaggtcaccatcaagaacaaatacctgttgccgcggattgatgatctgttcgatcagctgaaaggagccaaggtgttttccaaaatagacctgcgatcaggctaccaccagttgaggattcaggaagagaatattcccaagacagccttcaccactcggtatgggttgtatgagtgcacggttatgtcttttggacttaccaatgcacctgcattcttcatgaacctgatgaacaaagtgttcatggaatttctggataagtttgttgtggtattcatcgacgacatacttatctattcaaagtctgaagaagaacatgagaagttgaaggagcaccagttatatgccaagttcagcaagtgtgacttctagttgtcggaagtcaaatttctgggtcacgtcattacagctcagggcgtggcagtcaatccattgaatgtggagtcagttaccaaatggaccccacctaagaccgtgtcacagattcggagttttcttggacttgcgggttattactgtcggttcattgaaaatttctccaggattgccagacctatgactcagttgcttaagaaagacgagaaatttaaatggacggccgagtgcgacaagagttttgaggaactcaaggagagattagtgtctgctccagttctgattttgcccgaccaaacaaaggacttccaagtctactgcaacacgtcccgccacgggcctggatgtgttctaatgcaagagggcagagtggtcgtttatgcctcgtggcagttgtgtccacatgaagggaactatccaacacatgacctggaattggcagcagtggttcatgatttgaaaatatggaggcgctatctgattggcaaccgctgcgaagtttatacggatcacaagagtctgaaatatatcttcacccaacctgatctaaatctccgacagcgaagatggttggagctaatcaaagattatgacatgagcattcactaccatccgggcaaagccaatgtggtggcagatgctttaagcaggacaagctactgcaatgctttgtgcaccgagggcatgtgtaaggaattgcagcaagagcttgaacacttcaacttggaacttgttgaacacgggtacgtggccgccctagaggcacgacctacgctcgtggatcaagtcagagcagcccaagtaaatgatcctgagatagctgaactgaaaaagaatacgagggtcggaaaagcccgagacttccttgaggatgaacatggcacaatctggatgggagaaagattgtgcgtgcctgatgacaaagagctaaaagatcttatactcactgaggctcatcagactcaatactccattcatccgggtagtaccaagatgtatcaagatctcaaagaaaaattttagtgagccagcatgaggagggaaatagctgaattcgtcgcgctctgcgatgtttgtcagctagttaaggcagaacatcagaggctcgtaggattgttacaacctcttcagatcccggaatggaaatgggaagaaattggaatggatttcataacaggtctgcccaggacatcatctggccacaattcaatctgggtagtcgtggatcgacttaccaaagttgctcatttcattccagtgcataccacttatacgggcaaaaggttggcagagctctatctctcgagaatcatgtgtctgcatggagtacccaaaaagatagatctgatcgagggagccaattcacttcaaatttctggcagaaattgcaagaggaattgggaacccggctgaacttcagcacaacctaccatccgcagaccgatggtcagaccgagcgggtcaatcaaatattggaggatatgttaaaggcttgtgcgcttgattttggtggagcatgggacaaaaacttgccgtatgtggagttctcctacaacaacagttaccaggctagtttgcaaatggcaccgttcgaagcgttgtatggccggaagtgccgcacacctctcttctgggatcaaaccggcgaacgtcaactgttcggaacagaagtgctaactgaagcagaggagaaagtcagaaccgtcagagaaaggctgagaattgcacagtctcgatagaaaagctacacagaaaaccgccgaagagagctcacttttgaagcaggggattacgtgtaccttcgtgttactccgctccggggagtacaccgtttccaatcgaaaggcaagttggcaccacgcttcgtaggaccatacaaaatcttggaacgaagaggagaagttgcttatcagctagaacttccatccaacatgatcggtatccatgacgtgttccacgtgtcccagttaaagaagtgtttgagggtacccgaagaacaagccgactcggagcacatcgatatccaagaagatctgacttatgtggagaagccagttcgcatccttgagaccagtgaaagaaggactagaaataaggtcaccaggttctgcagggttcagtggagccaccattcagaggaagaaacaacctgggaaagggaagatgagttgaaggccgcccatccgcacctcttcgccagctcttccgaatctcggggtcgagattccgtt

SEQ ID NO: 14083 - DNA, 2565 bp, Oryza sativa
  Clone ID: TFbOSC900388j.C1.o21.gm
atggctacccgtccgccaggtacggaggtcacttgggcggagttctgtcgcagcttcaggaaggcgcaggtgccagacggggttgtggcacaaaagaagagagaattccgcgcactccaccagggcaacaggacagtaaccgagtacctgcatgagttcaatcgcctagtgcgatacgcaccagaggatgtccgcactaacgcagagaaacaggagaagttcctagtgggcctggataacgagcttaccaaccagctgatttctagagactacgccgactttgagaagctgggtggacctaccactatgattgtccgccagcatcgtcctttcaactcaagcagcttccaccagggcgccagtggtagccagaaccacccgggaggtcagcccaaccgcagtgcagctccgcgcccaccaatggcaccaacacaatcagctccatcagcccaagccaaggagactagggcaaagccagggtcctgcttcaactgtggcgagcatggccactttgctgacaagtgcccgaagcccaggcgtgccgggccaaggtttgcccaagcccgtgttaaccacgcgtccgcagaagaggcgcaagcagcaccagaggtcgtactggtcaccttgaccaatgagaaggtagaagcagtggtgtacaagtcaccagtctcactgaagcaggggatctccttaaatcagattgaggtggaaaatccggtggccaccgaggagaagagttcgaggaaattggaagatatccccatagtatgtaagtatccagaggtgttccctaaggacctcactaccatgccaaccaagagagagattgaattccggattgatttggcaccggggactgctccaatttacaagagaccgtacagaatggcagccaatgagctagcagaggtcaagaagaaggttgatgagcaactgcagaaagggtacattcgaccaagtacttcaccttggggtgctccggtcatttttgtggagaagaaggacaagacgaagagaatgtgtgtcgattatcgcgcactcaatgaggtcacaatcaagaacaaatatcctttgccgcggattgatgatctatttgatcagctgaaaggagccaaggtgttttccaaaatagacctgcgatcaggctatcaccagttgagaattcgggaagaggatattcccaagatagccttcaccactcggtatgggttgtatgagtgcacggttatgtcttttggactcaccaatgcacctacattcttcatgaacctgatgaacaaagtgttcatggaatttttggataagtttgttgtggtattcattgatgacattctaatctattccaagtcggaagaagagcatgagcaacatcttcgtctggtactcgagaagttgcaggagcaccagctttatgccaagttcagcaaaggcgacttttggttatcagaggtcaaattcttgggtcacgtcattacagctcagggcgtggcagtcgatccatcgaatgtggagtcagtcaccaagtggacaccgcctaagacagtgtcacagattcggagtttccttggacttgcggagctgaaaaagaatatgagggtcggaaaagcccgggatttccatgaagatgaacacggcacaatctggttgggagaaagattgtgcgtacctgatgacaaggaactaaaggatctgatactcaccgaggctcaccagactcagtactccattcacccaggcagtaccaaaatgtaccaagacctcaaagaaaagttttggagggctagtatgaggagagaaatagctgaatttgtcgcactctgcgatgtttgccagcgagttaagaaaagctacgcggacaaccgccgaagggagttcacttttgaagcaggggattatgtgtacctccgtgtcaccccgctccggggagtgcaccgtttccagacgaaaggcaagttggcaccacgcttcctagggccatacaaaatcttggaacgaagaggagaagttgcctatcagctagaacttccatccaacatgatcggtatccatgacgtgttccatgtgtcccagttaatgaagtgcttgaggtcatccctcgccgccgctcgtcgtcgatcgccgccgctctccgccgttggccgctcgccgccttgcgtcaccgtcgcgtcgcgctgcgccgccgcgcgccactgccgccgggtcggcttgggccctgctcgtgcgcgcccggccgcgagccgcctccgccgtccgatctaccgggcggtagatcggggccgttcaaccccgccgcccacgtggctgccacgtggccgccacgtgtgcgccgcgtcggcgccacgtgtgcaccacgtggtgcgccgctcctccccgcatgatcctgcagagacgaagggatacaaggtcggcttccttgatctcaatcatgatcctgcagagacgaagggatacaaggtcggcttccttgatctcaataattgcctccattggtgttgtcgattggtgcgccacctcctgctcctggcgcaccaacccctgccgctccgggtgcgccaccaccagtag

SEQ ID NO: 14084 - DNA, 769 bp, Oryza sativa
  Clone ID: TFbOSC100133j.C1.o1.gm
gctatgcagccggagggacagcctgttacttgggcccgcttcaccgccgctttccggagaacccatgtgcccgccggagtcgtggcccttaagaaaagagaattccgagagttgaagcaaggcaaccgctccgtgatggagtatttgcacgagttcaacaacctggcccgttacactccggaggatgtgcggaaagatgaggagaagcaagaaaagttcctggcaggaatggaccctgagctgtccgtccgtctagtctctggggactatccggatttccaacgtctggtggacaagagcatccgcttggaagccaagcacaaggaactggagtcgcacaagcgccgcttggcgaatttccgcaaccaacagggtgctaaccaaagggtccgctacaccaatccctatccagggggatcctcctcgcagcagcaacaacagcagcagcaacctcgctccgcgcctcgacctcaattcgtggtgcgcgtcccacagccgcagcagcaacagaatcaacaagggactcgagcgccccgtcctcctacgccaactgtgcagcctggtcaaggccgcagggacgcttcaggtccgcagcgtctgtgcttcaactgcttcgagccggggcactttgcggataaatgcccgaagccaaggcgtcagcaaggccaagcgcctccccgccccaacaacggtggtaaggacgtcagtcggggtcgtgtgaaccatgtgacggccgaggacgtgctgacaactccagacgtcatcgttg

SEQ ID NO: 14085 - DNA, 5214 bp, Oryza sativa
  Clone ID: TFbOSC100292j.C1.o6.fg
atgtcatggcacagggccggtgtcctgctgctaggggctcagtcctgcctgcctgtcccaggggttccggccgtaggtgggattgggtcagtactcttgtctatggctaggatgggttggaaactatgtcacgtctttcgtctatataccgtggtgatggccggcagcgtcacccgtcgtggtttggacatgactggtttcgtcttggagctgcggggcatgtgcgttgtcctggggtatccacatggggtggactaccagggcaggccgcttccggagcaggagggtgacgatgcagagccccacgctgcttgggaggtcactgcagtgatcctcgctggctctcccgagcggacttcgttggcagtcaccgcgggtggagattctttccccgccacttgccagagcgccgctctcctcgccatcggcactcttcaccagcgctacccggacgagttgcagcactcgcccttccgctaccaccctcgccgcggaggagcccgcgactacgccaccttccgggatgctagctcggaggatgacgctaccatcatgcacctggcgcgcatggtggaggcgtacgacgcggctcgtatcgacttccatcagatggtgcgccgtgggatggtcgagaacaacatgaagatcctggagctgcgtcaggagaacctgcagctcaagaaggacctagacgcggtggaggcgcagctgcatcagctcaagatcgcccagggagaggtctgccgccccaagcgtcgccgcgtctgccgcagccagaagatcaccgcccgcaagagcacctccaggcccgagcttgttcgtcagtccctagcgtggacttgcttcgtcgagacccctcgtgccgagcccgcgcccgtggttccccaggagggggaagcctccggcgttggtagcacggaggatgcgctgttgctcaccttccgtcctggcccgtcgcagcggagaagtgctgccaccggtgatggcaaccaacccgaaggcagcaaccaccaccaccagggcagcccacctccacctcctcctccgcctccaccaccaccaccagacaccaacgccattctcagccaaatcctcgcccagcaggccaacatgatgactgctttcctccaccacctccaaaatccgccacaacataatgctccaccaccacctccccaacactctaaactcgccgagttcctccgcatccgcccacctaccttctctagctccaacaaccccgtggatgcgttggattggttgcatgccgtggggaaaaagctagacactgtgcagtgcagcgatgaggagaaagtcatcttcgccgcccaccagctgcaggggcccgcatctttatggtgggaccatttccaggctacgcagccagaggggcaacctattacttgggctcgcttcactgccgctttccggagaacccatgtgcccgccggagtcatggcccttaagaaaagggaattccgagagttgaagcaaggcaaccgctccgtgatggagtatttgcatgagttcaacaacctggcccgttacgccccggaggatgtgcgggaagatgaggagaagcaagagaagttcttggcaggaatggaccctgagctgtccgtccgtctagtctccggggactatccggatttccaacgtctggtggacaagagcatccgcttggaagccaagcacaaggaactggagtcgcacaagtgccgcttggcgaatttccgcaatcaacagggtgctaaccaaagggtccgctacaccaatccctatccagggggatcctcctcgcagcagcaacaacagcagcagcaacctcgctccgcgcctcgacctcaattcgtggtgcgcgtcccacagccgcagcagcagcagaatcaacaagggactcgtgcgccccgtcctcctacgccaactgtgcagcctggtcaaggccgcagggacgctcaaggtccgcagcgtctgtgcttcaactgcttcgagcccgggcactttgcggataaatgcccaaagccgaggcgtcagcaaggccaagcgcctccccgctccaacaacggtgggaaggatgtcattcggggtcgggtgaaccacgtgacggccgaggacgtgctgacaactccagacgtcatcgttggtacgttcctcattcattccatccctgctaccattctgttcgactctggagcttcccactcgtttatatctgtgccattcgtggggagaaatcagttgggggtagaaaggcttaggaaccctgtgctcatcaccacccctggaggggttatgacagcaaagtattatagccctgccgtccccatagaaattcaggggattccttttccctcggatctgattctgctagacaccaagaacttggatgtgatccttgggatgaattggttggctcaattccaaggagtagtggattgtgcgagacgcactgtcactctgtaccgagggccggaacaaccggttgttttctttgcacccccaacctctgtcagtagttccgaacttcatcagataggactgtcagaaatccccatcgtcagagagttcggagacgtgtttccggaagaactacccggtatgccgcccaaacgagagattaagttccggatagatcttgctccaggaaccactcctctgtacaagcgaccctaccgtatggcagcaaatgaactggctgaagttaacaaacagttagaagagttagctctcaatgaagtcaccatcaaaaacaagtaccctcttccccggatcgatgatctgttcgatcagcttaaaggtgccactgtattctccaagatcgatcttcgttccggatatcaccaattacgtattcgtgatgaagatattccgaagaccgcattcaccacgcgatacggactgtatgaattcacggtgatgtcgttcgaggaagaccatcagcaccatctccgtctggtattgggaaagttgcgggaacatcaattgtatgccaaacttagcaagtgtgagttctggttgtccgaagtcaaattcttagggcacgtgatatctgctaaaggagttgctgtggaccccgaaacagtgaccgccgtcactgattggaagcaacccaagacagtcactcaagtccgcagtttcttaggtttggcaggatactaccggaggttcatcgagaacttctccaaaatcgctcgacccatgacacagttgttgaagaaagaagagaaatttgtgtggagcccgcaatgcgagaaggcgttcaaaactctcaaagaaaggctggtttcctcgccagtgttaatcttgccggatactcgcaaggacttcatggtgtattgtgacgcttcgcgccaaggattggggtgcgtgctcatgcaggatggtcatgtggtggcctatgcctcacgccagctacggcctcatgaaggcaactaccctacccatgatttggagttagctgcggtggttcatgctctaaaaatctggtggcactatctcattgggaatcgctgtgaaatatatactgatcataagagtttgaaatacatcttcactcagtcggacctgaatcttcggcaaaggagatggttagaactcatcaaggattacgatgtgggaattcactatcatcctggtaaggccaacgtggtcgctgacgccctaagtcgaaagagccattgcaacactcttaacgtccgcggcattccacccgaacttaatcaacagatggaagccctgaacctaagcatagttggtcgcggattcttggctgcgttggaagccaagcttaccttgctcgatcgaatccgcgaggctcagaagaacgatccggacatgcatggactcctcaagaatatgaaacagggtaaagccgttggtttcacagaggatgaacacggaaccctatggaacggaaatcgagtatgcgttccagataacagagaacttaaacagctgatatttcaggaagcccacgaaagtccttattccatccaccctggcagtacgaagatgtacttagacttgaaggagaaatactggtgggttagtatgaagcgggaaattgcagagttcgtggccctttgtgatgtgtgccagcgtgtcaaggcagagcaccaacgaccggccggacttctccaacctctccaagtacctgaatggaaatgggatgaaattgggatggattttatcaccggacttccaaagacccaaggtggatatgattctatatgggtagtggtggatcgattaaccaaggtagctcgattcattcctgtgaagaccacctatggagggaacaaactagccgagctctacttcgctaggatcgtgagtctccatggcgttcccaagaaaatcgtatctgataggggaagccaattcacctctcacttttggaagaagctccaagaagagctgggtacccgattaaacttcagcaccgcataccacccgcagacagatgggcagaccgagcgtctaaatcagatccaagaagatatgcttcgcgcatgtgtcctggatttcgggaagacctgggataagagtctcccctatgccgagttctcctacaataacagctatcaagccagcatacaaatggcaccttatgaagcgttgtatgggcgcaaatgccggacaccgctcttgtgggatcaagttggggaaagccaagtattcgggactgatatcctgagagaagctgaagctaaagtcagaaccattcgggataatctaaaggtggcacagtcccggcagaaagttatgcagataaccgacgccgtaacctggaattcgcagtggacgattttgtgtaccttcgggtcacgccattgcggggtgtacacaggtttcagacaaaagggaagctcgcacctcgaagtcgcttaccaattggagctgcccgcctccttgggcaacatgcatgatgtgttccatgtgtcgcaactcaagaaatgccttcgagtgccatccgagcaggccgactcagagcaaattgaagttcgcgaagacttgacctacgtggagaggccagtgaaaatcctggacaccatggagcgcaggaccaggaaccgggtaatccgtttttgcaaggtccagtggagcaaccacgccgaagaagaagctacctgggagcgtgaagacgagctgaaggcagcccatcctgatctcttcgccagttcttccgaatcttggggtcgagattccgtttaa

SEQ ID NO: 14086 - DNA, 4599 bp, Oryza sativa
  Clone ID: TFbOSC100644j.C1.o4.fg
atgtcatggcacagggctggtgtcctgctgctaggggctcagtcttgcctacctatcctggaggttccggccgtaggtagggttgggtcggtactcttgtctatggctaggatgggttggaaactatgtcacgtcttccgtccgtataccgtggtgatggccggcagcctcaaccgtcgtggcctggacctgactggcttcgttttggagctgcggggcatgtgcgttgtcctggggtatccgcatggagtggactaccagggcaagcagctcccggagcaggagggtgacgatgcagagccccacgctgcttgggaggtcactgcagtgatcctcactggctcacccgagaggacttcgttggcagtcaccgcgggtggagattctttctccgccgcttgccagaacgccgcactccttgccatcggcactcttcaccagcgctacccggacgagttgcagcactcgccctaccgctaccacccttgtcgaggaggagcccgcgactacgccaccttcagggatgctagctcggaggatgatgctaccatcatgcatctggcgcgcatggtggaggcgtacaacgcggcccgtatcgacttccatcgtatgctgaagaaggacttggacgcggtggaggcgcagctgtgtcagctcaagatcgcccagggagagatggtgacaaccaggagaagcgcggttaccggcgaaggcaatcaccccgaaggcagcaaccacagcaaccatggcagcccacctccacctcctcccccgccaccaccaccaccacctgacaccaaccccatcctcacccaaatcctcgcccagcaggccaacatgatggctgctttcctccaccacatccaaaatccgccacagcataatgctccacctccaccaccacccccgcaacattctaaactcgccgagttcctccgcatccgcccgcctaccttctctagctccaataaccccgtggatgccttggattggttgcatgccgcggggaaaaagttagacaccgtgcagtgcaacgatgaggagaaagtcatctttgccacccaccagctgcaggggcccgcatctctatggacccatgtgcccgccggagtcatggcccttaagaagagggaattccgggagttaaagcaaggcaaccactctgtgatggagtatttgcatgagtttaacagcctggcccggtacgccccagaggatgtttgggaagatgaggagaagcaggagaaattcctggcagggatggaccctgagctgtctgtgcgtctggtctccggggattatccggatttccagcgtctggtggacaacagcattcgcctggaagccaagcacaaggaactggagtcgcacaagcgtcgcttggcaaatttccgcaatcaacagggggctaaccaaatgatccgatacaccaatccctatccagggggatcctcctcgcagcagcagcagcaaccacgctccgcgccccgacctcaattcgtggtgcgtgtcccacagtcgcagcaacagcagagtcagcaaggtacccgtgcgccccgtcctcctgcgccagccgtgcagcttggacaaggccgcagggatgctcaaggtcaacaacgtctgtgcttcaactgcttcgagcccgggcactttgcggataaatgcccaaagccgaggcgccagcaaggccaagcgcctccccgacccaacaacggtggtaaggatgtcactcggggtcgtgtgaaccacgtgactgccgaggatgtgctgacaactccagacgtcatcgttgacaccaagaacttggatgtgatcctcgggatgaattggttggctcaattccaaggagtagtggatcgcgcaagacgcactgtcactctgtatcgggggcctgatcaaccagttgttttctttgcacccccaacttccgccggcagttcagtacttaatcagctaggattgccagaaatacccatcgtcagtgagttcggtgacgtgtttccggaagaactacccagtatgccgccccagcgagagattgagttccagatagatcttgctccagggaccactcctctatacaagcgaccctaccgtatggcagcacatgaactggccgaagtcaagaaacagttggaagagttgaaagaaaaggggtatatacggccgagcacttccccctggggttctcccgtgatttttgtggagaagaaagacaagacaaagaggatatgcgttgactacagagctctcaatgaagttactatcaaaaacaagtacgctcttccccggattgatgacctgttcgatcagcttaaaggtgccactgtattctccaagatcgatcttcgctccggatatcaccaattgcgtattcgtgaagaagatatcccgaagaccgcgttcaccacgcattatggactgtatgaattcacggtgatgtcgttcggtctaaccaatgcgcctgccttcttcatgaacttaatgaacaaagtgttcatggaatacttggataagtttgttgtggttttcattgacgacatcctggtgtacttacaatcagaggaagaccatcagcagcacctccgtctggcattgggaaagttgcgggaacatccattgtatgccaagcttagcaagtgtgagttctggttgtccgaagtcaagttcttagggcacgtgatatctgctaaaggagttgctgtggatcccgaaacggtgactgccgtcactgattggaagcaacccaagacagtcactcaggttcgcagctttttgggtttggcaggatactaccgaagattcatcgagaatttctccaaaattgctagacccatgacgcagttgctgaagaaggaagaaaaatttgtatggagcccgcaatgcgagaaagcattccaaactctcaaagaaaagctagtttcctcgccagtgttaatcttactggatactcgcaaggacttcctggtgtactgtgacgcttcgcgccaaggattggggtgcgtgttaatgcaggaaggtcatgtggtagcctatgcctcacgccagccacggccccatgaaggcaactaccctacccatgatttggagttggccgctgtgagaaggtggttagagctcattaaggattatgatgtgggaatccattatcaccctggtaaggccaacgtggtcgcagacgcgctgagtcgaaaaagcagttgcaacactcttggcgtccgtggcattccaccggagcttaatcaacagttggaagccctgaacctaagcatcgttagccatggattcttggctacattggaagccaagcctaccttgctcgatcaaatccgcgaggcccagaagaatgatctagatatgcatgggatactcaagaatatgaaacagggtaaagccgctggtttcacagaagatgaacacggaaccctatggaacggaaatcgttgtgtcaaggcagagcaccaacgaccggccagacttctccaacctctccaagtaccagaatggaaatgggatgaaattgggatggatttcatcaccggacttccaaaaacccaaggcagatatgattctatatgggtagtcgtggaccgactaaccaaggtagctcggtttattcctgtgaagaccacctatggagggaacaaattagctgaactctacttcgctaggatcgtgagtctccatggcgttcctaagaaaattgtatctgatcagggaagccaattcacttctgacatctggaagaagctccaagaagagttgggtacccgattaaattttagcaccgcgtatcacccgcagacagatgggcagaccgagcgtctaaatcagatcctagaagatatgctccatgcatgtgttctagattttgggaagacctgggataagagtctcccctatgccgagttctcctacaataacagctaccaagccagcatacaaatggcaccttatgaagcgttgtatggccgcaaatgccagacaccactattgtgggaccaagttggggaaagccaagtgttcgggactgatatcctgagagaagctgaagctaaagtcagaaccattcgggataatctaaaggtggcacagtcccggcagaagagttatgcagatacccgacgccgtaacctggaattcgcagtggacgattttgtgtaccttcgggtcacgccattgcgaggagtacacaggtttcagatgaaagggaagctcgcacctcggtttgtgggtcctttccgcatcattgctcgacgcggagaagtagcttatcaattggagctgcccacatccttgggcaacgtgcatgatgtgttccatgtgtcgcaactcaagaaatgtcttcgagtgccgtccgagcaggccgattcagagcaaattgaagttcacgaagacttgacctacgtggagagaccagtgaaaatcctggacaccatggagcacaggaccaggaatcgggtaatccgtttttgcaaggtccaatggagcaaccacgccgaggaagaagctacttcggaacgtgaagacgagctgaaggcagcccatctagatctcttcgccagttcttccgaatctcgtggtcgagattccgtttaa

SEQ ID NO: 14087 - DNA, 7002 bp, Oryza sativa
  Clone ID: TFbOSC101104j.C1.o16.fg
atggccggcagcgttacccgtcgtggtttggacatgaccggcttcgtcttggagctgcgaggcatgtgcgtggtcttggaatatccacatggagtggattaccaggccaggccgctcccggagcaggagggtgaggatgcagagcctcacgctggttgggaggtcactgcagtgatcctctccggctctcccgagcggacttcgctggcagtcacagcgggtggggactccttccccgccgcttgccagaacgccgctctcctcgccatcggcacccttcaccagcgctacccggacgagttgcagcactcgtcctaccgctaccaccctcgtcgcggaggagcccgcgacttcgccaccttccgagacgccagctcggaggatgacgctaccgtcgtgcatctggcacgcatggtggaggcgtacgacgcggctcgtatcgacttccaccagatggtgcgtcgtggcatggtggagaacaacatgaagatcctggagctgcgtcaggagaatctgcagctcaagaaggacctcgacgcgttggaggcgcagctgcaccagctcaagatcgcccagggagagatcagccgtcccaagcgtcgccgcgtctgccgcagccagaagatcaccgcccgcaagagcacctccaggcccgagcttgttcgtcagtccctggcgtggacctgcttcgtcgagacccctcgtgccgagcctgcgcccgtggttccccaggagggggaagcctccggcgttggtagctcggagggtgcgctgttgctcaccttccgtcctggcccgtcgcagcggagaaatgttaacaccggtgaaggcaaccaacccgagggcagcaaccccaacccccaaggcaatccacctccaccaccaccaccagacaccaacgccattctcacccagatcctcgcccaacaagccaacatgatgaatgctttcctccaccacctccaaaacccgccacaacagaatgctccaccaccacctccccaacactccaaactcgccgagttcctccgcatccgcccacctaccttctctagctccaacaaccccgtggatgcgttggattggttgcatgccgtggggaagaagctagacacggtgcagtgcagtgatgaagagaaagtcatcttcgccgcccaccagctgcaggggcccgcatctatctggtgggaccacttccaggctacgcagccagcgggacaaccgatcacttgggctcgcttcacctccgctttccggagaacccattatttgcacgagttcaacaatctggcccggtacgctccggaggatgtgcgggaagatgaggagaagcaagagaagttcttggcaggaatggaccctgagctgtccgttcgtctagtctctggggactatcctgacttccaacgactggtggacaagagcatccgcttggaagccaagcacaaggagctggaatcgcacaagcgccgcttggcgaatttccgcaatcaacagggtgctaaccagagggttcgctacaccaatccctacccagggggatcctcctcgcagcagcagcagcagcagcagcaacctcgctccgcgcctcgacctcaattcgtggtgcgcgtcccacagccgcagcagcagcagaatcagcaagggactcgtgcaccccgtcctcctacgccagccgtgcagcccgttcaaggccgcagggacgctcaaggtcagcagcgtctgtgcttcaactgtttcgagcccgggcactttgcggataaatgcccgaagccaaggcgtcagcaaggccaagcgcctccccgctccaacaacggcgggaaggatgtcattcgaggtcgtgtgaatcacgtgacggccgaggacgtgctgacaactccagacgtcatcgttggtacgttcctcgtccaatccatccctgctactattttgttcgactctggagcttcccactcgttcatatctgtgccattcgtggggagaaatcagttgggggtagaaaggcttagaaaccctctgctcatcaccacccctggcggggttatgacagcaaagtattatagccctgccgttcctatagaaatccaggggattccttttccctcggatctgattctgctagacacaaagaacttggatgtgatccttgggatgaattggttggctcaattccaaggagtagtggactgcgcgagacgcactgttactctgtaccgaggaccagaacaaccggttgttttctttgcacccccaacctctgtcagaagttcagaactgcatcagatagaactgtcagaaatccccatagtcagagagttcggagacgtgtttccggaagaactacctggtatgccgcccaagcgagagattgagttccggatagatcttgctccaggaaccactcctctgtacaagcgaccctaccgtatggcagcaaatgaactggccgaagtaaagaaacagttggaagagttgaaagaaaaggggtacatacgtccgagtacttccccatggggtgctcctgtgatttttgtggagaagaaagacaagacgaaaaggatgtgcgtcgactacagagctctcaatgaagtcaccatcaaaaacaagtaccctcttccccggatcgatgatctgttcgatcagcttaaaggtgccaccgtattctccaagattgatctccgttccggatatcaccaattacgtattcgtgaagaagatattccgaagaccgcattcactacgcgatatggactgtatgaattcacggtgatgtcgttcggcttaaccaatgctcctgccttcttcatgaacttgatgaacaaagtgttcatggaatacttggataaattcgttgtggttttcatcgatgacattctgatatactcacaatcagaggaagaccatcagcaccatctccgtctggtgttgggaaagttgcgggaacatcaattgtatgccaagcttagcaagtgtgagttctggttgtccgaagtcaaattcttggggcacgtgatatctgctaaaggagttgctgtggaccccgaaacagtgaccgccgtcaccgattggaagcaacccaagacagtcactcagattcgcagtttcttaggtttggcaggatactatcggagattcatcgagaacttctccaaaatcgctcgacccatgacacagttgttgaagaaagaagaaaagtttgtgtggagcccgcaatgcgagaaggcgttccaaactctcaaagaaaagctggtttcctcgccagtgttaatcttgccggatactcgcaaggatttcatggtgtactgtgatgcttcgcgccaaggattggggtgcgtgctcatgcaggacggtcatgtggtagcctatgcttcacgtcagctacgacctcatgagggcaactaccctacgcatgacttggaattagccgcagtggttcatgctctaaaaatctggcggcactatctcattgggaaccgctgtgaaatatatactgatcataaaagtttgaaatacatcttcactcagtcagatctgaatcttcggcaaaggagatggttagaactcatcaaggactatgatgtgggaattcactatcaccctggtaaggccaacgtggttgccgacgctctaagtcgaaagagccattgcaacactcttaacgtccgtggcattccacccgaacttagtcaacagatggaagccctgaacctaagcatagttggtcgcggattcttggctgcgttagaagccaagcccaccttgctcgatcaaatccgcgaggctcagaagaatgatccggacatgcatggactcctcaagaatatgaaacagggtaaggccgctggtttcacagaggatgaacacggaaccttatggaacggaaagcgggtatgcgttccagatagcagagaacttaaacagctgatacttcaggaagctcacgaaagtccttactccattcacccgggcagtaccaagatgtacttagacttgaaggagaaatactggtgggtcagcatgaagcgggaaattgcagagtttgtggccctatgtgatgtgtgccagcgtgtcaaggcagaacaccaacgaccggccggacttctccaacctctccaagtgccggaatggaaatgggatgaaattgggatggatttcatcaccggcctcccaaaaacccaaggtggatatgactctatatgggtaatagtggatcgattaaccaaggtagctcgattcattcctgtgaagaccacctatggagggaacaaactagcggagctctacttcgctaggatcgtgagtctccatggcgttcccaagaaaatcgtatctgataggggaagccaattcacctctcacttttggaagaagctccaagaagagcttggtacccgactaaatttcagcaccgcgtatcacccgcagacagatggacagaccgagcgtctaaatcagatcttagaagatatgctccgcgcatgtgtcctagatttcgggaagacttgggataagagtctcccctatgccgagttctcctacaataacagctaccaagccagcatacaaatggcaccctatgaagcgttgtacgggcgcaaatgccggacaccgctattgtgggaccaagttggagaaagccaagtgttcgggactgatatcctgagagaagctgaagctaaagtcagaatcattcgggataatctaaaggtggcacagtctcggcagaaaagttatgcagataaccgtcgccgtgatctggaattcgcagtggatgattttgtgtaccttcgggtcacgccattgcgaggtgtgcacaggtttcagacaaaagggaagctcgcacctcggtatgtgggtcccttccgtatcatcgctcgacgtggagaagttgcttaccagctggagttgcccgcctccttgggcaacgtgcatgatgtgttccatgtgtcgcaactcaagaaatgtcttcgagtgccatccgagcaggccgactcagagcaaattgaagttcgcgaagacctgacgtatgtggagaagccagtgaaaatcctggacaccatggagcgcaggaccaggaaccgtgtaatccgtttttgcaaggtccagtggagcaaccacgccgaagaagaagctacttgggagcgcgaagacgagctgaaggcagcccatcccgatctcgttgaagtcgaagccgtcgattgggaaaacgagcaaggcaagacacatcatcttgatcatattgaatcccagacgagctgggacccagggtcgggttgccagttcggtctgaatcatcataggccttgggttaaggcagccgcccgggctgaggaagccgctaaggaggaggccgcccgggctcgccaggctgaggcaacagctgctgctggcgcgtcaactgggcccactccctcgggcaaccctcaggcgacagcctccggggaggcacgcgacgtggccgcgggcacatcgcctgggcccacctccccgggcgacgcccaggatcaaacgggtccgggggacatccctgagcccagcacgtcctccggggggccgagccgcatcgccttctctccaaggcggctcttctcctcatcttccgtcgccccgctgagcgccgagcccattctgcaggccttggccgccgcaaacaccgcggtgctggatgggtttagcgcccaagtggaggccctgcgcgcggaacgagcggagctcgaggccgcatgggcacgcgttgaggaggggcggcgctcggtggacgccatggtggaggtgggccgtaaggctcaccgccgccacatctcggagcttgaagcccgcaaggcggcgctggcggagatcgcccgagaggtggaggaggagcgagaggccgccctcatcgccaccaccgcgatgatcgaggcgcaagacaccctccgccttcagcacgcaagctgggaggcggagctgaagaaaaagctcgacgccgcccaaggggtccttgactccgccgctgcccgagagcggcgggtaacggagactgaagcggcgtctcggcggcgcgaggaggcccttgaggcccgtgccatggcgctggaagaacacgccggcgccgtggagaggggcttgacggaccgcgaggccgccgctgttctccgggaggcgacgctggcggcgcacgaggccgcctgcgccgaggaggagtgcgcgctccgcctccgcgaggacgcactcgctgagcgggagcgagctctcgaggaggctgaggccacgaccaaacggctggcggacagcctgtcccttcgcgaggcggcgcaggaggagcaggcgcgccgcaatcttgaatgcgtccgcgccgagagagccgcactggagcagcgggctgccgacctcgaggcgcgggaaaaagagctggacgcaagggcgcgcgtcggtggggcggctgcgggcgaaagcgacttagccgctcgcctcgcggctgccgaacacaccgtcgctgacatgcagcgcgcactagattcctccatcggggaggccgaggccctccgcttggcgggcgagatggggcccgacatgctttgggactcggtctcccgcatggatcgcgccggtcggcaagcgggcctctggaaaggccagacgaggatgcgccccgccaacctggaaggcctcgctccgcacctcaacaggatggcctgggtcctcgaacaactccccgaggagctcgagaagaccatcaagtcatcctcgagggacctcgcccggggggcggtcgaactcgtgctagcgagttaccaggcccgggaccccaacttctccccatggatggcgctggaggagttccctcccgggaccgaggacgatgcgcgcgcgcgcgtccgggatgccgccgaccacatcgtcaacggcttcgagggctcggcccctcggctcgcgttcgcccccagctccgacgaggagggcgatgccagcggtgaggacgacggtggcgacgaggccggcgacccgggcgcgtcagaatga

SEQ ID NO: 14088 - DNA, 433 bp, Oryza sativa
  Clone ID: TFbOSC101199j.C1.o15.np
gatagtttctttcttgtccgacaaggacttgtatcaacccatgtgtataaatatgtacacccagggtctatgtaatttatcaatctctcgatcaatgtaactattctcggcgcatcgccaccctctttcctgagatttttactttatcaaccggcggaatttggcacctgacgctgggctgcatcggctttcgatctctggcgaaggggtaagtcctacgttccgccggccctggtgaatttatcggctacgttggtgttattcaaggctgcatcgattcgatctcttggatcgctctggtttggttgatatatttgcctacctaatatttcaattctatctctagttgcattgtgtttagagacgcatcgatcggctggtatcggcatcggctattatcagttatcggctggaactactccatcggcttatc

SEQ ID NO: 14089 - DNA, 5334 bp, Oryza sativa
  Clone ID: TFbOSC101199j.C1.o8.fg
atggatgaagtcgggggtcgatggacattctccagggcaaatgaaggctacacgagctgcggcccgatggccggcagcgttacccgtcgtggtttggacatgaccggcttcgtcttggagctgcgaggcatgtgcgtggtcttggaatatccacatggagtggattaccaggccaggccgctcccggagcaggagggtgaggatgcagagcctcacgctggttgggaggtcactgcagtgatcctctccggctctcccgagcggacttcgctggcagtcacagcgggtggggactccttccccgccgcttgccagaacgccgctctcctcgccatcggcacccttcaccagcgctacccggacgagttgcagcactcgtcctaccgctaccaccctcgtcgcggaggagcccgcgacttcgccaccttccgagacgccagctcggaggatgacgctaccgtcgtgcatctggcacgcatggtggaggcgtacgacgcggctcgtatcgacttccaccagatggtgcgtcgtggcatggtggagaacaacatgaagatcctggagctgcgtcaggagaatctgcagctcaagaaggacctcgacgcgttggaggcgcagctgcaccagctcaagatcgcccagggagagatcagccgtcccaagcgtcgccgcgtctgccgcagccagaagatcaccgcccgcaagagcacctccaggcccgagcttgttcgtcagtccctggcgtggacctgcttcgtcgagacccctcgtgccgagcctgcgcccgtggttccccaggagggggaagcctccggcgttggtagctcggagggtgcgctgttgctcaccttccgtcctggcccgtcgcagcggagaaatgttaacaccggtgaaggcaaccaacccgagggcagcaaccccaacccccaaggcaatccacctccaccaccaccaccagacaccaacgccattctcacccagatcctcgcccaacaagccaacatgatgaatgctttcctccaccacctccaaaacccgccacaacagaatgctccaccaccacctccccaacactccaaactcgccgagttcctccgcatccgcccacctaccttctctagctccaacaaccccgtggatgcgttggattggttgcatgccgtggggaagaagctagacacggtgcagtgcagtgatgaagagaaagtcatcttcgccgcccaccagctgcaggggcccgcatctatctggtgggaccacttccaggctacgcagccagcgggacaaccgatcacttgggctcgcttcacctccgctttccggagaacccattatttgcacgagttcaacaatctggcccggtacgctccggaggatgtgcgggaagatgaggagaagcaagagaagttcttggcaggaatggaccctgagctgtccgttcgtctagtctctggggactatcctgacttccaacgactggtggacaagagcatccgcttggaagccaagcacaaggagctggaatcgcacaagcgccgcttggcgaatttccgcaatcaacagggtgctaaccagagggttcgctacaccaatccctacccagggggatcctcctcgcagcagcagcagcagcagcagcaacctcgctccgcgcctcgacctcaattcgtggtgcgcgtcccacagccgcagcagcagcagaatcagcaagggactcgtgcaccccgtcctcctacgccagccgtgcagcccgttcaaggccgcagggacgctcaaggtcagcagcgtctgtgcttcaactgtttcgagcccgggcactttgcggataaatgcccgaagccaaggcgtcagcaaggccaagcgcctccccgctccaacaacggcgggaaggatgtcattcgaggtcgtgtgaatcacgtgacggccgaggacgtgctgacaactccagacgtcatcgttggtacgttcctcgtccaatccatccctgctactattttgttcgactctggagcttcccactcgttcatatctgtgccattcgtggggagaaatcagttgggggtagaaaggcttagaaaccctctgctcatcaccacccctggcggggttatgacagcaaagtattatagccctgccgttcctatagaaatccaggggattccttttccctcggatctgattctgctagacacaaagaacttggatgtgatccttgggatgaattggttggctcaattccaaggagtagtggactgcgcgagacgcactgttactctgtaccgaggaccagaacaaccggttgttttctttgcacccccaacctctgtcagaagttcagaactgcatcagatagaactgtcagaaatccccatagtcagagagttcggagacgtgtttccggaagaactacctggtatgccgcccaagcgagagattgagttccggatagatcttgctccaggaaccactcctctgtacaagcgaccctaccgtatggcagcaaatgaactggccgaagtaaagaaacagttggaagagttgaaagaaaaggggtacatacgtccgagtacttccccatggggtgctcctgtgatttttgtggagaagaaagacaagacgaaaaggatgtgcgtcgactacagagctctcaatgaagtcaccatcaaaaacaagtaccctcttccccggatcgatgatctgttcgatcagcttaaaggtgccaccgtattctccaagattgatctccgttccggatatcaccaattacgtattcgtgaagaagatattccgaagaccgcattcactacgcgatatggactgtatgaattcacggtgatgtcgttcggcttaaccaatgctcctgccttcttcatgaacttgatgaacaaagtgttcatggaatacttggataaattcgttgtggttttcatcgatgacattctgatatactcacaatcagaggaagaccatcagcaccatctccgtctggtgttgggaaagttgcgggaacatcaattgtatgccaagcttagcaagtgtgagttctggttgtccgaagtcaaattcttggggcacgtgatatctgctaaaggagttgctgtggaccccgaaacagtgaccgccgtcaccgattggaagcaacccaagacagtcactcagattcgcagtttcttaggtttggcaggatactatcggagattcatcgagaacttctccaaaatcgctcgacccatgacacagttgttgaagaaagaagaaaagtttgtgtggagcccgcaatgcgagaaggcgttccaaactctcaaagaaaagctggtttcctcgccagtgttaatcttgccggatactcgcaaggatttcatggtgtactgtgatgcttcgcgccaaggattggggtgcgtgctcatgcaggacggtcatgtggtagcctatgcttcacgtcagctacgacctcatgagggcaactaccctacgcatgacttggaattagccgcagtggttcatgctctaaaaatctggcggcactatctcattgggaaccgctgtgaaatatatactgatcataaaagtttgaaatacatcttcactcagtcagatctgaatcttcggcaaaggagatggttagaactcatcaaggactatgatgtgggaattcactatcaccctggtaaggccaacgtggttgccgacgctctaagtcgaaagagccattgcaacactcttaacgtccgtggcattccacccgaacttagtcaacagatggaagccctgaacctaagcatagttggtcgcggattcttggctgcgttagaagccaagcccaccttgctcgatcaaatccgcgaggctcagaagaatgatccggacatgcatggactcctcaagaatatgaaacagggtaaggccgctggtttcacagaggatgaacacggaaccttatggaacggaaagcgggtatgcgttccagatagcagagaacttaaacagctgatacttcaggaagctcacgaaagtccttactccattcacccgggcagtaccaagatgtacttagacttgaaggagaaatactggtgggtcagcatgaagcgggaaattgcagagtttgtggccctatgtgatgtgtgccagcgtgtcaaggcagaacaccaacgaccggccggacttctccaacctctccaagtgccggaatggaaatgggatgaaattgggatggatttcatcaccggcctcccaaaaacccaaggtggatatgactctatatgggtaatagtggatcgattaaccaaggtagctcgattcattcctgtgaagaccacctatggagggaacaaactagcggagctctacttcgctaggatcgtgagtctccatggcgttcccaagaaaatcgtatctgataggggaagccaattcacctctcacttttggaagaagctccaagaagagcttggtacccgactaaatttcagcaccgcgtatcacccgcagacagatggacagaccgagcgtctaaatcagatcttagaagatatgctccgcgcatgtgtcctagatttcgggaagacttgggataagagtctcccctatgccgagttctcctacaataacagctaccaagccagcatacaaatggcaccctatgaagcgttgtacgggcgcaaatgccggacaccgctattgtgggaccaagttggagaaagccaagtgttcgggactgatatcctgagagaagctgaagctaaagtcagaatcattcgggataatctaaaggtggcacagtctcggcagaaaagttatgcagataaccgtcgccgtgatctggaattcgcagtggatgattttgtgtaccttcgggtcacgccattgcgaggtgtgcacaggtttcagacaaaagggaagctcgcacctcggtatgtgggtcccttccgtatcatcgctcgacgtggagaagttgcttaccagctggagttgcccgcctccttgggcaacgtgcatgatgtgttccatgtgtcgcaactcaagaaatgtcttcgagtgccatccgagcaggccgactcagagcaaattgaagttcgcgaagacctgacgtatgtggagaagccagtgaaaatcctggacaccatggagcgcaggaccaggaaccgtgtaatccgtttttgcaaggtccagtggagcaaccacgccgaagaagaagctacttgggagcgcgaagacgagctgaaggcagcccatcccgatctcgttgaagtcgaagccgtcgattgggaaaacgagcaaggcaagacacatcatcttgatcatattgaatcccagtttataaaattatgttga

SEQ ID NO: 14090 - DNA, 285 bp, Oryza sativa
  Clone ID: TFbOSC101263j.C1.o2.np
gagagggaatcacggggagtgatttccccctctttattgcgcgcggggacggcgggatgcggcggaatccgcggcggcggcggcgctagggcacgggcgaggcggcgggcgcggcgcgaggtaggggatgacgggtgggccctacccgtcagcgagggtggcgggcgggcccgcccgtcagcggcacgcgcggggaggaggctgatgggccgcgggggagaggagagagagggagggagttgggccgagccggcccaagagaggaagggggggaaaaggactttt

SEQ ID NO: 14091 - DNA, 2427 bp, Oryza sativa
  Clone ID: TFbOSC101694j.C1.o1.fg
atggccggcagcgttacccgtcgtggtttgcacatgactggcttcgtcttggagctgcgaggcatgtgcgtggtcttggggtatccacatggagtggattaccaggccaggccgcttccggatcaggagggtgaggatgcagagcctcacgctggttgggaggtcactgcagtgatcctctccggctctcccgagcggacttcactggcagtcaccgcgggtggggattccttccccgccgcttgccagaacgccgctctcctcgccatcggcacccttcaccagcgctacccggacgagttgcagcactcgccctaccgctaccaccctcgtcgcggaggagcccgcgactacgccaccttccgggacgccagctcggaggatgacgctaccgtcgtgcatctggcacgcatggtggaggcgtacgacgcggctcgtatcgacttccatcagatggtgcgtcgtggcatggtggagaacaacatgaagatcctggagctgcgtcaggagaacctgcagctcaagaaggacctcgacgcgttggaggcgcagctgcatcagctcaagatcgcccagggagagatctgccgccccaagcgtcgccgcgtctgccgcagccagaagatcaccgcccgcaagagcacctccaggcctgagcttgtccgtcagtccctggcgtggacttgcttcgtcgagacccctcgtgccgagcctgcgcccgtggttccccaggagggggaagcctccggcgttggtagctcggagggtgcgctgttgctcaccttccgccctggcccgtcgcagcggagaaatgttaacaccggtgaaggcaaccaacccgaaggcagcaaccccaacccccaaggcaatccacctccaccaccaccaccagacaccaacgccattctcacccaaatcctcgcccagcaagccaacatgatgaatgctttcctccaccacctccaaaacccgccacaacagaatgctccaccaccacctccccaacactccaaactcgccgaattcctccgcatccgcccacccaccttctctagctccaacaatccagtagatgcgttggattggttgcatgccgtggggaagaagctggacactgtgcagtgcagtgatgaagagaaagtcatcttcgccgcccatcagctgcagggacccgcatctctatggtgggaccatttccaggccacgcagccagagggacagcctattacttgggcccgcttcaccgccgctttccggagaacccatgtgcccgctggagtcgtggctcttaagaaaagggaattccgagagttgaagcaaggcaaccgctccgtgatggagtatttgcatgagttcaacaatctagcccgttatgccccggaggatgtgcgggaagatgaggagaagcaagagaagttcttggcaggaatggaccctgagctgtccgttcgtctagtctctggggactatcctgattttcaacgactggtggacaagagcatccgcttggaagccaagcacaaggagctggaatcgcacaagcgccgcttggcgaatttccgcaatcagcagggtgctaaccagagggtccgctacaccaatccctacccagggggatcctcctcgcagcagcagcaacagcagcagaatcagcaagggactcgtgcgccacgtcctcctacgccaactgtgcagcccgttcaaggccgcagggacgcttcaggtccgcagcggctgtgcttcaactgcttcgagcccgggcactttgcggataaatgcccgaagccaaggcgtcagcaaggccaagcgcctccccgctccaacaacggtggcaaggacgtcattcggggtcgtgtgaatcacgtgacggccgaggacgtgctgacaactccagacgtcatcgttgctccgcccttccgtttccgccgctcaccgctcgctctcgccgtcggaatcgtgctcgcaccgtgctcctctctctccgccgtcgccgccgagctccgttccgtcgccgccgtgcttcggttagccgccgccgccgctccgctcttcctcccgactcggcgacacctccctcggcatcgccgcatcgccgtcgaccccgtccgcgcctccacttcgcccgccgaccgccggagcaccgtcgtcatcgtcttcccgaaccgcgccgccgccttcttccgcttcggccgccattctcgtcgtcgtcgttgtcccggggtgagccgaagaccgccgttcgccttccccctttcctcctctttctcgggtgccactccgccgcgccgttggtcgccggcggcgaccatcggggcgcgggtgcgcgccgttcccgtcggccgcgccggcgaggccgccctcgggcgcgccctcgcggctaccaagtgggcccggcagtcagccgcccgcgcccgcgggttcggctga

SEQ ID NO: 14092 - DNA, 564 bp, Oryza sativa
  Clone ID: TFbOSC101694j.C1.o2.gm
atgaatagagtgtccactagttggggttttgtttattctagggtgaacaagccgctcggtccacggtggaccgggcgcacgcggctggcggcggtcggcgccgtgggtcccgcgcgtcagccgaacccgcgggcgcgggcggctgactgccgggcccacttggtagccgcgagggcgcgcccgagggcggcctcgccggcgcggccgacgggaacggcgcgcacccgcgccccgatggtcgccgccggcgaccaacggcgcggcggagtggcacccgagaaagaggaggaaagggggaaggcgaacggcggtcttcggctcaccccgggacaacgacgacgacgagaatggcggccgaagcggaagaaggcggcggcgcggttcgggaagacgatgacgacgctcgtcttcgcgctcccaagtagcttcttcttcggcgtgattgctccactggaccttgcaaaaacggattacccggttcctggtcctgcgctccatggtgtccaggattttcactggcctctccacataggtcaaatcttcgcgaacttcaatttgctctga

SEQ ID NO: 14093 - DNA, 5596 bp, Oryza sativa
  Clone ID: TFbOSC101804j.C1.o1.np
atggatgaagtcgggggtcgatggacattctccagggcaaatgaaggctacacgagctgcggcccggtagtcgagatgtcaaatagcacagggttggtgccctgctgctaggggctcagttccgtctgcctgtcccgggggttccggccgtaggcgggattgggtcgatgtacacctctgatcagagtataatctattcgaatagccgcgccctcggttatgggcaagccgagcaatgtacccaaatggccggcagcgttacccgtcgtggtttggacatgactggcttcgtcttggagctgcggggcatgtgcgtggtcttggggtatccacatggagtggattaccaggccaggccgcttccggatcaggagggagacgatgcggagccccacgctggttgggaggtcactgcagtgatcctctctggctctcccgagcggacttcgctggcagtcaccgcgggtggagattccttccccgccgcttgccagaacgccgctctcctcgccatcggcactcttcaccagcgctacccggacgagttgcagcactcgccctaccgctaccaccctcgtcgcggaggagcccgcgactacgccaccttccgggatgctagctcggaggatgacgctaccatcgtgcatctggcacgcatggtggaggcatacgacgcggctcgtatcgacttccatcagatggtgcgtcgtggcatgatcgagaacaacatgaagatcctggagctgcgtcaggagaacctgcagctcaagaaggacctcgacgcggtggaggcgcagctgcatcagctcaagatcgcccagggagaggactgtcgccccaagcgtcgccgcgtctgccgcagccagaagatcaccgcccgcaagagcacttccaggcccgagcttgttcgtcagtccctggcgtggacttgcttcgtcgagacccctcgtgctgagcccgcgcccgtggttccccaggagggggaagcctccggcgttggtagcacggaggatgcgctgttgctcaccttccgtcctggcccgtcgcagcagtagacgagcagttagtaggcttgcgcatggtgacgaccaggagaaatgctgttaccggtgaaggcaatcaacccgaaggcagcaaccacaaccaccaaggcaatccacctccacctcctcctccgcctccaccaccaccaccagacaccaacgccattctcacccagatcctcgcccagcaggccaacatgatgaccgctttcctccaccacctccaaaatccgccacaacacaatgctccaccaccacccccacaacactctaagctcgccgagttcctccgcatccgcccacccaccttctctagctccaacaatcccgtggatgcgttggattggttgcatgccgtggggaagaagctggacactgtgcagtgcagtgatgaagagaaagtcatcttcgccgcccaccagctgcaggggcccgcatctctatggtgggaccatttccaggctacgcagccggagggacaaccgattacttgggctcgcttcaccgccgctttccggagaacccatgtgcccgccggagtcgtggctcttaagaaaagggagttccgagagttgaagcaaggcaaccgctccgtgatggagtatctgcatgagttcaacaatctggcccggtacgctccggaggatgtgcgggaagatgaggagaagcaagagaagttcctggcaggaatggaccctgagctgtccgtccgtctagtttccggggactatccggatttccaacgtctggtggacaagagcatccgcttggaagccaagcacaaggaactggagtcgcacaagcgccgcttggcgaatttccgcaatcaacagggtgctaaccagagggtccgctacaccaatccctatccaaggggatcctcctcacagcagcaacaacagcagcagcaacctcgttccgcaccccgacctcaattcgtggtgcgcgtcccacagccgcagcagcagcagaatcaacaagggactcgtgcgccccgtcctcctacgccagctgtgcagcccgttcaaggccgtagggacgcttcaggtccgcagcgtctgtgcttcaactgcttcgagcccgggcactttgcggataaatgcccgaagccaaggcgtcagcaaggccaagcgcctccccgctccaacaacggtggaaaggatgtcattcggggtcgtgtgaatcacgtgacggccgaggacgtgctgacaactccagacgtcatcgttggtacgttcctcgttcattccatccctgctaccattttgttcgactctggagcttcccactcgtttatatctgtgccattcgtggggagaaatcagttgggggtagaaaggcttaggaaccctctgctcatcaccacccctggaggggttatgacagcaaagtattatagccctgccgtccctatagaaattcaggggattccttttccctcggatctgattcttctagacacccagaacttggatgtgatccttggaatgaattggttggctcaattccaaggagtagtggattgcgcgagacgcactgtcactctgtaccgagggccggaacaaccggttgtttcctttgcatccccaacctctgtcagaagttcagaactgcatcagataggactgtcagaaatccccatagtcaaagaattcggagacgtgtttccggaagaactacctggtatgccgcccaagcgagagattgagttccggatagatcttgctccaggaaccactcctctgcacaagcgaccctaccgtatggcagcaaatgaactggccgaagtaaagaaacagttggaagggttgaaagaaaaagggtatatacgtccgagtacttccccatggggtgctcccgtgatttttgtggagaagaaagacaagacgaagaggatgtgcgttgactacagagctctcaatgaagtcaccatcaagaacaagtaccctcttccccggatcgatgatctgttcgatcagcttaaaggtgccactgtattctccaagatcgatcttcgttccggatatcaccaattacgtattcgtgaagaagatattccgaagaccgcattcaccacgcgatacgggctgtacgaattcacggtgatgtcgttcggtctaaccaatgcacctgccttcttcatgaacttaatgaacaaagtgttcatggaatacttggacaagtttgttgtggctttcatcgatgacattctgatatactcacaatcagaggaagaccatcagcaccatctccgtctggtgttgggaaagttgcgggaacatcaattgtatgccaagcttagcaagtgtgagttctggatgtccgaagtcaaattcttggggcacgtgatatctgccaaaggagtcgctgtggatcccgaaacagtgaccgccgtcaccgattggaagcaacccaagacagtcactcaaattcgcagtttcttaggtttggcaggatactaccggaggttcatcgagaacttctccaaaatcgctcaacccatgacacagttgttgaagaaagaagagaaatttttgtggagcccgcaatgcgagaaggcgtttcaaactctcaaggaaaagctggtttcctcgccagtgttaatcttgccagatactcgcaaggatttcatggtgtactgtgatgcttcgcgccaaggattggggtgcgtgctcatgcaggatggtcatgtggtagcctatgcctcacgtcagctacgacctcatgaaggcaactaccctacccatgatttggagttagcagcggtggttcatgctctaaaaatctggcggcactatctcattggtaatcgctgtgaaatatatactgatcataagagtttgaaatacatcttcacccagtcagatctgaaccttcggcaaaggagatggttagaactcatcaaggattatgatgtgggaattcactatcatcctggtaaggccaacgtggttgccgacgctctaagtcgaaaaagccattgcaacactctcaacgtccgtggcattccacccgaacttaatcaacagatggaagccctgaacctaagcatagttggtcgtggattcttagctgcgttggaagccaagcccaccttgcttgatcaaatccgcgaggctcagaagaatgatccggacatgcatggactcctcaagaatatgaaacagggtaaagccgctggtttcacagaggatgaacacggaaccctatggaacggaaagcgggtatgcgttcccgataacagagaacttaaacagctgatacttcaggaagctcacgaaagtccttattcaatccaccctggcagtacgaagatgtacttagacttgaaggagaaatactggtgggttagcatgaagcgggaaattgcagagttcgtggctctttgtgatgtgtgccagcgtgtcaaggcagaacaccaacgaccggctggacttctccaacctctccaagtaccagaatggaaatgggatgaaattgggatggatttcatcaccggccttccaaaaacccaaggtggatatgattctatatgggtagtcgtggatcgattaaccaaggtggcccgatttattcctgtgaagaccacctatggagggaacaaactagcggagctctacttcgccaggatcgtgagtctccatggcattcccaagaaaatcgtatctgataggggaagccaattcacctctcacttttggaagaagctccaagaagagctgggtacccgattgaacttcagcaccgcataccacccgcagacagatggacagaccgagcgtctaaatcagatcctagaagatatgcttcgcgcatgtgtcctagatttcgggaagacctgggataagagtctcccctatgccgagttctcatacaacaacagctaccaagccagcatacaaatggcaccgtatgaagcattgtatgggcgcaagtgccggacaccactattgtgggaccaagttggagaaagccaagtgttcgggactgatatcctgagagaagctgaagctaaagtcagaaccattcgggataatctaaaggtggcccagtcccggcagaaaagttatgcagataaccgacgccgtgatctggaattcgcagtggatgactttgtgtaccttcgggtcacaccattgcaaggtgtacacaggtttcagacaaaagggaagctcgcacctcggtatgtgggtcctttccgtatcattgctcggcgtggagaagtcgcttaccagctggagctgcccgcctccttgggcaacgtgcatgatgtgttccatgtgttgcaactcaagaaatgtcttcgagtgccatccgagcaggccgactcagagcaaattgaagttcgcgaagacttgacttatgtggagaggccagtgaaaatcctgcacaccatggagcgcaggaccaggaaccgagtaatccgtttttgcaaggtccagtggagcaaccacgccgaagaagaagcaacatgggagcgtgaagacgagctgaaggcagcccatcccgatctcttcgccagttcctccgaatctcggggtcgagattccgtt

SEQ ID NO: 14094 - DNA, 4254 bp, Oryza sativa
  Clone ID: TFbOSC10946j.C1.o2.fg
atgacaggatgtattttagagtcgttttgggacgcgacaaagcacaaggaactggagtcgcacaagcgccgcttggcgaatttccgcaatcaacagggtgctaaccaaagggtccgctacaccaacccctatccagggggatcctcctcgcaacagcaacaacagcagcagcaacctcgctccgcgccgcgacctcaattcgtggtgcgcgtcccacagccgcagcagcagcagaatcagcaagggactcgtgcgccccgtcctcctacgccaaccgtgcagtctggtcaaggccgcagggacgctcaaggtcagcagcgtctgtgcttcaactgcttcgagcccgggcactttgcggataaatgcccgaagccaaggcgtcagcaaggccaagcgcctccccactccaacaacggtgggaaggatgtcattcggggtcgtgtgaatcacgtgacggccgaggacgtgctgacaactccagacgtcatcgttggtacgttcctcgttcattccatccctgctaccattttgttcgactctggagcttcccactggtttatatctgtgccattcgtggggagaaatcagttgggggtagaaaggcttaggaaccctctgctcatcaccacccctggaggggttatgacagcaaagtattatagccctgccgtccctatagaaattcaggggattccttttccctcggatctgattctgctagacaccaagaacttggatgtgatccttgggatgaattggttggctcaattccaaggagtagtggattgcgcgaggcgcactgtcactctgtaccgagggccggaacaaccggttgttttctttgcacccccaacctctgtcagtagttcagaactgcatcagataggactgtcagaaatccccatcgtcagggagttcggagatgtgtttccggaagaactacccggtatgccgcccaagcgagagattgagttccggatagatcttgctccaggaaccactcctctgcacaagcgaccctaccgtatggcagcaaatgaactggccgaagtaaagaaacagttggaagagttgaaagaaaaggggtatatacgtccgagtacttccccctggggtgctcctgtgatttttgtggagaagaaagacaagactaagaggatgtgcgttgactacagagctctcaatgaagtcaccatcaaaaacaagtaccctcttccccggatcgatgatctgttcgatcagcttaaaggtgccactgtattctccaagattgatcttcgttccggatatcaccaattacgtattcgtgaagaagatattccgaagaccgcattcaccacgcgatacgggctgtatgaattcacggtgatgtcattcggcctaaccaatgcacctgccttcttcatgaacttaatgaacaaagtgttcatggaatacttggataagtttgttgtggttttcattgatgacattctggtatactcacaatcagaggaagaccatcagcaccatctccgtctggtgttgggaaagctgcgggaacatcaattgtatgccaaacttagcaagtgtgagttctggctgtccgaagtcaaattcttaggacacgtgatatctgctaaaggagtttctgtggaccccgaaacagtgaccaccgtcaccgattggaagcaacccaagacagttactcaagtccgcagtttcttaggtttggcaggatactaccggagattcatcgagaacttctccaaaatcgctcgacccatgacacagttgttgaagaaagaagagaaatttgtgtggagcccgcaatgcgagaaggcgttccaaactctcaaggaaaagctggtttcctcgccggtgttaatcttgccggatactcgcaaggacttcctggtgtattgtgacgcttcgcgccaaggattggggtgcgtgctcatgcaggacggtcatgtggtagcctatgcctcacgtcagctgcgacctcatgaaggcaactaccctacacatgatttggagttagccgcggtggttcatgctctaaaaatctggcggcactatctcattgggaatcgctgtgaaatatataccgatcataagagtttgaaatacatcttcacccagtcggatctgaatcttcggcaaaggagatggttagaactcatcaaggactatgatgtgggaattcactatcatcctggtaaggccaacgtggttgccgacgctctaagtcgaaagggccattgcaacactcttaacgtccgtggcattccacccgaacttaatcaacagatggaagccctgaacctaagcatagttggtcgcggattcttggctgcgctagaagccaagcctaccttgctcgatcaaatccgcaaggctcagaagaatgatccggacatgcatggactcctcaagaatatgaaacagggtaaagccgctggtttcacagaggatgaacacggaaccctatggaacggaaagcgggtatgcgttccagataaccgagaactcaaacagctgatacttcaggaagctcacgagagcccttattccattcacccgggcagtacaaagatgtacttagacttgaaggagaaatactggtgggttagtatgaagcgggaaattgcagagttcgtggccctttgtgatgtgtgccagcgtgtcaaggcagagcaccaacgaccggccggacttctccaacctctccaagtaccagaatggaaatgggatgaaattgggatggatttcatcaccggacttccaaaaacccaaggtggatatgattctatatgggtagttgtggatcgattaaccaaggtagctcgatttattcctgtgaagaccacctatggagggaacaaactagccgagctctacttcgctaggatcgtgagtctccatggcgttcccaagaaaattgtatctgataggggaagccaattcacctctcatttttggaagaaactccaagaagagttgggaacccgattaaatttcagcaccgcgtatcacccgcagacagatggacagaccgagcatctaaatcagatcctagaagatatgctccgcgcatgtgtactagatttcgggaagacctgggataagagtctcccctatgccgaattctcctacaataacagttatcaagccagcatacaaatggcaccttatgaagcgttgtacgggcgcaaatgccggacaccgctcttgtgggaccaagttggagaaagccaagtgttcgggactgatatcctgagagaagctgaagctaaagtcagaatcattcgggataatctaaaggtggcacagtctcggcagaaaagttatgcagataaccgtcgccgtgacctggaattcgcagtgggtgattttgtataccttcgggtcacgccattgcgaggtgtgcacaggtttcagacaaaagggaagctcgcacctcgggttcacacacatatgccgcgctacaagcctgagtacttgtttggtgttgagggttttgtccaggagttgcgtacgatgtcctttgtcattggatttgggactgcccctttttatgcccagattcctcatgatcgtcatgaagagaagtgccgagtcaaagttactttgaacagcaatagtgaagaggtcccctcagtaatgttcgaagctggaggaagaaactacatccatgcatgtcaggaagtggcaaggatcgccataggagagctccgtgatcgctacagtgatcagttggccgacactgagtatcgctatcatcctcgtcaaccacagggaagtgaccgtggcagttaccttgagactgaaggaattgagaatgatgctaccacaaggcatttggttgagatgttgtgggctatggatgaaagtcgtgcggagactgtgttagcagctcaagatcgtgaagaccggaatcgtggtaagatttgcaagctcgaagacaaggtggatcgtttggagaaggaattagccgcattgaagggagaagctccgccgcagaaggccaggattcgtcttaccgcaaggaagagagctctatttgtccctcgctatcaattggcgccaaaggttcgtgtggtggagaaagaagttgccccagcagatcctccggtcattatcataagtagtgatgaagatgaagaatccaagcgcacccattccaagattgagtgggtagcaactcaagatgatgaagacgagccgaacgagccttcaatcgacctccgatgctcagaagaactagagtga

SEQ ID NO: 14095 - DNA, 1929 bp, Oryza sativa
  Clone ID: TFbOSC11167j.C1.o1.fg
atgtcatggcacagggccggtgtcctgctgctaggggctcagtcctgcctgcctgtcccgggggttccggccgtagggggattggtcaccgcgggtggcgattccttccccgccgcttgccagagcgccgctctcctcgccatcggcactctccaccagcgctacccggacgagttgcagcactcgccctaccgctaccaccctcgccgcggaggagcccgcgactacgccaccttccgggatgctagctcggaggatgacgctaccatcgtgcacctggcacacatggtggaggcgtacgacgcggctcgtatcgacttccatcagatggtgcgccgcgggatggtcgagaacaacatgaagatcctggagctgcgtcaggagaacctgcagctcaagaaggacctagacgcggtggaggcgcagctgcatcagctcaagatcgcccagggagagatctgccgccccaagcgccgccgcgtctgccgcagccagaagatcaccgcccgcaagagcacctccaggcccgagcttgttcgtcagtccctggcgtggacttgcttcgtcgagacccctcgtgccgagcccgcgcccgtggttccccaggagggggaagcctcctgcgttggtagcacggaggatgcgctgttgctcaccttccgccctggcccgtcgcagcggagaaatgctgctaccggtgatggcaaccaacccgaaggcagcaaccacaaccaccagggcaacccacctcaacctcctcctccacctccaccaccaccaccagacaccaacgccattctcacccaaatcctcgcccagcaagccaacatgatgactgctttcctccaccacctccaaaatccgccacaacttaatgccccactaccacctccccaacactctaaactcgccgagttcctccgcatccgtccacctaccttctctagctccaacaaccccgtggatgcgttggattggttgcatgccgtggggaaaaagttagacacggtgcagtgcagcgatgaggagaaagtcatcttcgccgcccaccaactgcaggggcccgcatctctatggtgggaccacttccaggctacgcagccagaggggcagcctattacttgggcccgcttcaccgccgctttccggagaacccatgtgcccgccggagtcgtggcccttaagaaaagggaattccgagagttgaagcaaggcaaccgctccgtgatggagtatttgcatgagttcaacaatctggccggttacgccccggaggatgtgcgggaagacgaggagaagcaagagaagttcctggtaggaatggacccagagctgtccgtccgtctagtctctggggactatccggattttcaacgactggtggacaagagcatccgcttggaagccaagcacaaggaactagagtcgcacaagcgccgcttggcgaatttccgcaatcaacagggtgctaaccaaagggtccgctacaccaatccctatccagggggatcctcctcgcagcagcagcagcagcagcagcctcgctccgcgcctcgacctcaattcgtggtgcgcgtcccacagccgcagcagcagcagggtcagcaggggactcgtgcgccccgtcctcctacgccaactgtgcagcctggtcaaggccacagggacgctcaaggtcagcagcgtctgtgcttcaactgcttcgagcccgggcactttgcggataaatgcccgaagccaaggcgtcagcaaggccaagcgcctccccgccccaacaacggtggtaaggacgtcattcggggtcgtgtgaatcacgtgacggccgaggacgtgctgacaactccagacgtcatcgttgggagttcggagacgtgtttccggaagaactacccggtatgccgcccaagcgagagattgagttccggatag

SEQ ID NO: 14096 - DNA, 538 bp, Oryza sativa
  Clone ID: TFbOSC11420j.C1.o1.fg
atggaccccgagctgtctgttcgtctagtctctggggactatccggattttcaacgactggtggacaagagcatccgcttggaggccaagcacaaggagctggaatcgcacaagcgccgcttggcgaacttccgcaatcagcagggtgctaaccagagggtccgctacaccaatccctatccagggggatcctcctcgcaacagcaacaacagcagcagcaacctcgcccagcgccccgacctcaattcgtggtgcgcgtcccacagccgcagcagcagaatcagcaagggactcgtgcatcccgtcctcctacgccagctgtgcagcccgttcaaggccgcagggacgcttcaggtccgcagcggctgtgcttcaactgcttcgagcccggacactttgcggataaatgcccaaagccaaggcgtcagcaaggccaagcgcctccccgctccaacaacggcgggaaggatgtcattcggggccgtgtgaatcatgtgacggccgaggacgtgctgacaactcccgacgtcaccgttg

SEQ ID NO: 14097 - DNA, 2151 bp, Oryza sativa
  Clone ID: TFbOSC11437j.C1.o2.fg
atgactggcttcgtcttggagctgcgaggcatgtgcgtggtcttggggtatccacatggagtggattaccaggccaggccgcttccggatcaggagggagacgacgcagagccccacgctgcgtgggaggtcacagcagtgatcctctccggctctcccgagcggacttcgctggcagtcaccgcgggcggagactccttccccgccgcttgccagaacgccgctctcctcgccatcggcacccttcaccagcgctacccggacgagttgcagcactcgccctaccgctaccaccctcgtcgcggaggagcccgcgaccacgccaccttccgagacgccagctcggaggatgacgctaccgtcgtgcatctggcacgcatggtggaggcgtacgacgcggctcgtatcgacttccaccagatggtgcgtcgtggcatggtggagaacaacctgaagatcctggagctgcgtcaggagaacctgcagctcaagaaggacctcgacgcgttggaggcgcagctgcaccagctcaagatcgcccagggagaggacagccgtcccaagcgtcgccgcgtctgccgcagccagaagatcaccgcccgcaagagcacctccaggcccgagcttgtccgtcagtccctggcgtggacttgcttcgtcgagacccctcgtgccgagcctgcgcccgtggttccccaggagggggaagcctccggcgttggtagctcggaggctccttctctgtttgctggttctgtgtggggttttcagatggtgacgaccaggagaaatgttaacaccggtgaaggcaaccaacccgagggcagcaaccccaacccccaaggcaacccacctccaccaccaccaccagacaccaacgccattctcacccaaatcctcgctcagcaagccaacatgatgactgctttcctccaccacctccaaaatccgccacaacagaatgctccaccaccccctccccaacactccaaactcgccgaattcctccgcatccgcccacccaccttctctagctccaacaatcccgtagatgcgttggattggttgcatgccgtggggaagaagctagacacggtgcagtgcagcgacgaagagaaagtcatcttcgccgcccaccagctgcaggggcccgcatctctatggtgggaccacttccaggctacgcagccagaggggcaaccgatcacttgggctcgcttcaccgccgctttccggagaacccatgtgcccgccggagtcgtggctctcaagaagagggaattccgggagttgaagcaaggcaaccgctccgtgatggagtatttgcatgagttcaacaatctagcccgttatgccccggaggatgtgcgggaagatgaggagaagcaggagaagttcttggcaggaatggaccccgagctgtccgttcgtctagtctctggagactacccggacttccaacgtctggtggacaagagcatccgcttggaagccaagcacaaggagctggaatcgcacaagcgccgcttggcgaacttccgcaatcagcagggtgctaaccagagggtccgctacaccaatccctacccagggggatcctcctcgcagcagcagcagcagcaacctcgctccgcgcctcgacctcaattcgtggtgcgcgtcccacagccgcagcagcagcagaatcaacaagggactcgtgcgccccgtcctcctacgccagctgtgcagcccgttcaaggccgcagggacgcttcaggtccgcagcgtctgtgtttcaactgcttcgagcccgggcactttgcggataaatgcccgaagccaaggcgtcagcaaggccaagcgcctccccgctccaacaacggtggcaaggacgtcatccgtggtcgtgtgaatcacgtgacggccgaggacgtgctgacaactcccgacgtcatcgttgagaagaaagacaagacgaagaggatgtgcgtcgactacagagctctcaatgaagtcaccatcaaaaacaacgtgtcaaggcagaacaccaacgaccggccggacttctccaacctcttcaagtaccagaatggaagtgggatgaaattgggatggatttcatcaccggacttccaaaaacccaaggcggatatgattctatatgggtaa

SEQ ID NO: 14098 - DNA, 995 bp, Oryza sativa
  Clone ID: TFbOSC11437j.C1.o2.np
tcagccgagggagcgggcgcgcggaccgggtccacgggaagtggggcccacgcgtcagccccacggtccacggtggaccgggcgcacgcggctggcggcggtcggcgccgtgggtcccgcgcgtcagccgcacccgcgggcgcgggcggctgacggccgggtccacttggcagccgcgagggcgcgcccgagggcggcctcgccggcgcggccgacgggagcggcgcgcccgcgccccgatggtcaccgccggcgaccaccggcgcggcggagcggcgcccgagagagaggagggaagggggaaggcgaacggcggtcctcggctcaccccgggacaacgacgacgacgagaacggcggccggagtggaggaaagcggcggcgtggctcgggatgacgatgacgacggtgctccggcggtcggcgggcgaagcggagcggcggacggggtcggcaaccactcggcgaagcggatggaggtgtcgccgagtaaggaggaagaccggagcggcggcggcggcggaacggagctcggcagcgacggcggagagagaggagcacggcgcgagcacgatgccgacggcgagagcgagcggcgagcggcggaaacggaagagcggagctcggggagcaattatatagcaccgagagggggagaacgcggccggagaggaaggaaacgggcgcggggatctcgggctccatagatgtcgccggcgaggattacgggatgaatccggacggatccgagggagagagagaggggaaatcgggggaaacgggagaggggatcgcggggggcacgggcgcggcggaggacgcggcgggaggaaggcgatgacaggtgggtcccacccgtcagcgagagcggcgggcgggcccgcctgtcagcggcgcgcgcgcgcggggaggccgatgggccgcgggggaagagagagagagagggagggactgggccgagccggcccaagaaggaagggggggggggaaagagga

SEQ ID NO: 14099 - DNA, 1033 bp, Oryza sativa
  Clone ID: TFbOSC11441j.C1.o1.fg
atgatgaatgctttcctccaccacctccaaaatccgccacaacagaatgctccaccaccacctccccaacactccaaactcgccgaattcctccgcatccgtccacctaccttctctagctccaacaaccccgtggatgcgttggattggttgcatgccgtggggaagaagttagacacggtgcagtgcagtgatgaggagaaagtcatcttcgccgcccaccagctgcaggggcccgcatctctatggtgggaccatttccaggccacgcagccagaagggcaacctattacttggactcgcttcaccgccgctttccggaaaacccatgtgcccgccggagtcgtggctcttaagaaaagggaatttcgggagttgaagcaaggcaaccgctccgtgatggagtacttgcatgagttcaacaacctggcccgttacgctccggaggatgtgcgggaggatgaggagaagcaagagaagttcttggcaggaatggaccccgagctgtctgttcgtctagtctctggagactacccggacttccaacgtctggtggacaagagcatccgcttggaagccaagcacaaggagctggaatcgcacaagcgccgcttggcgaatttccgcaatcaacagggtgctaaccagagggtccgctacaccaatccctatccagggggatcctcctcgcagcagcagcaacagcagcagcaacctcgcccagcgccccgacctcaatttgtggtgcgcgtcccacagccgcagcagcagcagaatcaacaagggactcgtgcaccccgtcctcctacgccagctgtgcagcccgttcaaggccgcagggacgctcaaggtcagcagcgtctgtgcttcaactgcttcgagcccgggcactttgcggataaatgcccaaagccaaggcgtcagcaaggccaagcgcctccccgctccaacaacggtggcaaggacgtcatccgtggtcgtgtgaatcacgtgacggccgaggacgtgctgacaactcccgacgtcatcgttg

SEQ ID NO: 14100 - DNA, 4199 bp, Oryza sativa
  Clone ID: TFbOSC11805j.C1.o2.np
ctgcttcatttatcgtcaaaatctaacctttaaaatgttgcttttctcttttgtttttgtttgtagatggccggcagcatcaaccgtcgtggtctggacctgactgcggggcatgtgcgttgtcttggggtatccgcatggagtggactaccagggcaagcaactcccggagcaagagggtgacgatgcagagccccacgctgcttgggaggtcactgtagtgatcctcactggctcacccgagaggacctcgttggcagtcaccgcgggtggagattctttctccgccgcttgccagaacgccgcacccctcgccatcggcactcttcaccagcgctacccggacgagttgcagcactcgccctaccgctaccaccctcgtcgcggaggagcccacgactacgccaccttcagggatgctagctcggaggatgacgctaccatcatgcacctggcgcgcatggtggacacgtatgacgcggcccgtatcgacttccaccagatggtgcgccgcgggttggtcgagaacaacatgaagatcctggagctgcgtcaggagaatctgcagctgaagaaggacctagacgtagtggaggcgcagctgtgtcagctcaagatcgcccagggagaggtctgtcgccccaagcgccgccgcgtctaccgcagcctgaagatcaccgcccgcaagagtacctccaggcctgagcttgttcgtcagtccttggcatggacctgttttgtcgagacccctcgtgccgagcccgcgcccgtggttcctcaggaggagggagcctctggcgttggcagcatggaggatgcgctactgctcaccttccgccctggcccgtcgcagaatctgttctctctcttggctggttctgtatgggatatttcagatggtgacaaccaggagaagtgctgctaccggtgatgacaaccaacccgaaggtagcaaccccaacatccaaggcagcccacctccacctcctcccccacctccaccaccaccaccagacaccaactccatcctcacccaaatcctcgcccagcaggccaacatgatggctgctttcctccatcacatccaaaatccgccacagcataatgctccacctccaccaccacccccacaacactctaaactcgccgagttcctccgcatctgtccgcctaccttctctagttccaataaccccgttgatgcgttggattggttgcatgccgtggggaaaaagttggataccgtgcagtgcaatgatgaggagaaagtcatctttgccgctcaccaactgcagggcccgcatctctagggtggaccacttccaggctacgcagccagaaggacagcctattacttgggcccgcttcaccgcggctttccggaggacccatgtgcccgccggagtcatggcccttaagaaaagggaattccgagagttgaagcaaggcaaccgctctgtgatggagtatttgcatgagtttaacaacctggcccggtacgccccagaggatgttcgtgaagatgaggagaagcaagagaagttcttggcaggaatggaccctgacctgtccgtgcgtctggactccggggactatccggatttccaacatctggtggacaagagcatctgcttggaagccaagcacaaggaactggagtcgcacaagcatcgcttggcgaatttccacaatcaacaggttgctaaccaaagggtccgctacaccaatccctatccagggggatcctcctcgcagcagcagcagcagcagcacccacgctccgcgccccgacctcaattcgtggtgcgcgtcccacagccgcagcaacagcagagtcagcaagggacccatgcgccccgtcctcctgcgcccgttgtgcagcctggtcaaggccgcagagacattcaaggtcagcagcgtctgtgcttcaactgcttcgagcccgggcactttgcggataaatgcccaaagccgaggcgctcgtaaggccaagcgcctccccgccccaacaacggtggtaaggatgtcattcgggatcgtgtgaaccacgtgactgccgaggatgtgctgacaactccagacgtcattgttggtacgttcctcattcattccatccctgctaccattttgttcgactctggagcttcccactcgtttatgtctgtgccattcgtggggagaaatcagttgggggtagaaaggcttaggaaccctctgctcatcaccacccctagaggggttatgacagcaaagtattatagccctaccattcctatagaaatccagggaattccttttccctcggatttgattcttctagacaccaagaatttggatgtgatcattgggatgaattggttggctcaattccaaggagtagtggattgcgcaagacgcactgtcactctgtaccgagggccagatcaactggttgttttctttgcacccccaacctctgtcggcagttcagaacttcatcagataggactgtcagaaatccccatcgtcagtgagttcggagatgtgtttccggaagaactacccggtatgccgcccaagcgagagattgaattctggatagatcttgctccaggaaccactcctctgtacaagcgacccaaccgtatggcagcaaatgaactggccgaagtcaagaaacagttggaagagttgaaagaaaaggggtacatacgaccgagcacttccccctagggtgctcccgtgatttttgtggaaaagaaggacaagacaaagaggatgtgtgttgactacagagctcttaatgaagttactatcaaaaacaagtaccctcttccccagatcgatgatctgttcgatcagcttaaaggtgccactgtgttttctaaaatcgatcttcgttccagatatcaccaattgtgtattcgtgaagaagatatcccgaagaccgcattcaccacgcgatatgggctgtatgaattcacggtgatgtcgttcggtctgactaatgctcctgccttcttcatgaacttaatgaacaaagtgttcatggaatacttggataagtttgttgtggtcttcatcgacgacatcctggtatactcacaatcagaggaagaccatcaacagcatctccgtctggtgttgggaaagttgcgggaacatcaattgtatgccaagcttagcaagtgtgagttctggttgtccgaagtcaaattcttagggcacgtgatatctgctaaaggagttgctatggaccccgaaacagtgaccgccgtcactgatgggaagcaacccaagacagttactcaggttcgcagctttttgggtttggcaggatactaccggaggttcatcgagaacttctccaaaatcgctcgacccatgacacagttgttgaagaaagaagaaaaatttgtgtggagcccgcaatgcgagaaggcgttccaaactctcaaggaaaagctggtttcctcgccagttttaatcttaccggatactcgcaaggacttcatggtgtactgtgacgcttcgcgccaaggattggggtgcgtgctcatgcaggaaggtcatgtggtagcctatgcctcacgccagctacggcctcatgaaggcaactaccctacccatgatttggagttagccgctgtggttcatgctctaaagatctggcggcactatctcattgggaatcgctatgaaatatatactgatcataagagtttgaaatacatcttcacccagtcggatctgaatcttcggcagagaagatggttagagctcatcaaggattatgatgtgggaatccactatcaccctggtaaggccaacgtggtcgcagacgcgctgagtcgaaaaagccgttgcaacactcttggcgtccgtggcattccaccggaacttcatcaacagatggaagccctgaacctaagcatagttggtcatggattcttggctacgctggaagccaagcctaccttgctcgatcaaatccgcgaggttcagaagaatgatccagatatgcatgggatcctcaagaatatgaaacaaggtaaagccgctggtttcacagaagatgaacatggaaccctatggaacggaaatcgtgtatgcgttccggacgacaaggaacttaaacagctgatacttcaggaagctcacgaaagtccttattccatccaccctggcagtttccatcccctccggccgctctctccccc

SEQ ID NO: 14101 - DNA, 4792 bp, Oryza sativa
  Clone ID: TFbOSC12550j.C1.o1.np
atggcggccggatcttccgcggccgattccccctcatccggccgctctctccccctcccaacactatttaaacgttccccgtgcctccctcctccgtttccgccactcgccgctctttctccccgtcggaatcgagctcgcgccgtcgccctctttctccgccgtcgccgccgagctccggttcgccgccgccgtcgccccggacctcctcccgcttcggcatcgcctccttcggcttcgcccgccgatcaccggaacgccgccgtcctcgtcgacccgagccgcgccgccgccttcctccgctccggtcgccatttccgtcgtcgccgtcgacccggggtgagccgtggaccgccgtttcacttcccccttccctcccctctctcgggcgccgctccgccgcgctggtggtcgccgccggcgaccatcggggcgcgggcgcgtcgcctcccgtcggctgtgccggcgaggccgccttcgggcgcgccccgcggctgccatgtggggcccggccgtcagccgcccgcgccctcgtgtgcggctgacgcgtgggacccacggcgccggccggcgtaagccgcgtgcacccggtccatcgtggacccacctcggccatataaggaccggtcttcgggcctctgttgcaaagcactaccgtacttccacatgtctagtggggcaaatgaaggctacacgagctgtggcccggtagtcgagatgtcatggcacagggccggagtcctgctgctaggggctcagtcctacctgcctgtcccgggggttccggccgtaggtgggattgtgtcaatgtacacctctgatcagagtacaacctattcgaatagccgcgccctcggttatgggcaagccgagcaatgtacccaaaaggccggcagcgtcacccgtcgtggtttggacatgactggtttcgtcttggagctgcggggcatgtgcgtggtcctagggtatccacatggagtggactaccaggccaggccgcttccggagcaggagggtgatgacgcagagccccacgctggttgggaggttactgcagtgatcctctctggctctcccgagcggacttcgctggcagtcaccgcgggtggggattccttccccgccgcttgccagagcgccgctctcctcgccatcggcactcttcaccagcgctacccggacgagttgtacaattggcactaccgttaccacccttgctgtggatgagcccgctactactctcaccttccgggatgctagctcgaaggatgacgctaccatcatgcacctggcgcgcatggtggaggcgtacgacgcggctcgtatcgacttccatcagatggtgcgccgtgggatggtcgagaacaacatgaagatccaggagctgcgtcaggagaacctgcagctcaagaaggacctagacgcggtggaggcgcagctgcatcagctcaagatcgcccagggagaggtctgccgccccaagcgccgccgcgtctgccgcagccagaagatcaccgcccgcaagagcacctccaggcccgagcttgttcgtcagtccctggcgtggacttgcttcgtggagacccctcgtgccgagcctgcgcccgtggttccccaggagggggaagcctccggcgttggtagcacggaggatgcgctgttgctcaccttccatggtgacgaccaggagaaatgctgccaccagtgatggcaaccaacccgaaggcagcaaccacaacaaccatggcagcccacctccacctcctcctccgcctccaccaccaccaccaccaccagataccaacgccattctcacccaaatcctcgcccagcaggccaacatgatgactgctttcctccaccacctccaaaatccgccacaacataatgctccacccccacctccccaacactctaaactcgccgagttcctccgcatccgcccacctaccttctctagctccaacaaccccgtggatgcgttggattggttgcatgccgtggggaaaaagctagacactgtgcagtgcagcgatgaggagaaagtcatcttcgccgcccaccagctgcagggacccgcatctctatggtgggaccatttccaggctacgcagccagagggacagcctattacttgggctcgcttcaccgccgctttccggagaacccatgtgcccgccggagtcgtggcccttaagaaaagggaattccgagagttgaagcaaggcaaccgctccgtgatggagtatttgcatgagttcaacaacctggcccgttacgccccggaggatgtgcgggaagatgaggagaagcaagagaagttcttggcaggaatggaccctgagctgtccgtccgtctagtctccgtggactatccggatttccaatgtctggtggacaagagcatccgcttggaagccaagcacaaggaactggagtcgcacaagcgccgcttggcgaatttccgtaatcaacagggtgctaaccaaagggtccgctacaccaatccctatccagggggatcctcctcgcagcagcaacaacagcagcagcaacctcgctccgcgccccgccctcaattcatggtgcgcgtcccacagccgcagcaacagcagagtcagcaagggactcgtgcgccccgtcctcctacgccaactgtgcagcctggtcaaggccgcagggacgttcaaggtccgcagcgtctgtgcttcaactgcttcgagcccgggcactttgcggacaaatgcccaaaaccgcggcgtcagcaaggccaagtgcctccccgctccaacaacggtggtaaggatgtcattcggggtcgtgtgaaccacgtgacggccgaggacgtgctgacaactccagatgtcatcgttggtacgttcctcattcattccatccctgctaccattttgttcgactctggagcttcccactcgtttatatctgtgccattcgtgggaagaaatcagttgggggtagaaaggcttaggaaccctctgctcatcaccacccctggaggggttatgacagcaaagtattatagtcctgccgtccctatagaaattcaggggattccttttccctcggatttgattctgctagacaccaagaacttggatgtgatccttgggatgaattggttggctcaattccaaggagtagtggattgcgcgagacgcactgtcactctgtaccgaggtccggaacaaccggttgttttctttgcacccccaacctctgtcaggagttcagaactgcatcagataggactgtcagaaatccccatcgtcagggagttcggagatgtgtttccggaagaactacctggtatgccgcccaagcgagagattgagttccgaatagatcttgctccaggaaccattcctctgtacaagcgaccctaccgtatggcagcaaatgaactggccgaagttaagaaacagttggaagagttgacagaaaaggggtatatacgtccgagcacttccccctggggtgctcctgtgatttttgtggagaagaaagacaagacgaagaggatgtgcgttgactacagagctctcaatgaagtcaccatcaaaaacaagtaccctcttccccggatcgatgatctgttcgatcagcttaaaggtgccactgtattctctaagatcgatcttcgttccggatatcaccaattacgtattcgtgaagaagatattccgaagaccgcattcaccacgcgatacggactgtatgaattcacggtgatgtcattcggtttaaccaatgcacctgccttcttcatgaacttaatgaacaaagtgttcatggaatacttggataagtttgttgtggttttcattgatgacattctgatatactcacaatcggaggaagaccatcagcaccatctccgcctggtgttgggaaagttgcgggaacatcaattgtatgccaaacttagcaagtgtgagttctggttgtccgaagtcaaattcttagggcacgtgatatctgctaaaggtgttgctgtggaccccgaaacagtgaccgctgtcactgattggaagcaatccaaaacagtcactcaagttcgcagtttcttaggtttggcaggatactaccggaggttcatcgagaacttctccaaaatcgctcgacccatgacacagttgttgaagaaagaagagaaatttgtgtggagcccgcaatgcgagaaggcgttcaaaactctcaaagaaaagctggttgcctcgccagtgttaatcttgccggatactcgcaaggatttcatggtgtattgtgacgcttcgcgccaaggattggggtgcgtgctcatgcaggacggtcatgtggtggcctatgcctcacgccagctacggccccatgaaggcaactaccctacccatgacttggagttagccgcggtggttcatgctctaaaaatctggcggcactacctcattgggaatcgctgtgaaatatatactgatcataagagtttgaaatacatcttcactcagtcggacctgaatcttcggcagaggagatggttagaactcatcaaggattatgatgtgggaattcactatcatcctggtaaggccaacgtggtcgctgacgctctaagtcgaaagagccattgcaacactcttaacatctgtggcattccacccgaacttaatcaacagatggcagcccggaacctaagcatagttagtcgtggattcttggctgcgttggaagccaagcctaccttgctcgatcaaatccgcgaggctcagaagaatgatccggacatgcatggact

SEQ ID NO: 14102 - DNA, 5208 bp, Oryza sativa
  Clone ID: TFbOSC12557j.C1.o1.fg
atgactggcttcgtcttggagctgcgaggcatgtgcgtggtcttggggtatccacatggagtggattaccaggccaggccgctcccggagcaggagggtgaggatgcagagcctcacgctggttgggaggtcactgcagtgattctctccggctctcccgagcggacttcgctggcagtcaccgcgggtggggattccttccccgccgcttgccagaacgccgctctcctcgccatcggcacccttcaccagcgctacccggacgagttgcagcactcgccctaccgctaccacccccgtcgcggaggagccagcgaccacgccaccttccgagacgctagctcggaggatgacgctaccgtcgtgcatctggcacgcatggtggaggcgtacgacgcggctcgtatcgacttccaccagatggtgcgtcgtggcatggtggagaacaacatgaagatcctggagctgcgtcaggagaacctgcagctcaagaaggacctcgacgcgttggaggcgcagccgcaccagctcaaggtcgcccagggagagatcagccgtcccaagcgtcgccgcgtctgccgcagccagaagatcaccgcccgcaagagcacctccaggcccgagcttgtccgtcagtccctggcgtggacttgcttcgtcgagacccctcgtgccgagcctgcgcccgtggttccccaggagggggaagcctccggcgttggtagctcggagggtgcgctgttgctcaccttccgtcctggcccgtcgcagcggagaaatgttaacaccggtgaaggcaaccaacccgagggcagcaaccccaacccccaaggcaatccacctccaccaccaccaccagacaccaacgccattctcacccagatcctcgcccagcaagccaacatgatgaatgctttcctccaccacctccaaaatccaccacaacagaatgctccaccacctcctccccaacactccaaactcgccgaattcctccgcatccgcccacccaccttctctagctccaacaatcctgtagatgcgttggattggttgcatgccgtggggaagaagctagacacggtgcagtgcagcgacgaagagaaagtcatcttcgccgcccatcagctgcaaggacccgcatctctctggtgggaccatttccaggctgcgcagccagaagggcaaccgatcacttggactcgcttcaccgccgctttccggagaacccatgtgcccgctggagtcgtggctcttaagaaaaaggaattccgggagttgaagcaaggcaaccgctccgtgatggagtacttgcatgagttcaacaatctggcccgttacgcccctgaggatgtgcgggaagatgaggagaagcaagagaagttcctggcaggaatggaccccgagctgtccgttcgtctagtctctggggactacccggacttccaacgactggtggacaagagcatccgcttggaagccaagcacaaggagctggagtcgcacaagcgccgcttggcgaacatccgcaatcaacagggtgctaaccagagggtccgctacaccaatccctacccagggggatcctcctcgcagcagcagcagcagcagcagcagcaacctcgctccgcgcctcgacctcaattcgtggtgcgcgtcccacagcagcaaccgcagcagaatcagcaagggactcgtgcaccccgtcctcctacgccagctgggcagcccgttcaaggccgcagggacgcttcaggtccgcagcggctgtgcttcaactgcttcgagcccgggcactttgcggataaatgcccaaagccaaggcgtcagcaaggccaagcgcctccccgccccaacaacggtggcaaggatgtcatccgtggtcgcgtgaaccacgtgacggccgaggacgtgctgacaactccggacgtcatcgttggtacgttcctcgtccattccatccccgctacaattttgttcgactctggagcttcccactcgtttatatctgtgccattcgtggggaaaaatcagttgggggtagaaaggcttagaaaccctctgctcatcaccacccctggaggggttatgacagcaaagtattatagccccgccgttcctatagaaattcagggaattccttttccctcggatctgattctgttagacacaaagaacttggatgtgattcttgggatgaattggttggctcaattccaaggagtagtggattgcgcgagacgcactgtcactctgtaccgaggaccggaacagccggtctgtcagaaatccccatcgtcagagagttcggagatatttccggaagaactacctggtatgccgcctaagcgagagattgagttccggatagatcttgctccaggaaccactcctctgtacaagcgaccctaccgtatggcagcaaatgaactggccgaagtaaagaaacagttggaagagttgaaagaaaaggggtacatacgtccgagtacttccccatggggtgctcctgtgatttttgtggagaagaaagacaaaacgaagaggatgtgcgttgactacagagctctcaatgaagttaccatcaaaaacaagtaccctcttcctcgaatcgatgatctgttcgaccagcttaaaggtgccactgtattctccaagattgatcttcgttccggatatcaccaattacgtattcgtgaagaagatattccgaagaccgcattcaccacgcgatatgggctgtatgaattcacggtgatgtcgttcggtttgaccaatgctcctgccttcttcatgaacttgatgaacaaagtgttcatggaatacttggataagttcgttgtggttttcatcgacgacattctgatatactcacaaacagaagaagaccatcagcaccatctccgtctggtattgggaaagctgcgggaacatcaattgtatgccaagcttagcaagtgtgagttctggttgtccgaagtcaaattcttggggcacgtgatatctgctaaaggagttgctgtggatcccgaaacagtgaccgccgtcaccgaatggaagcaacccaagacagtcactcaaattcgcagtttcttgggtttggcaggatactaccggagattcatcgagaacttctccaagatcgctcgacccatgacacagttgttgaagaaagaagagaaatttgtgtggagcccgcagtgcgagaaggcgttccaaactctcaaggaaaagctggtttcctcgccagtgttaatcttgccggatactcgcaaggatttcatggtgtattgtgatgcttcgcgccaaggattggggtgcgtgctcatgcaggacggtcatgtggtagcctatgcctcacgtcagctacgtcctcatgaaggcaactaccctacgcatgacttggagctagcagcggtggttcatgctctaaaaatttggcggcactatctcattgggaaccgctgtgaaatatatactgaccataagagtttgaaatacatcttcacccagtcggatctgaatcttcggcaaaggagatggttagaactcatcaaggattatgatgtgggaatacactatcatcctggtaaggccaacgtggttgccgacgctctaagtcgaaagagccactgcaacactctcaacgtccgaggcattccacccgagcttaatcaacagatggaagccctgaacctaagcatagttggtcgcggattcttggctgcgttggaagccaagcctaccttgctcgatcaaatccgcgaggctcagaagaatgatccggacatgcatggactcctcaagaatatgaaacagggtaaagccgcaggtttcacagaggatgaacacggaactctatggaacggaaagcgggtgtgcgttcccgataacagagaacttaaacagctgatacttcaggaagctcacgaaagtccttattccattcacccgggcagtaccaagatgtacttagacttgaaggagaaatactggtgggtcagcatgaagcgggaaattgcagagtttgtggctctatgtgatgtgtgccagcgtgtcaaggcagaacaccaacgaccggccggacttctccaacctctccaagtgccggaatggaaatgggatgaaattgggatggatttcatcaccggacttccaaaaacccaaggaggatatgattccatatgggtagttgtggatcgattaaccaaggtagctcgattcattcctgtgaagaccacctatggagggaacaaactagcggagctctacttcgctaggatcgtgagtctccatggtattcccaagaaaatcgtatctgataggggaagccaattcacctctcacttttggaagaagctccaagaagagctgggtactcgattgaatttcagcaccgcgtatcacccgcagacagatggacagaccgagcgtctgaatcagattctagaagatatgctccgcgcatgtgtcctagatttcgggaagacttgggataagagtctcccctatgccgagttctcctacaataacagctatcaagccagcatacaaatggcaccctatgaagcgttgtacgggcgcaaatgccggacaccgctattgtgggaccaagtcggagaaagccaagtgttcgggactgatatcctgagagaagctgaagctaaagtcagaatcattcgggataatctaaaggtggcacaatctcggcagaaaagttatgcagataaccgtcgtcgtgacttggaattcgcagtggatgattttgtgtaccttcgggtcacgccattgcgaggcgtgcacaggtttcagacgaaagggaagctcgcacctcggtatgtgggtcccttccgtatcatcgctcgacgcggagaagttgcttaccagctggagttgcccgcctccttgggcaacgtgcatgatgtgttccatgtgtcgcaactcaagaaatgtctccgagtgccatccgagcaggccaactcagagcaaattgaagtccgcgaagacctgacctatgtggagaggccagtgaaaatcctggacaccatggagcgcaggaccaggaaccgagtaatccgtttttgcaaggtccagtggagcaaccacgccgaagaagaagctacttgggagcgcgaagacgagctgaaggcagcccatcctgatctcttcgccagttcttccgaatctcggggtcgagattccgtttaa

SEQ ID NO: 14103 - DNA, 2013 bp, Oryza sativa
  Clone ID: TFbOSC12919j.C1.o6.fg
atgactggcttcgtcttggagctgcgaggcatgtgcgtggtcttggggtatccacacggagtggattaccaggtcaggccgctcccggagcaggagggtgaggatgcagagcctcacgctgcttgggaggtcactgcagtgatcctctccggctctcccgagcggacttcgctgacagtcaccgcgggtggcgactccttccccgccgcttgccagaacgccgctctcctcgccatcggcactcttcaccagcgctacccggacgagttgcagcactcgccctaccgctaccaccctcgtcgcggaggagcccgcgactacgccaccttccgagacgccagctcggaggatgacgctaccgtcgtgcatctggcacgcatggtggaggcgtacgacgcggctcgtatcgacttccatcagatggtgcgccgtggcatggtcgagaacaacatgaagatcctggagctgcgtcaagagaatctgcagctcaagaaggacctcgacgcgttggaggcgcagctgcatcagctcaagatcgcccagggagagatcagccgccccaagcgtcgccgcgtctgccgcagccagaagatcaccgcccgcaagagcacctccaggcccgagcttgttcgtcagtccctggcgtggacttgcttcgtcgagaccccttgtgccgagcctgcgcccgtggttccccaggagggggaagcctccggcgttggtagctcggagggtgcgctgttgctcaccttccgtcctggcccgtcgcagcgctcttcttctctgtttgctggttccgtgtggggttttcagatggtgacgaccaggagaaatgttaacaccggtggaggcaaccaacccgaaggcagcaaccccaacccccaaggcaacccacctccaccaccaccaccagacaccaacgctattctcacccagatcctcgcccaacaagccaacatgatgaatgctttcctccaccacctccaaaattcaccacaacagaatgctccaccaccccctccccaacactccaaactcgccgaattcctccgcatccgcccacctaccttctccagctccaacaaccctgtggatgctttggattggttgcatgccgtggggaagaagctagacacggtgcagtgcagcgacgaagagaaagtcatcttcgccgcccatcagctgcagggacccgcatctctctggtgggaccatttccaggccacgcagccagaagggcaaccgattacttggactcgcttcaccgccgctttccggagaacccatgtgcccgctggagtcgtggctcttaagaagagggaatttcgggagttgaagcaaggcaatcgctccgtgatggagtatttgcatgagttcaacaatctagcccgttatgccccggaggatgtgcgggaagatgaggagaagcaagagaagttcttggcaggaatggaccctgagctgtccgttcgtctcgtctctggggactatcctgattttcaacgactggtggacaagagcatccgcttggaagccaagcacaaggagctggaatcgcacaagcgccgcttggcgaatttccgcaatcagcagggtgctaaccagagggtccgctacaccaatccctacccagggggatcctcctctcagcagcagcagcagcagcagcaacctcgctccgcgcctcgacctcaattcgtggtgcgcgtcccacagcagcaacagcagcagaatcagcaagggactcgtgcgccacgtcctcctacgccaactgtgcagcctgttcaaggtcgcagggacgcttcaggtccgcagcgtctgtgcttcaactgcttcgagcccgggcactttgcggataaatgcccaaagccaaggcgtcagcaaggccaagcgcctccccgctccaacaacggtggcaaggatgtcattcggggtcgtgtgaatcacgtgacggccgaggacgtgctgacaactccagacgtcatcgttgaagttcagaactgcatcagatag

SEQ ID NO: 14104 - DNA, 4218 bp, Oryza sativa
  Clone ID: TFbOSC13213j.C1.o4.gm
atggttatgccgctctctctgtttgctggttctgtgtggggttttcagatggtgacgaccaggagaaatgctgccaccagtgatggcaaccaacttgaaggcagcaaccacaacaaccatggcagcccacctccacctcctccaccgcctccaccaccaccaccagacaccaacgccattctcacccaaatcctcacccagcaggccaacatgatggctgctttcctccaccacatccaaaatccgccacaacataatgctccaccaccacccccacaacactctaaactcgccgagttcctacgcatccgtccacctaccttctctagctccaacaaccccgtggatgtgttggattggttgcatgccgtggggaaaaagctagacactgtgcagtgcagcgatgaggagaaagtcgtcttcgccgcccaccaactgcagggacccgcatctctatggtgggatcatttccaggctacgcagccagaggggcagcctattacttgggcccgcttcaccgccgccttccggaggacccatgtgcccgccggagtcatggcccttaagaaaagggagttccgagagttgaagcaaggcaaccgctccgtgatggagtatttgcatgagtttaacaacttggcccggtacgccccggaggatgtgcgggaagatgaggagaagcaagagaagttcttggcaggaatggacccggagctgtctgtccgtctagtctccggtgactatccggatttccaacgtctggtggacaaaagcatccgcttggaagccaagcacaaggaactggagtcgcacaagcgtcgcttggcgaatttccgcaaccaacagggtgctaaccaaaggatccgctacaccaatccctatccagggggatcttcctcgcagcagcagcaacctcgctccgcgcctcgacctcaattcgtggtgcgcgtcccacagccgcagcaacagcagagccagcaagggacccatgcgccccgtcctcctacgccagccgcgcagtctggtcaaggccgcagggacgttcaaggtccgcagcgtctgtgcttcaactgcttcgagcccgggcactttgcggataaatgcccgaagtcgaggcgccagcaaggccaagcgcctccctgctccaacaacggtggtaaggatgtcattcggggtcgtgtgaaccacgtgacggccgaggacgtgctgacaactccagacgtcatcgttggtacgttcctcatccattccatccctgctaccattttgttcgactctggagcttcccactcgtttatatctgtgccattcgtggggagaaatcagttgggggtagaaaggcttaggaaccctctactcatcaccacccctggaggggttatgacagcaaagtattatagtcctgccgtccctatagaaattcaggggattccttttccctcggatctgattcttctagacaccaagaacttggatgtgatccttgggatgaattggttggctcaattccaaggagtagtggattgtgcaagacgcactgtcactctgtaccgagggccggaacaaccggttgttttctttgcacctccaacctctgtcagtagttcagaacttcatcagataggactgtcagaaatccccattgtcagagagttcggagacgtgtttccggaagaactacccggtatgccgcccaagcgagagattgagttccggatagatcttgctccaggaaccactcctctgtacaagcgaccctaccgtatggcagcaaatgaactggccgaagttaagaaacagttggaagagttgaaagaaaagggagctctcaatgaagtcaccatcaaaaacaagtaccctcttccccggatcgatgatctgttcgatcagcttaaaggtgccacggtattctccaagattgatcttcgttctggatatcaccagttgcgcatccgtgaagaagatattccgaagaccgcattcaccacgcgatacggactgtatgaattcacggtgatgtcgttcggtttaaccaatgctcctgccttcttcatgaacttaatgaacaaagtgttcatggaatacttggataagtttgttgtggttttcattgatgacattctggtatactcacaatcagaggaagaccatcagcaccatctccgtctggtgttgggaaagttgcggaaacatcaattgtatgccaaacttagcaagtatgagttctggttgtccgaagtcaaattcttagggcacgtgatatccgctaaaggagttgctgtggatcccgaaacagtgaccgccgtcaccgattggaagcaacccaagacagtcactcaaattcgcagtttcttaggtttggcaggatactaccggaggttcatcgagaacttctccaaaatcgctcgacccatgacacagttgttgaagaaagaggagaaatttgtgtggagtccgcaatgcgagaaggcgttcaaaactctcaaagaaaagctggtttcctcactagtgttaatcttgccggatactcgcaaggacttcatgaggagatggttagaactcatcaaggattatgatgtgggaattcactatcatcctggtaaggccaacgtggtcgccgatgctcaaagtcgaaaaagccattgcaacactcttaacgtccgtggcattccacccgaacttaatcaacagatggaagccctgaatctaagcatagtgggtcgcggattcttggctgcgttggaagccaagcccaccttgctcgatcaaatccgcgaggctcagaagaacgatccggacatgcatggactcctcaagaatatgaaacaaggtaaagccgctggtttcacagaggatgaacacggaaccctatggaacggaaatcggagttcgtggccctttgtgatgtgtgccagcgtgtcaaggcagagcaccaacgaccggccggacttctccaacctctccaagtaccagaatggaaatggaatgaaattgggatggatttcatcaccggacttccaaaaacccaaggtggatatgattctatatggcaccgcgtatcacccgcagacagatggacagaccgagcgtctaaatcagatcctagaagatatgcttcgcgcatgtgtcctagatttcgggaatacctgggataagagtctcccctatgccgagttctcctacaataacagctaccaagccagcatacaaatggcaccttatgaagcgttgtatgggcgcaaatgccggacaccgctattgtgggaccaagttggggaaagccaagtgttcgggaccgatatcctgagagaagctgaagctaaagtcagaaccattcgggataatctaaaggtggcccagtctcggcagaagagttatgcagacaaccgacgccgtgacctggaattcgcagtggatgactttgtgtatcttcgggtcacgcccttgcgaggtgtacacaggtttcagacaaaggggaagctcgcacctcggtttgtgggtcctttccgtatcattgctcggcgcggagaagtcgcttaccagttggagctgcccgcctccttgggcaacgtgcatgatgtgttccatgtgtcgcaactcaagaaatgtcttcgagtgccatccgagcaggccgactcagagcaaattgaagttcgcgaagacttgacctacgtggagaggccagtgaaaatcctggacaccatggagcgaaggaccaggaaccggtccgccgccgtcgtcgccccggaccttctcccgcttcggcgccgcctccttcggtttcgccgcaacctcgccgacctcgtccacccctccgtttcgctcgccgaccgccggaacgccgccgtccccgtctacccgagccgcgccgccgccttcctccgctccggtcgccgttcccgttgtcgccgtcgacccggggtgagctgtggaccgccgattcgtttcccccttcccttccctctctcgggcgccgctccgccgcgccggtggtcgccggcggcgaccatcgtggcgcgggtgcgccgcctcccgtcggctgtgccggcgtggccgccttcgggcgcgccccgcggctgccatgtggggcccggccgtcagccgcccgcgccctcggacgctgcagcttcggaagatccgctcttcgtgaaggttgaagcgacgtttgggaaagtgagcaaggcaagtcacatcatccttgaacatattgaatcctag

SEQ ID NO: 14105 - DNA, 1773 bp, Oryza sativa
  Clone ID: TFbOSC13237j.C1.o1.fg
atgtcatggcacagggccggtgtcctgctgctaggggctcagtcctgcctacctgtcccgggggttccggccatggccggcagcgtcagtcgtcgtggtctggacatgactggtttcgtcttggagctgcggggtatgtgcgttgtcctggggtatccgcatggactggactaccagggcaggccgcttccggagcaggagggtgacgatgcagagccccacgcttcttgggaggttactgcagtgatcctcactggctcacccgagcggacttcgttggcagtcaccgcgggtggagattctttctccgccgcttgccagagcgccgctctcctcgccatcggcactcttcaccagcgctacccggacgagctgcagcactcgccctaccgctaccaccctcgtcgcggaggagcccgcgactacgccaccttccgggatgctagctcggaggatgacgctaccatcatgcacctggcgcgcatggtggaggcgtacgacgcggctcgtatcgacttccatcagatggtgcgccgtgggatggtcgagaacaacctgaagatcctagagctgcgtcaggagaatctgcagctgaagaaggacctagacgcagtggaggcacagctgcatcagctcaagatcgcccagggagagatggtgacgaccaggagaaatgctgccaccagtgatggcaaccaacttgaaggcagcaaccacaacaaccatggcagcccacctccacctcctccaccgcctccaccaccaccaccagacaccaacgccattctcacccaaatcctcacccagcaggccaacatgatggctgctttcctccaccacatccaaaatccgccacaacataatgctccaccaccacccccacaacactctaaactcgccgagttcctacgcatccgtccacctaccttctctagctccaacaaccccgtggatgtgttggattggttgcatgccgtggggaaaaagctagacactgtgcagtgcagcgatgaggagaaagtcgtcttcgccgcccaccaactgcagggacccgcatctctatggtgggatcatttccaggctacgcagccagaggggcagcctattacttgggcccgcttcaccgccgccttccggaggacccatgtgcccgccggagtcatggcccttaagaaaagggagttccgagagttgaagcaaggcaaccgctccgtgatggagtatttgcatgagtttaacaacttggcccggtacgccccggaggatgtgcgggaagatgaggagaagcaagagaagttcttggcaggaatggacccggagctgtctgtccgtctagtctccggtgactatccggatttccaacgtctggtggacaaaagcatccgcttggaagccaagcacaaggaactggagtcgcacaagcgtcgcttggcgaatttccgcaaccaacagggtgctaaccaaaggatccgctacaccaatccctatccagggggatcttcctcgcagcagcagcaacctcgctccgcgcctcgacctcaattcgtggtgcgcgtcccacagccgcagcaacagcagagccagcaagggacccatgcgccccgtcctcctacgccagccgcgcagtctggtcaaggccgcagggacgttcaaggtccgcagcgtctgtgcttcaactgcttcgagcccgggcactttgcggataaatgcccgaagtcgaggcgccagcaaggccaagcgcctccagacgtcatcgttgttgcgcatccgtga

SEQ ID NO: 14106 - DNA, 1570 bp, Oryza sativa
  Clone ID: TFbOSC13264j.C1.o2.gm
atggttacgccgatggtgacgaccaggagaaatgttaacaccggtgaaggcaaccaacccgagggcagcaaccccaacccccaaggcaacccacctccaccaccaccaccagacaccaacgccattctcacccaaatcctcgcccagcaagccaacatgatgaatgctttcctccaccacctccaaaatccgccacaacagaatgctccaccaccccctccccaacactccaaactcgccgaattcctccgcatccgcccacccaccttctctagctccaacaatcccgtagatgcgttggattggttgcatgccgtggggaaaaagctagacacggtgcagtgcagcgatgaggagaaagtcgtcttcgccgcccatcagctgcaggggcccgcatctctctggtgggaccacttccaggctacgcagccagaagggcaacctattacttggactcgcttcaccgccgctttccggaaaacccatgtgcccgccggagtcgtggctcttaagaaaagggaattccgagagttgaagcaaggcagccgctccgtgatggagtatttgcatgagttcaacaatctagcccgttatgccccggaggatgtgcgggaagatgaggagaagcaagagaagttcttggcaggaatggaccctgagctgtccgttcgtctagtctctggggactatcctgattttcaacgactggtggacaagagcatccgcttggaagccaagcacaaggagctggaatcgcacaagcgccgcttggcgaatttccgcaatcagcagggtgctaaccagagggtccgctacaccaatccctacccagggggatcctcctcgcagcagcagcagcagcagcagcagcaacctcgctccgcgcctcgacctcaattcgtggtgcgcattccacagccgcagcagcagcagaatcagcaagggactcgtgcaccccgtcctcctacgccaactgtgcagcctgttcaaggtcgcagggacgctcaaggtccgcagcggctgtgcttcaactgcttcgagcccgggcactttgcggataaatgcccgaagccaaggcgtcagcaaggccaagtgcctccccgctccaacaacggcgggaaggatgtcattcggggccgtgtgaatcatgtgacggccgaggacgtgctgacaactccagacgtcatcgttgaacttcatcagataggtctgtcagaaatccccatagtcagagagttcggagacgtgtttccggaagaactacctggtatgccgcccaagcgagagattgagttccggatatatcttgctccaggaaccactcctctgtacaagcgaccctaccgtatggcagcaaatgaactggccgaagttaagaaacagttggaagagttgaaagaaaaggggtatatacgtccgagtacttccccttggggtgctcctgtgatttttgtggagaagaaagacaaaacgaagaggatgtgcgttgactacagagctctcaatgaagtcaccatcaaaaacaagtaccctcttccccggatcgatgatctgttcgatcagcttaaag

SEQ ID NO: 14107 - DNA, 1341 bp, Oryza sativa
  Clone ID: TFbOSC13325j.C1.o1.fg
atgatgaccgctttcctccaccacctccaaaatccgccacaacagaatgctccaccaccacctccccaacactctaaactcgccgagttcctccgcatccgcccacccaccttctctagctccaacaatcccgtggatgcgttggattggttgcatgccgtggggaagaagctggacactgtgcagtgcagtgatgaagagaaagtcatcttcgccgcccatcagctgcagggacccgcatctctatggtgggaccacttccaggctacgcagccagagggacagccgattacttgggctcgcttcaccgccgctttccggagaacccatgtgcccgccggagtcgtggctctcaagaagagggaattccgagagttgaagcaaggcaaccgctccgtgatggagtatttgcatgagttcaacaatctggcccgttacgctccggaggatgtgcgggaagatgaggagaagcaagagaagttcctggcaggaatggaccccgagctgtccgtccgtctagtctctggggactatccggatttccaacgtctggtggacaagagcatccgcttggaggccaagcacaaggagctggagtcgcacaagcgccgcttggcgaacttccgcaatcagcagggtgctaaccagagggtccgctacaccaatccctatccagggggatcctcctcgcagcagcaacaacagcagcagcaacctcgttccgcgcctcgacctcaattcgtggtgcgcgtcccacagccgcagcagcaacagaatcaacaagggactcgtgcgccccgtcctcctacgccagctgtgcagcccgttcaaggccgcagggacgctcaaggtcagcagcgtctatgcttcaactgcttcgagcccgggcactttgcggataaatgcccgaagccaaggcgtcagcaaggccaagcgcctccccgctccaacaacggagggaaggatgtcattcggggccgtgtgaatcacgtgacggccgaggacgtgctgacaactccagacgtcatcgttgagaagaaagacaagacgaagaggatgtgcgttgactacagagctctcaatgaagtcaccatcaaaaacaagtaccctcttcctcggatcgatgatctgttcgatcagcttaaaggtgccactgtattctccaagattgatcttcgttccgggtaccaccaattacgtatccgcgaggaagatattccgaagaccgcattcaccacgcgatacgggctgtatgaattcacgaggaagaccatcaacaccatctccgtctggtgttgggaaagttgcgggaacatcaattgtatgccaagcttagcaagt

SEQ ID NO: 14108 - DNA, 1941 bp, Oryza sativa
  Clone ID: TFbOSC13698j.C1.o1.fg
atgggcactcttcaccagcgctacccgtacgagttgcaacactcgccctaccgctaccaccctcgtcgcggaggagcccgcgactacgccaccttccgggatgctagctcagaggatgacgctaccatcgtgcacctggcgcggatggtggaggcgtacaacgcggctcgtatcgacttccaccagatggtacgtcgcgggatggtcgagaacaacatgaagatcctggaactgcgccaggagaacctgcagctcaagaaggacctagacgcggtggaggcgcagctgcatcagctcaagatcgcccagggaaaggtctgtcgccccaagcgtcgccgcgtctgccgcagccagaagatcaccgcccgcaagagcacctccaggcccgagcttgttcgtcagtccctggcgtggacttgcttcatcgagacccctcgtgccgagcccgcgcccgtggttccccaggagggggaagcctccggcgtcgctctttctctgtttgctggttccgtgtggggttttcagatggtgacgaccaggagaaatgcggttaccggtgatggcaaccaacccgaaggcagcaaccacaaccaccaaggcaacccaccttcaccttctcctcctcctccaccaccaccaccagacaccaacgccattctcacccaaatcctcgcccagcaggccaacatgatgactgctttcctccaccacctccaaaatccgccacaacagaatgccccaccaccacctccccaacactctaaactcgccgagttcctccgcatccgcccacctaccttctctagctccaacaaccccgtggatgcgttggattggttgcatgccgtggggaaaaagctagacactgtgcagtgcagcgatgaggagaaagtcatcttcgccgcccatcagctgcagggacccgcatctctatggtgggaccatttccaggctacgcagccagagggacagcctattacttgggctcgcttcaccgccgcttttcggaggacccatgtgcccgctggagtcgtggcccttaagaaaagggaattccgagagttgaagcaaggcaaccgctccgtgatggagtatttgcatgagttcaacaacctggcccgttacgctccggaggatgtgcgggaagatgaggagaagcaagagaagttcctggcaggaatggaccccgagctgtccgtccgtctagtctctggggattatccggatttccaacgtctggtggacaagagcatccgcttggaagccaagcacaaggaactggagtcgcacaagcgccgcttggcgaatttccgcaaccaacagggtgctaaccaaagggtccgctacaccaatccctatccagggggatcctcctcgcagcagcaacagcagcagcagcaacctcgctccgcgcctcgacctcaattcgtggtgcgcgtcccacagccgcagcaacagcagaatcaacaagggactcgtgcgccccgtcctcctacgcaaactgtgcagcctggtcaaggccgcagggacgctcaaggtcagcagcgtctgtgcttcaactgcttcgagcccgggcactttgcggataaatgcccgaagccaaggcgtcagcaaggccaagcgcctccccgccccaacaacggtgggaaggatgtcattcggggtcgtgtgaaccacgtgatggccgaggacgtgctgacaactccagacgtcatcgttgtgaccgccgtccccgattggaagcaacccaagacagttactcaagtccgcagtttcttaggtttggcaggatactaccggagcgtgtcaaggcagagcaccaacgaccggccggacttctccaacctctccaagtaccagaatggaaatgggatgaaattgggatggatttcatcaccggacttccaaaaacccaaggtggatatgattctatatgggtag

SEQ ID NO: 14109 - DNA, 5235 bp, Oryza sativa
  Clone ID: TFbOSC13791j.C1.o1.fg
atgtcatggcacagggccggtgtcctgctgctaggggctcagtcctgcctacctgtcccgggggttccggccgtaggtggggttgggtcggtactcttgtctatggctaggatgggttggaaactatgtcacgtcttccgtccgtataccgtggtgatggccggcagcatcaaccgtcgtggtctggacctgactggcttcgttttggagctgcggggcatgtgcgttgtcctggggtatccgcatggagtagactaccagggcaagcagctcccggagcaggagggtgacgatgcagagccccacgctgcttgggaggttactgcagtgatcctcactggctcacccgagaggacttcgttggcagtcaccgcgggtggagattccttctccgccgcttgccagaacgccgcactcctcgccatcggcactcttcaccagcgctacccggacgagttgcagcactcgccctaccgctaccaccctcgccgcggaggagcccgcgactacgccaccttccgggatgctagctcggaggatgacgctaccatcatgcacctggcgcgcatggtggaggtgtacgacgcggcccgtatcgacttccatcagatggtgcgtcgcgggttggtcgagaacaacatgaagatcctggagctgcgtcaggagaatctgcagctggagaaggacctagacgcagtggaggcgcagctgcgtcagctcaagatcgcccagggagaggtctgtcgcctcaagcgccgtcgcgtctaccgcagcctgaagatcaccgcccgcaagagtacctccaggcccgagcttgttcgtcagtccctggcgtggacctgcttcgtcgagacccctcgtgccgagcccgcgcccgtggttcctcaggaggatggagcctccggcgttggcagcacgaaggatgcgctgttgctcaccttccgccctggcccgtcggagcaagtcgtatggggcatggttatgccgatggtgacgaccaggagacgtgctaataccggtgatggcaatcaacccgaaggtagcaaccacaacaaccatggcagcccacctccacctcctcctccgcctccaccaccaccaccagacaccaacgccatcctcacccaaatcctcgcccagcaggccaacatgatgcctgctttcctccaccacatccaaaatccgccacaacataatgctccaccaccgcccccacaacactctaaactcgtcgagttcctccgcatccgtccgcctaccttctctagctccaataaccccgtggatgcattggattggttgcatgccgtggggaaaaagttagacaccgtgcagtgcagcgatgaggagaaagtcatcttcgccgcccaccaattgcaggggcccgcatctctatggtgggaccatttccaggctacgcagccagaagggcagccttttacttgggcccgcttcaccgccgctttccggagaacccatgtgcccgctgaagtcatggcccttaagaaaagggaattccgagagttgaaacaaggcaaccgctctgtgatggagtatttgcatgagtttaacaacctggcccgatacgccccggaggatgttcgtgaagataaggagaagcaagagaagttcttggcaggaatggaccctgagctgtccatgcgtctggtctccggggactatccggatttccagcgtttggttgacaagagcatccgcttggaagccaagcacaagaaactggagtcgcacaagcgttgcttggcgaatttccgcaatcaacagggggctaaccaaagggtccgctacaccaatccctatctagggggatcgtcctcgcagcagcaacagcagcagcaacctcgctccgcgccccgacctcatttcgtggtgcgcgtcccacagccgcagcaacagcagagtcagcaagggactcgtgcgccccgtcctcctacgccagccgtgcagcctggtcaaggccgcagggacgttcaaggtcagcagcgtctgtgcttcaactgcttcgagcctgggcactttgcggataaatgcccaaagccgaggcgccagcaaggccaaccgcctccccgccccaacaacgatggtaaggatgtcatttggggtcgggtgaaccacgtgacggccgaggatgtgctgacaactccaaacgtcatcgttggtacgttcctcattcattccatccctactaccattttgttcgactctggagcttcccactcgtttatatctgtgccattcgtggggagaaatcagttgggggtagaaaggcttaggaactctctgctcatcaccacccctagaggggttatgacagcaaagtattatagccctgccgttcctatagaaattcagggaattccttttccctcggatctgattcttctagacaccaagaacttggatgtgatccttgggatgaattggttggctcaattccaaggagtagtggattgtgcaagacgcactgtcactctgtaccgagggccggaacaaccggttgttttctttgctcccccaacctctgtcggtagttccgaacttcatcagataggactgtcagaaatccccatcgtcagagagttcggagacgtgtttccggaagaactacccggtatgccgccgaagcgagagattgagttccggatagatcttgctccaggaaccactcccctgtacaagcgaccctaccgtatggcatcaaatgaactggccgaacttaaaggtgccactgtattctccaagattgatcttcgttccggatatcaccaattgcgtattcgtgaagaagatatccctaagaccgcattcaccacgcgatacggactgtatgaattcacggtgatgtcgttcggtttaaccaatgctcctaccttcttcatgaacttaatgaacaaagtgttcatggaatatttggataagtttgttgtggttttcattgacgacattctggtgtactcacaatcagaggaagaccatcagcaccatctccgtctggtgttgggaaagttgcgggaacatcaattgtatgccaagcttagcaagtgtgagttctggttgtccgaagtcaaattcttagggcacgtgatatctgctaaaggagttgctgtggaccccgaaacagtgaccgccgtcactggttggaagcaatccaagacagtcactcaaattcgcagcttcttgggtttggcaggatactatcggaggttcatcgagaacttctccaaaatcgctcgacccatgacacagttgttgaagaaagaagagaaatttgtgtggagcccgcaatgcgagaaggcgttccaaactctcaaggaaaagctggtttcctcgccagttttaatcttaccggatactcgcaaggacttcatggtgtattgtgacgctttgcgccaaggattggggtgcgtgctcatgcaggaaggtcatgtggtagcctatgcctcacgccagctacggccccatgaaggcaactaccctacccatgatttggagttagccgctgtggttcatgctctaaagatctggcggcactatctcattgggaatcgctgtgaaatatatactgatcataagagtttgaaatacatcttcactcagtcggatctgaatcttcggcagaggagatggttagaactcatcaaggattatgatgtgggaattcactatcatcctggtaaggccaacgtggtcgctaacgctctaagtcgaaaaagccattgcaacactcttgacgtccgtggcattccacccgaacttaatcaacagatggaagccctgaacctaagcatagttggtcgtggattcttggctacgctggaagccaagcctaccttgctcgatcaaatccgcgaggctcagaagaatgatccggatatgcgtggactcctcaagaatatgaaacagggtaaagccgctggtttcacagaggatgaacacggaaccctatggaacggaaatcgggtatgcgttccagacgacagagaacttaaacagttgaaacttcaggaagctcacgaaagcccttattccatccaccctggcagtacgaagatgtacttagacttgaaagagaaatactggtgggttagtatgcagcgggaaattgcagagttcgtggccctttgtgatgtgtgccagcgtgtcaaggcagagcaccaacgaccggccggacttctccaacctctccaagtaccagaatggaaatgggatgaaattgggatggatttcatcaccggacttccaaaaacccaaggcggatataattctatatgggtagttgtggaccgactaaccaaggtagctcggtttattcctgtgaagaccacctatggagggaacaaactagccgagctctacttcgctaggatcgtgagtctccatggcgttcctaagaaaattgtatctgataggggaagccaattcacctctcacttttggaagaagctccaagaagagctgcgtacccgattaaatttcagcaccgcgtatcacccgcagacagatggacagaccgagcgtctaaatcagatcctagaagatatgcttcgcgcatgtgtcctagattttgggaagacctgggataagagtctcccctatgccgagttctcctacaataacagctatcaagccagcatacaaatggcaccctatgaagcgttgtatggacgcaaatgccggacaccactattgtgggaccaagttggggaaagccaagtgttcgggactgatatcctgagagaagctgaagctaaagtcagaaccattcgggataatctaaaggtggcacagtcccggcagaagagttatgcagataaccgacgctgtaatctggaattcgcagtggacgattttgtgtaccttcgggtcacgccattgcgaggtgtacacaggtttcagacgaaagggaagctcgcacctcggtttgtgggtcctttccgtatcattgctcgacgcggggaagtcgcttaccagttggagctgcccgcctccttgggcaacgtgcatgatgtgttccatgtgtcgcaactcaagaaatgtcttcgagtgccatccgagcaggccgattcagagcaaattgaagttcgcgaagacttgacctacgtggagaggccagtgaaaatcctggacaccatggagcgcaggaccaggaaccgggtaatccgtttttgcaaggtccaatggagcaaccacgctgaggaagaagctacttggtag

SEQ ID NO: 14110 - DNA, 2991 bp, Oryza sativa
  Clone ID: TFbOSC13812j.C1.o4.gm
gccaacatgatgactgctttcctccaccacctccaaaatccgccacaacagaatgccccaccaccacctccccaacactctaaactcgccgagttcctccgcatccgcccacctaccttctctagctccaacaaccccgtggatgcgttggattggttgcatgccgtggggaaaaagctagacactgtgcagtgcagcgatgaggagaaagtcatcttcgccgcccatcagctgcagggacccgcatctctatggtgggaccatttccaggctacgcagccagagggacagcctattacttgggctcgcttcaccgccgcttttcggaggacccatgtgcccgctggagtcgtggcccttaagaaaagggaattccgagagttgaagcaaggcaaccgctccgtgatggagtatttgcatgagttcaacaacctggcccgttacgctccggaggatgtgcgggaagatgaggagaagcaagagaagttcctggcaggaatggaccccgagctgtccgtccgtctagtctctggggattatccggatttccaacgtctggtggacaagagcatccgcttggaagccaagcacaaggaactggagtcgcacaagcgccgcttggcgaatttccgcaaccaacagggtgctaaccaaagggtccgctacaccaatccctatccagggggatcctcctcgcagcagcaacagcagcagcagcaacctcgctccgcgcctcgacctcaattcgtggtgcgcgtcccacagccgcagcaacagcagaatcaacaagggactcgtgcgccccgtcctcctacgcaaactgtgcagcctggtcaaggccgcagggacgctcaaggtcagcagcgtctgtgcttcaactgcttcgagcccgggcactttgcggataaatgcccgaagccaaggcgtcagcaaggccaagcgcctccccgccccaacaacggtgggaaggatgtcattcggggtcgtgtgaaccacgtgatggccgaggacgtgctgacaactccagacgtcatcgttgagaagaaagacaagacgaagaggatatgcgttgactacagagctctcaatgaagtcaccatcaaaaacaagtaccctcttccccggatcgatgatctgttcgatcagcttaaaggtgccactgtattctccaagatcgatcttcgttccggatatcaccaattacgtatccgtgaagaagatattcctaagaccgcattcaccacgcgatacggattgtatgaattcacggtgatgtcgttcggtttgaccaatgcacctgccttcttcatgaacttaatgaacaaagtgttcatggaatacttggataagtttgttgtggttttcattgatgacattctaatatactcacaatcagaggaagaccatcagcaccatctccgtctggtattgggaaagttgcgggaacatcaattgtatgccaaacttagcaagtgtgagttctggttgtccgaagtcaaattcttagggcacgtgatttctgctaaaggagttgctgtggaccctaaaacagtgaccgccgtcaccgattggaagcaacccaagacagttactcaagtccgcagtttcttaggtttggcaggatactaccggaggtttatcgagaacttctccaaaatcgctcgacccatgacccagttattgaagaaagaagagaaatttgtgtggagcccacaatgcgagaaggcgtttcaaactctcaaagaaaagctggtttcctcgccagtgttaatcttgccggatactcgcaaggacttcatggtgtattgtgacgcttcgcgccaaggattggggtgcgtgctcatgcaggacggtcatgtggtggcctatgcctcacgtcagctacggcctcatgaaggcagctaccctacccatgacttggagttagccgcagtggttcatgctctaaaaatctggcggcactatctcattgggaatcgctgtgaaatatatactgatcataagagtttgaaatacatcttcactcagtcggacctgaatcttcggcaaaggagatggttagaactcatcaaggattatgatgtggggattcactatcatcctggtaaggccaacgtggttgccgacgctctaagtcggaaaagccactgcaacactcttaacgtccgtggcattccactcgaacttaatcaacagatggaagccctgaacctaagcatagttagtcgtggattcttgactgcgttggaagccaagcccaccttgctcgatcaaatccgcaaggctcagaagaacgacccggacatgcatggactcctcaagaatatgaaacagggtaaagccgctggtttcacagaggatgaacacggaaccctatggaacggaaatcgggtatgcgttccagataaccgagaacttaaacagctgatacttcaggaagctcacgaaagtccttattccatccaccctggcagtacgaagatgtacttagacttgaaggagaaatactggtgggtcagtatgaagcgggaaattgcagagttcgtggccctttgtgatgtgtgccagcgtgtcaaggcagagcaccaacgaccggccggacttctccaacctctccaagtaccagaatggaaatgggatgaaattgggatggatttcatcaccggacttccaaaaacccaaggtggatatgattctatatgggtagttgtggatcgattaaccaaggtagctcgatttattcctgtgaagaccacctatggagggaacaagctagccgagctctacttcgctaggatcgtgagtctccatggcgttcccaagaaaatcatatctgataggggaagccaattcacctctcacttttggaagaagctccaagaagagctgggtactcgattgaatttcagcaccgcctatcacccgcagacagatggacagaccgagcgtctaaatcagatcctagaagatatgctccgcgcattgtattag

SEQ ID NO: 14111 - DNA, 1206 bp, Oryza sativa
  Clone ID: TFbOSC13849j.C1.o2.fg
atggtgacaaccaggagaagtgctgctaccggtgaaggcagtcaccccgaaggcagcaaccacaacaaccatggcagcccacctccacctcctcccccgccaccaccaccaccaccaccagacaccaactccatcctcacccaaatcctcgcccagcaggccaacatgatggctgctttcctccatcacatccaaaatccgccacagcataatgttccacctccatcaccacccccgcaacattctaaactcgccgagttcctccgcatccgtccgcctaccttctctagttccaataaccccgtggatgccttggattggttgcatgccgtggggaaaaagttggataccgtgcagtgcaacgatgaggaaaaagtcatctttgccgctcaccaactgcagggacccgcatctctatggtgggacaacttccaggctatgcagccagaaggacagcctattacttgggcccgcttcaccgccgctttccggaggacccatgtgcccgccggagttatggcccttaagaaaagggaattccgggagttgaagcaaggcaaccgctccgtgatggagtatttgcatgagtttaacgacttggcccggtatgccccagaggatgttcgggaagatgaggaaaagcaggagaagtttttggcaggaatggaccctgagctgtccgtgcgtctggtctccggggattatcctgatttccagcgtctggtggacaagagcatccgcttggaagccaagcacaaggaactggagtcacacaagcgtcgcttggcaaatttccgcaatcaacaaggggctaaccaaaggatccgctacaccaatccctatccagggggatcctcctcgcagcagcagcagcagcagcaaccacgctccgcgccccgacctcaattcgtggtgcgtgtcccacagccgcagcaacagcagagtcagcaagggacccgtgcgccccgtcctcatgtgccagccgtgcagcctggacaaggccgcagagacgctcaaggtcagcagcgtctgtgcttcaactgcttcgagcccgggcactttgcggataaatgcccgaagccgcgacgccagcaaggccaagcgcctccccgccccaacaacggtggtaaggatgtcattcggggtcgtgtgaaccatgtgactgccgaggatgtgctgacgactccggacgtcatcgttgcttaa

SEQ ID NO: 14112 - DNA, 2013 bp, Oryza sativa
  Clone ID: TFbOSC14703j.C1.o1.fg
atgactggcttcgttttggagctgcggggcatgtgcgtggtcttgggatatccacatggagtggactaccaggccaggccgctcccggagcaggagggtgaggatgcagagcctcacgctggttgggaggtcaccgcagtgatcctctccggctctcccgagcggacttcgctggcagtcaccgcgggtggagattcctttcccgccgcttgccagaacgccgctctcctcgccatcggcacccttcaccagcgctacccggacgagttgcagcactcgccctatcgctaccaccctcgtcgcggagaagcccgtgacttcgccaccttccgagatgctagctcggaggatgacgctaccgtcgtgcatctggcacgcatggtggaggcatacgacgcggctcgtatcgacttccatcagatggtgcgtcgtggcatggtggagaacaacatgaagattctggagctgcggcaggagaacctgcagctcaagaaggacctcgacgcgttggaggcgcagctgcaccagctcaagatcgcccaaggagaggacagccgccccaagcgccgccgcgtctgccgcagccagaagatcaccgcccgcaagagcacctccagacccgagcttgttcgtcagtccctggcgtggacttgcttcgtcgagacccctcgcgccgagcccgcgcccgtggttccccaggagggggaagcctccggcgttggtagcacggaggatgcgctgttgctcgccttccgtcctggcccgtcgcagcggagaaatgttagcaccggtgaaggcaaccaacccgaaggcagcaaccccaacccccaaggcaatccacctccaccaccaccaccagacaccaacgccattctcacccaaatcctcgcccagcaggccaacatgatgactgctttcctccaccacctccaaaatccgccacagcagaatgctccaccaccacctccacaacactctaaactcgccgagttcctccgtatccgcccacctaccttctctagctccaacaaccctgtggatgcgttggattggttgcatgccgtggggaagaagctggacactgtgcagtgcagtgatgaagagaaagtcatcttcgccgcccaccagctgcaagggccagcatctctctggtgggaccacttccaggctacgcagccagaggggcaacctatcacttgggctcgctttaccgccgctttccggagaacccatgtgcccgccggagtcgtggctcttaagaagagggagttccgggagttgaagcaaggcaaccgctccgtgatggagtatttgcatgagttcaacaatctggcccgttacgctccggaggatgtgcgggaagatgaggagaagcaggagaagttcctggcaggaatggaccctgagctgtccgttcgtctagtctctggggactacccggacttccaacgtctggtggacaagagcatccgcttggaagccaagcacaaggagctggagtcgcacaagcgccgcttggcgaacttccgcaatcagcagggtgctaaccaaagggtccgctacaccaatccctatccagggggatcctcctcgcagcagcaacaacagcagcagcaatctcgctccgcgcctcgacctcaattcgtggtgcgcgtcccacagccgcagcagcagcagaatcaacaagggactcgtgcgccccgtcctcctacgccaactgtgcagcccgttcaaagccgcagggacgctcaaggtcagcagcgtctgtgcttcaactgcttcgagcccgggcactttgcggataaatgcccgaagccaaggcgtcagcaaggccaagcgcctccccgctccaacaacggtgggaaggacgtcattcggggtcgtgtgaaccacgtgacggccgaggacgtgctgacaactccggacgtcatcgttgtcagaagaagaccatcagcaccatctccgtctggtgttgggaaagttgcgggaacatcaattgtatgccaagcttag

SEQ ID NO: 14113 - DNA, 1203 bp, Oryza sativa
  Clone ID: TFbOSC14706j.C1.o1.fg
atggtgacgaccaggagaaatgttaacaccggtgaaggcaaccaacccgaaggcagcaaccccaacccccaaggcaacccacctccaccaccaccaccagacaccaacgccattctcacccagatcctcgcccagcaagccaacatgatgaatgctttcctccaccacctccaaaatccaccacaacagaatgctccaccaccacctccccaacactccaaactcgccgagtttctccgcatccgcccacccaccttctctagctccaacaatcccgtagatgcgttggattggttgcatgccgtggggaagaagctagacacggtgcagtgcagtgacgaggagaaagtcgtcttcgccgcccatcagttgcagggacccgcatctctatggtgggaccatttccaggctgcgcagccagaggggcagccgattacttgggcccgcttcaccgccgctttccggagaacccatgtgcccgctggagtcgtggctcttaagaaaagggaattccgggagttgaagcaaggcaaccgctccgtgatggagtatttgcatgagttcaacaatctagcccgttacgctccggaggatgtgcgggaagatgaggagaaacaagagaagttcctggcaggaatggaccccgagctgtccgttcgtctagtctctggggactacccggacttccaacgactggtggacaagagcatccgcttggaagccaagcacaaggagctggaatcgcacaagcgccgcttggcgaatttccgcaatcaacagggtgctaaccagagggttcgctacaccaatccctacccagggggatcctcctcgcagcagcaacaacagcagcagcaacctcgcccagcgccccgacctcagttcgtggtgcgcgtcccacagccgcagcagcagcagaatcagcaagggactcgtgcgccccgtcctcctacgccagctgtgccgcctgttcaaggccgcagggacgctcaaggtcagcagcgtctgtgcttcaactgtttcgagcccgggcactttgcggataaatgcccaaagccaaggcgtcagcaaggccaagcgcctccccgctccaacaacggtggcaaggacgtcatccgtggtcgtgtgaatcacgtgacggccgaggacgtgctgacaactcccgacgtcatcgttgtggttgggctcaatttcaaggagtag

SEQ ID NO: 14114 - DNA, 3960 bp, Oryza sativa
  Clone ID: TFbOSC15024j.C1.o1.fg
atgtcatggcacagggctggtgtcctgctgctagggggctcaatcctggctggctgtcccgggggttccggccgcctgaagcgcctttgtaataatgctacacagccagaggggcagcctattacttgggcccgcttcaccgccgccttccggaggacccatgtgcccgccggagtcatggcccttaagaaaagggaatttcgagagttgaagcaaggcaaccgctccgtgatggagtatttgcatgagttcaacaacctggcccggtacgccccggaggatgtacgggaagatgaggaaaagcaggagaagttcttggcaggaatggatcctgagctgtccgtccgtctagtctccggggactatccggatttccaacgtctggtggacaagagcatccgcttggaagccaagcacaaggaactggagtcgcacaagcgtcgcttggcgaattttcgcaaccaacagggtgctaaccaaaggatccgctacaccaatccctatccagggggatcttcctcgcagcagcagcaacctcgctccgcgcctcgacctcaattcgtggtgcgcgtcccacagccgcagcaacagcagagccagcaagggacccgtgcgccccgtcctcctacgccagccgcgcagtctggacaaggccgcagggacgttcaaggtccgcagcgtctgtgcttcaactgcttcgagcccgggcactttgcggataaatgcccgaagccgaggcgccagcaaggccaagcgcctccccgctccaacaacggtggtaaggatgtcatttggggtcgtgtgaaccacgtgacggccgaggacgtgctgacaactccagacgtcatcgttggtacgttcctcatccattccatccctgctaccattttgttcgactctggagcttcccactcgtttatatctgtgccattcatggggagaaatcagttgggggtagaaaggcttaggaaccctctactcatcaccacccctggaggggttatgacagcaaagtattatagtcctgccgtccctatagaaattcaggggattccttttccctcggatctgattcttctagacaccaagaacttggatgtgatccttgggatgaattggttggctcaattccaaggagtagtggattgtgcaagacgcactgtcactctgtaccgagggccggaacaaccggttgttttctttgcacccccaacctctgtcagtagttcagaacttcatcagataggactgtcagaaatccccattgtcagagagttcggagacgtgtttccggaagaactacccggtatgccgcccaagcgagagattgagttccggatagatcttgctccaggaaccactcctctgtacaagcgaccctaccgtatggcagcaaatgaactggccgaagttaagaaacagttggaagagttgaaagaaaaggggtatatacgtccgagtacttccccctggggtgctcctgtgatttttgtggagaagaaagacaagacgaagaggatgtgcgttgactacagagctctcaatgaagtcaccatcaaaaacaagtaccctcttccccggatcgatgatctgttcgatcagcttaaaggtgccacggtattctccaagattgatcttcgttctggatatcaccagttgcgcatccgtgaagaagatattccgaagaccgcattcaccacgcgatacggactgtatgaattcacggtgatgtcgttcggtttaaccaatgctcctgccttcttcatgaacttaatgaacaaagtgttcatggaatacttggataagtttgttgtggttttcattgatgacattctggtatactcacaatcagaggaagaccatcagcaccatctccgtctggtgttgggaaagttgcgggaacatcaattgtatgccaaacttagcaagtgtgagttctggttgtccgaagtcaagttcttagggcacgtgatatccgctaaaggagttgctgtggaccccgaaacagtgaccgccgtcactgattggaagcaacccaagacagtcactcaaattcgcagtttcttaggtttggcaggatactaccggaggttcatcgagaacttctccaaaatcgctcgacccatgacacagttgttgaagaaagaagagaaatttgtgtggagcccgcaatgcgagaaggcgttccaaactctcaaagaaaagctggtttcctcgccagtgttaatcatgccggatactcgcaaggacttcacggtgtattgtgacgcttcgcgccaaggattggggtgcgtgctcatgcaggacggtcatgtggtggcctatgcctcacgccagctacggcctcatgaaggcaactaccctacccatgatttggagttagccgcggtggttcatgctctaaaaatctggcggcactatctcattgggaatcgctgtgaaatatatactgatcataagagtttgaaatacatcttcacccagtcggatctgaatcttcggcagaggagatggttagaactcatcaaggattatgatgtgggaattcactatcatcctggtaaggccaacgtggtcgccgacgctctaagtcgaaaaagccattgcaacactcttaacgtccgtggcattccacccgaacttaatcaacagatggaagccctgaatctaagcatagtgggtcgcggattcttggctgcgttggaagccaagcccaccttactcgatcaaatccgcgaggctcagaagaacgacccggacatgcgtggactcctcaagaatatgaaacagggtaaagccgctggtttcacagaggatgaacacggaaccctatggaacggaaatcgggtatgcgttccagataacagagaacataaagagctgatacttcaggaagctcacgaaagtccttattccatccaccctggcagtacgaagatgtacttagacttgaaggagaaatactggtgggttagtatgaagcgggaaattgcagagttcgtggccctttgtgatgtgtgccagcgtgtcaaggcagagcaccaacgaccggccggacttctccaacctctccaagtaccagaatggaaatgggatgaaattgggatggatttcatcaccggactttcaaaaacccaaggtggatacgattctatatgggtagttgtggatcgattaaccaaggtagctcgatttattcctgtgaagaccacctatggagggaacaaactagccgagctctacttcgctaggatcgtgagtctccatggcgttcccaagaaaatcgtatctgataggggaagccaattcacctctcacttttggaagaagctccaagaagagctgggtacccgattaaatttcagcaccacgtatcacccgcagacagatggacagaccgagcgtctaaatcagatcctagaagatatgcttcgcgcatgtgtcctagatttcgggaagacctgggataagagtctcccctatgccgagttctcctacaataacagctaccaagccagcatactaatggcaccttatgaagcattgtatgggcgcaaatgtcggacaccactattgtgggaccaagttggggaaagccaagtgttcgggaccgatatcctgagagaagctgaagctaaagtcagaaccattcgggataatctaaaggtggcccagtctcggcagaagagttatgcagacaaccgacgccgtgacctagaattcgcagtggatgactttgtgtatcttcgggtcacgtccttgcgaggtgtacacaggtttcagacaaaggggaagctcgcacctcggtttgtgggtcctttccgtatcattgcacggcgcggagaagtcgcttaccagttggagctgcccgcctccttgggcaacgtgcatgatgtgttccatgtgtcgcaactcaagaaatgtcttcgagtgccatccgagaaggccgactcagagtaa

SEQ ID NO: 14115 - DNA, 304 bp, Oryza sativa
  Clone ID: TFbOSC15024j.C1.o3.np
atgagtagagtgtccactagttggggttttgtttaatctagggtgaataaggccgaggggaggggcgcgcggaccgggtccacgggagtggggcccacgcggcagcctcacggtccatggtggaccgggtgcacccggctcacaccggccggcgccgtgggtcccacgcgtcagccgcacccgagggcgcgggcggctgacggccggcccccacatggcagccgcggggcgcgcccgaaggcggccacgccggcacagccgacgggaggcggcgcacccgcgccccgatggtcgccgccggtgt

SEQ ID NO: 14116 - DNA, 1195 bp, Oryza sativa
  Clone ID: TFbOSC15153j.C1.o1.fg
atggtgacgaccaggagaaatgctgccaccggtgatggcaaccaacctgaaggcagcaaccacaaccaccagggcaacccacctccacctcctcctccgcctcctccaccaccaccagataccaatgccattctcacccaaatcctcgcccagcaggccaacatgatgactgttttcctccaccacctccaaaatccaccacaacagaatgctccaccaccacccccacaacactctaaactcgccgagttcctccgcatccgtccacccaccttctctagctccaacaaccccgtggatgcgttggattggttgcatgccgtggggaaaaagctagacacggcgcagtgcagcgatgaggagaaagtcatcttcgccgcccaccagctgcaggggcccgcatctctatggtgggaccatttccaagctacgcagccagaggggcaacctattacttgggcccgcttcaccgccgctttccggagaacccatgtgccagctggagtcgtggctcttaagaaaagggaattccgagagttgaagcaaggcaaccgctccgtgatggagtatttgcatgagttcaacaatctggcccgttacgccccggaggatgtgcgggaagatgaggagaagcaagagaagttcttggcaggaatggacctcgagctgtccgtccgtctagtctctggggactatccggatttccaacgtctggtggacaagagcatccgcttggaggccaagcacaaggaactggagtcgcacaagcgccgcttggcgaatttccgcaatcaacagtgtgctaaccaaagggtccgctacaccaatccctatccagggggatcctcttcgcagcagcaacaacagcagcagcaacctcgctccgcgcctcgacctcaattcgtggtgcgcgtcccacagccgcagcagcagcagaatcagcaagggactcgtgcgccccgtcctcctacgccaactgtgcagcccggtcaaggccgcagggacgctcaaggtcagcagcgtctgtgcttcaactgcttcgagcccgggcactttgcggataaatgcccgaagccaaggcgtcagcaaggtcaagcgcctccccgctccaacaacggtgggaaggatgtcattcggggtcgtgtgaatcacgtgacggccgaggacgtgctgacaactccagacgtcatcgttg

SEQ ID NO: 14117 - DNA, 5780 bp, Oryza sativa
  Clone ID: TFbOSC15185j.C1.o1.np
atggcggccggatcttccacgaccgattccccctcatccggccgctctctcctcctcccaacactacataaacactccccatgcctccctccttcgtttccgccactcgccgctctctctccccgtcggaatcgagctcgcaacgtcgtcctctctctccgccgtcgccgccgagctccggtccgccgccgtcgtcgcaccgggcctcctcccgtttcggcatcgccttcttcgggttcgccgcgtcctcgccaatctcgtccaccccttcgtttcgcccgccgaccgccggaacgccgccgtcctcgtcgacccgagccgcgccgccccctttctccgcttcggtcgccgttcccgtcgtcgccgtcgacccggggtgagccatggaccgcccatttcgcttcccccttccctcccctctctcgggcgccgctccgtcgcgccggaggtcgccgccggcgaccatcggggcgcgggcgcgccgcctcccgtcggctgtgccggcgaggccgccttcgggcgcgccccgcggctgccatgtggggcccggtcgtcagccgcccgcgtcctcgggtgcggctgacgcgtgggacccacggcgccggccggcgcaagccgcgtgcacccggtccaccgtggacccacctcggccatataaggaccggtgttcgggcctctgttgcaaagcactaccgtacttccacatgtctagtggggcaaatgaaggctacacgagctgcggcccggtagtcgagatgtcatggcacagggccggtgtcctgctgctaggggctcagtcctgcctgcctgtcccgggggttccggccgtaggtgggattgggtcgatgtacacctctgatcagagtaaaatctattcgaatagccgcgccctcggttatgggcaagccgagcaatgtacccaaatggccggcagcgtcagccgtcgtggtttggacatgactggcttcgtcttggagctgcggggcatgtgcgtggtcctggggcatccacatggagtggactaccaggccaggccgcttccggagcaggagggtgacgatgcggagccccacgctgcttgggaggtcactgcagtgatcctcgctggctctcccgagcggacttcgctgacagtcaccgcgggtggggattccttccccgccgcttgccagagcgccgctctcctcgccatcggcactcttcaccagcgctacccggacgagttgcagcactcgccctaccgctaccaccctcgtcgcggaggagcccgcgactacgccaccttccgggatgctagctcggaggatgacgctaccatcgtgcacctggcgcgcatggtggaggcgtacgacgcggctcgtatcgacttccatcagatggtgcgtcgtgggatggtcgagaacaacatgaagatcctggagctgcgtcaggagaacctgcagctcaagaaggacctagatgcggtggaggcgcagctgcatcagctcaagatcgcccagggagagatctgccgccccaagcatcgccgcgtctaccgcagccagaagatcaccgcccgcaagagcacctccaggcccgagcttgttcgtcagtccctggcgtggacttgcttcgtggagacccctcgtgccgagcccgcgcccgtggttccccaggagggggaagcctccggcgttggtagcacggaggatgcgctgttgctcaccttccatggtgatgaccaggagaaatgctgccaccagtgatggcaaccaacccgaagacagcaaccacaacaaccatggcagcccacctccacctcctcctccgcctccaccaccaccaccagataccaacgccattctcacccaaatcctcgcccagcaggccaacatgatgactgcttttctccaccacctccaaaatccgccacaacataatgctccaccaccacctccccaacactctaaactcgccgagttcctccgcatctgtccacctaccttctctagctccaacaaccccgtggatgcgttggattggttgcatgccgtggggaaaaagctagacactgtgcagtgcagcgatgaggagaaagtcatcttcgccgcccaccagctgcagggacccgcatctctatggtgggaccatttccaggctacgcagccagagggacagcctattacatgggctcgcttcaccgccgctttccgaagaacccatgtgcccgccggagtcgtggcccttaagaaaagggaattccgagagttgaagcaaggcaaccgctccgtgatggagtatttgcacgagttcaacaacctggcccgttacgctccggaggatgtgcgggaagatgaggagaagcaagagaagttcctggcaggaatggaccctgagctgtccgtctgtctagtctccggggattatccggatttccaacgtctggtggacaagagcatccgcttggaagccaagcacaaggaactggagtcgcacaagcgccgcttggcgaatttccacaaccaacagggtgctaaccaaagggtccgctacaccaatccctatccagggggatcctcctcgcagcagcaacagcagcagcagcaacctcgctccgcgcctcgacctcaattcgtggtgcgcgtcccacagccgcagcaggagcagaatcaacaagggactcgtgcgccccgtcctcctccaccgactgtgcagcctggtcaaggccgcagggacgctcaaggtccgcagcgtctgtgcttcaactgcttcgagcccgggcactttgcggataaatgcccgaagccaaggcgtcagcaaggccaagcgcctccccgccccaacaacggtggtaaggacgtcattcggggtcgtgtgaaccatgtgacggccgaggacgtgctgacaactccagacgtcatcgttggtacgttcctcattcattccatccctgctaccattttgttcgactctggagcttcccactcatttatatctgtgccattcgtggggagaaatcagttgggggtagaaaggcttagaaaccctctgctcatcaccacccctggaggggttatgacagcaaagtattatagccctgccgtccctatagaaattcaggggattccttttccctcggatctgattctgctaggcaccaagaacttggatgtgatccttgggatgaattggttggctcaattccaaggagtagtggattgcgcgagacgcactgtcactctgtaccgagggccggaacaaccggttgttttctttgcacccccaacctcagtcagaagttcagaacttcatcagatagaactgtcagaaattcccatcgtcagagagttcggagacgtgtttccggaagaactacctggtatgccgcctaagcgagagattgagttccggatagatcttgctccaggaaccgctcctctgtacaagcgaccctaccgtatggcagcaaatgaattggccgaagttaagaaacagttggaagagctgaaagaaaaggggtatatacgtccaagtacttccccctggggtgctcctgtgatttttgtggagaagaaagacaagacgaagaggatgtgcgttgactacagagctctcaatgaagtcaccatcaaaaacaagtaccctcttccccggatcgatgatctgttcaatcagcttaaaggtgccactgtattctccaagattgatcttcgttccggatatcaccaattacgtattcgcgaagaagatattccgaagaccgcattcaccacgcgatacggactgtatgaattcacggtgatgtcgttcggtttaaccaatgctcctgccttcttcatgaacttaatgaacaaagtgttcatggaatacttggataagtttgtggtggttttcattgatgacattctgatatactcacaatcagaggaagaccatcagcaccatctccgtctggtattgggaaagctgcgggaacatcaattgtatgccaaacttagcaagtgtgagttctggttgtccgaagtcaaattcttagggcacgtgatatctgctaaaggagttgctgtggaccccgaaacagtgatcgccgtcaccgattggaagcaacccaagacagtcactcaagttcgcagtttcttaggtttggcaggatactaccgaaggttcatcgagaacttctccaaaatcgctcgacccatgacacagttgttgaagaaagaagagaaatttgtgtggagcccgcaatgcgagaaggcgtttcaaactctcaaagaaaagctggtttcctcgccggtgttaatcttgccagatactcacaaggacttcatggtgtattgtgacgcttcgcgccaaggataggggtgcgtgctcatgcaggatggttatgtggtggcctatgcctcacgccagcttcggcctcatgaaggcaactaccctactcatgatttggagttagccgcggtggttcatgccctaaaaatctggtggcactatctcattgggaatcgctgtgaaatatatactgatcataagagtttgaaatacatcttcactcagtcggatctgaatcttcggcaaaggagatggttagaactcatcaaggattatgatgtgggaattcactatcatcctggtaaggccaacgtggtcgccgacgctctaagtcgaaagagccattgcaacactcttaacgtccgtggcattccaccggaacttaatcaacagatggaagccctgaacctaagcatagttagtcgtggattcttggctacgctggaagccaagcctaccttgctcgatcaaatctgcaaggctcagaagaatgacccggatatgcatgggctcctcaagaatatgaaacagggtaaagccgctggtttcacagaggatgaacatggaaccctatggaacggaaatcggcgtgtcaaggcagagcaccaacgaccggccggacttctccaacctctccaagtaccagaatggaaatgggatgaaattgggatggattttatcaccggacttccaaaaacccaaggcggatatgattctatatgggtagtcgtggatcgactaaccaaggtagcacggttcattcccgtaaagaccacctatggagggaacaaactagctgaactctacttcgctaggatcgtcagtctgcatggcgtccccaagaaaattgtatctgatcggggaagccagttcacctctcacttttggaagaagctccaagaagagctgggtacccgattaaatttcagcaccgcgtatcacccgcagacagatggacagaccgagcgtctaaatcagatcctagaggatatgcttcgcgcatgtgtcctagatttcgggaagacctgggataagagtctcccctatgccgagttctcctacaataacagttatcaagccagcatacaaatggcaccttatgaagcgttgtatgggcgcaaatgccggacaccgctattgtgggaccaagttggagaaagccaagtgttcgggactgatatcctgagagaagctgaagcgaaggtcagaaccattcgggataatctaaagatggcacagtcccggcagaaaagttatgcagataaccgtcgccgtgacctggaattcgcagcggatgactttgtgtatgttcgggtcacgccattgcgaggtgtacacaggtttcggacaaaggggaagctcgcacctcggtatgtgggtcctttccgtatcactgctcggcgcggagaagttgtcacgaccggaaataacccaacgggcattccttacgtgggtgcattaatccttgt

SEQ ID NO: 14118 - DNA, 2056 bp, Oryza sativa
  Clone ID: TFbOSC15186j.C1.o2.gm
atgatgactgcttttctccaccacctccaaaatccgccacaacataatgctccaccaccacctccccaacactctaaactcgccgagttcctccgcatccgtccacctaccttctctagctccaacaaccccgtggatgcgttggattggttgcatgccgtggggaaaaagctagacactgtggagtgcagcgatgaggagaaagtcatcttcgccgcccatcagctgcaggggcccgcatctctatggtgggaccatttccaggctacgcagccagagggacagcctattacttgggcccgtttcaccgccgctttccggagaacccatgtgcccgccggagtcgtggcccttaagaaaagggaattccgagagttgaagcaaggcaaccgctccgtgatggagtatttgcatgagttcaacaacctggcccgttacgccccggaggatgtgcgggaagatgaggagaagcaagagaagttcttggcaggaatggaccctgagctgtccgtccgtctagtctccggggactatctggatttccaacgtctggtggacaagagcatccgcttggaagccaagcacaaggaactggagtcgcacaagcgccgcttggcgaatttccgcaatcaacagggagctaaccaaagggtccgctacaccaatccctatccagggggatcctcctcgcagcagcaacaacagcagcagcaacctcgctccgcgccccgccctcaattcgtggtgcgcgtcccacagccgcagcaacagcagagtcagcaagggacccgtgcgcctcgtcctcctacgccaactgtgcagcctggccaaggccgcagggacgcttcaggtccgcagcgtctgtgcttcaattgcttcgagcccgggcactttgcggataaatgcccaaagccgaggcatcagcaaggccaagcgcctccctgctccaacaacggtggtaaggatgtcattcggggtcgtgtgaaccatgtgacggccgaggacgtgctgacaactccagacgtcatcgttggtacgttcctcattcattccatccctgctaccattttgttcgactctggagcttcccactcgtttatatctgtgccattcatggggagaaatcagttggggatagaaaggcttaggaaccctctgctcatcaccacccctggaggggttatgacagcaaagtactatagccctgccgtccctatagaaattcaggggattccttttccctcggatctgattctgctagacaccaagaacttggatgtgatccttgggatgaattggttggctcaattccaaggagtagtggattgtgcgagacgcaccgtcactctgtaccgagggccgggacaaccggttgttttctttgcacccccaacctctgtcagtagttcagaactgcatcagataggtctgtcagaaatccccatagtcagagagttcggagacgtgtttccggaagaactacctggtatgccgcccaagcgagagattgagttccagatagatcttgctccaggaaccactcctctgtgcaagcgaccctaccgtatggcagcaaatgaactggccgaagtcaagaaacagctggaagagttgaaagaaaaggggtacatacgtccgagcacttccccctggggtgctcctgtgatttttgtggagaagaaagacaagacgaagaggatgtgcgttgactatagagctctcaatgaagtcaccataaaaaacaagtaccctcttccccggatcgatgatctgttcgatcagcttaaaggtgccactgtattttccaagattgatcttcgttccggatatcaccaactgcgtattcgtgatgaagatattccgaagaccgcattcaccacgcgatacggactgtatgaattcacggtgatgtcattcggtttaaccaatgcacccgccttcttcatgaacttaatgaacaaagtgttcatggaatacttggataaatttgttgtggttttcattgatgacattctgatatactcacaatccgaggaagaccatcagcaccatctcg

SEQ ID NO: 14119 - DNA, 5014 bp, Oryza sativa
  Clone ID: TFbOSC15467j.C1.o1.np
ctgcttcacttatcatcaaaatctgatcttttaaaatgttgcttttcttttgtttttgtttgtagatggccggcagcgttacccgtcgtggtttggacatgactggcttcgtcttggagctgcgaggcatgtgcgtggtcttggggtatccacatggagtggattaccaggccaggccgctcccggagcaggagggtgaggatgcagagcctcacgctggttgggaggtcactgcagtaatcctctccggctctcccgagcggacttcgctggcagtcaccgcgggtggggattccttccccgccgcttgccagaacgccgctctcctcgccatcggcaccctgcaccagcgctacccggacgagttgcagcactcgccctaccgctaccacccccgtcgcggaggagccagcgaccatgccaccttccgagacgccagctcggaggatgacgctaccgtcgtgcatctggcacgcatggtggaggcgtacgacgcggctcgtatcgacttccaccagatggtgcgccgtggcatggtggagaacaacctgaagatcctggagctgcgtcaggagaatctgcagctcaagaaggacctcgacgcgttggaggcgcagctgcaccagctcaaggtcgcccaaggagagatcagccgtcccaagcgtcgccgcgtctgccgcagccagaagatcaccgcccgcaagagcacctccaggcctgagcttgttcgtcagtccctggcgtggacctgcttcgtcgagacccctcgtgccgagcctgcgcccgtggttccccaggagggggaagcctccggcgttggtagctcggagggtgcgctgttgctcaccttccgtcctggcccgtcgcagcgctcttcttctctgtttgctggttctatgtggggttttcagatggtgacgaccaggagaaatgttaacaccggtgaaggcaaccaacccgaaggcagcaaccccaaccaccaaggcaatccacctccacctccacctccgcctccaccaccaccaccagacaccaacgccattctcacccaaatcctcgcccaacaagccaacatgatgaatgctttcctccaccacctccaaaacccgccacaacagaatgctccaccaccccctccccaacactccaaactcgccgaattcctccgtatccgcccacctaccttctctagctccaacaatcccgtggatgcgttggattggttgcatgccgtggggaagaagttagacacggtgcagtgcagcgatgaggagaaagtcgtcttcgccgcccatcagctgcagggacccgcatctctctggtgggaccacttccaggctacgcagccagagggacagccgattacttgggctcgcttcaccgccgctttccggagaacccatgtgcccgctggagtcgtggctcttaagaaaagggaattccgggagttgaagcaaggcaaccgctccgtgatggagtatttgcatgagttcaacaatctagcccgttatgccccggaggatgtgcgggaagatgaggagaagcaggagaagttcttggcgggaatggaccctgagctgtccgttcgtctagtctctggggattacccggacttccaacgactggtggacaagagcatccgcttggaagccaagcacaaggagctggagtcgcacaagcgccgcttggcgaacttccgaaatcagcaaggtgctaaccagagggtccgctacaccaatccctatccagggggatcctcctcgcagcagcagcagcagcaatcgcgatccgcgcctcgacctcaattcgtggtgcgcgtcccacagccgcagcagcagcagaatcagcaagggactcgtgcaccccgtccccctacgccaactgtgcagcctgttcaaggccgcagggacgctcaaggtcagcagcgtctgtgcttcaactgcttcgagcccgggcactttgcggacaaatgcccgaagccaaggcgtcagcaaggccaagcgcctccccgctccaacaacggtggcaaggatgtcattcggggtcgcgtgaatcacgtgacggccgaggacgtgctgacaactccggacgtcatcgttggtacgttcctcgtccattccatccctgctacaattttgttcgactctggagcttcccactcgtttatatctgtgccattcgtggaaaaaaaatcagttgggggtagaaaggcttagaaaccctctgctcatcaccacccctggcggggttatgacggcaaagtattatagccctgccgttcctatagaaattcaggggattctttttccctcggatctgattctgttagacacaaagaacttggatgtgattcttgggatgaattggttggctcaattccaaggggtagtggattgcgcgaggcgcactgtcactctgtaccgaggaccagaacaaccggttgttttctttgcacctccaacctctgtcagaagttcagaactgcatcagataggtctgtcagaaatccccatagtcagagagttcggagacgtgtttccggaggaactacctggtatgccgcccaagcgagaaattgagttccggatagatcttgctccaggaaccactcctctgtacaagcgaccctaccgtatggcagcaaatgaactggccgaagttaagaaacagttggaagagttgaaagaaaaggggtatatacgtccgagtacttccccatggggtgctcctgtgatttttgtagagaagaaagacaagacgaagaggatgtgcgttgactacagagctctcaatgaagtcaccatcaaaaacaagtaccctcttccccggatcgatgatctattcgatcagcttaaaggtgccactgtattctccaagattgatcttcgttccggatatcaccaattacgtattcgtgaagaagatattccgaagaccgcattcactacgcgatatggactgtatgaattcacggtgatgtcgttcggcttaaccaatgctcctgccttcttcatgaacttgatggacaaagtgttcatggaatacttggataagttcgttgtggttttcatcgatgatattctgatatactcacaatcagaggaagaccatcagcaccatctccgcctggtattgggaaagttgcgggaacatcaattgtatgccaagcttagcaagtgtgagttctggctgtccgaagtcaaattcttggggcacgtgatatctgctaaaggagttgctgtggatcccgaaacagtgaccgccgtcaccgattggaagcaacctaagacagtcactcaaattcgcagtttcttgggtttggcaggatactaccggagattcatcgagaacttctccaaaatcgctcgacccatgacacagttgttgaagaaagaagagaagtttgtgtggagcccgcaatgcgagaaggcgttccaaactctcaaagaaaagctggtttcctcgccagtgttaatcttgccggatactcgcaaggatttcatgatgtactgtgatgcttcgcgccaaggattggggtgcgtgctcatgcaggacggtcatgtggtagcctatgcctcacgtcagctacgacctcatgaaggcaactaccctacacatgacttggagctagcagcggtggttcatgctctaaaaatctggcggcactatctcattgggaatcgctgtgaaatatatactgatcacaagagcttgaaatacatcttcactcagtcggacctgaatcttcgacaaaggagatggttagaactcatcaaggattatgatgtgggaattcactatcatcccggcaaggccaacgtcgtcgccgacgctctaagtcgaaaaggccattgcaacactctcaacgtccgaggcattccacccgagcttaatcaacagatggaagccctgaacctaagcatagttggtcgcggattcttggctgcgttagaagccaagcctaccttgctcgatcaaatccgcgaggctcagaagaatgatccggacatgcatggactcctcaagaatatgaaacagggtaaagccgctggtttcacagaagatgaacacggaaccttatggaacggaaagcgggtgtgcgttcccgataatagagaacttaaacagctgatacttcaggaagctcacgaaagtccttattccattcatccgggcagtaccaagatgtacttagacttgaaggagaaatactggtgggttagcatgaagcgggaaattgcagagtttgtggctctatgtgatgtgtgccagcgtgtcaaggcagaacaccaacgaccggccggacttctccaacctctccaagtgccggaatggaaatgggatgaaattgggatggatttcatcaccggcctcccaaaaacccaaggtgggtatgattctatatgggtaatagtggatcgattaaccaaggtagctcgattcattcatgtgaagaccacctatggagggaacaaactagcggagctctacttcgctaggatcgtgagtctccatggcgttcccaagaaaatcgtatctgataggggaagccaattcacctctcacttttggaagaagctccaagaagagctgggtactcgattgaatttcagcaccgcatatcacccgcagacagatggacagaccgagcgtctgaatcagattctagaagatatgctccgcgcatgtgtcctagacttcgggaagacttgggataagagtctcccctatgccgagttctcctacaataacagctatcaagccagcatacaaatggcaccctatgaagcgttgtacgggcgcaaatgccggacaccgctattgtgggaccaagttggagaaagtcaagtgttcgggactgatatcctgagagaagctgaagctaaagtcagaatcattcgggataatctaaaggtggcacagtctcggcagaaaagttatgcagataaccgtcgtcgtgacttggaattcgcagtggatgactttgtgtatcttcgggtcacgccattgcgag

SEQ ID NO: 14120 - DNA, 5271 bp, Oryza sativa
  Clone ID: TFbOSC15719j.C1.o1.fg
atgtcatggcacagggccggtgtcctgctgctaggggctcagtcctgcctgcctgtcccgggggttccggccgtaggtgggattgggtcggtactcttgtctatggctaggatgggttggaaactatgtcacgtctttcgtctgtataccgtggtgatggccggcagcgtcacccgtcgcggtttggacatgactggtttcgtcttggagctgcggggcatgtgcgttgtcctggggtatccacatggagtggactaccagggcaggccgcttccggagcaggagggtgacgatggagagccccacgctgcttgggaggtcactgcagtgatcctcgctggctctcccgagcggacttcgctggcagtcaccgcgggtggagattctttccccgccgctagccagagcgccgctctcctcgccatcggcactcttcaccagcgctacccggacgagttgcagcactcgccctaccgctaccaccctcgccgcggaggagcccgcgactacgccaccttccgggatgctagctcggaggatgacgctaccatcgtgcacctggcgcgcatggtggaggcgtacgacgcggctcgtatcgacttccatcagatggtgcgccgtgggatggtcgagaacaacttgaagatcctggagctgcgtcaggagaacctgcagctcaagaaggacctagacgcggtggaggcgcagctgcatcagctcaagatcgcccagggagaggtctgccgccccaagcgtcgccgcgtctgccgcagccagaagatcaccgcccgcaagagcacctccaggcccgagcttgttcgtcagtccctggcgtggacttgcttcgtcgagacccctcgtgccgagcctgcgcccgtggttccccaggagggggaagcctccggcgttggtagcacggaggatgcgctgttgctcaccttccgtcctggcccgtcgcagcggaggagtgctaacaccggtgatggcaaccagcctgaaggaagcaaccaccaccaccagggcagcccacctccacctcctcctccgcctccaccaccaccaccagataccaacgccattctcacccaaatcctcgcccagcaggccaacatgatgactgctttcctccaccacctccaaaatccgccacaacataatgctccaccaccacccccacaacactctaaactcgccgagttcctccgcatccgcccacctaccttctctagctccaataaccccgtggatgcgttggattggttgcatgccgtggggaaaaagctagacactgtgcagtgcagcgatgaggagaaagtcatcttcgccgcccaccagctgcaggggcccgcatctctatggtgggaccatttccaggctacgcagccagaggggcaacctattacatgggcccgtttcaccgccgctttccggagaacccatgtgcccgccggagtcgtggcccttaagaaaagggaattccgagagttgaagcaaggcaaccgctccgtgatggagtatttgcatgagttcaacaacctggcccgttacgccccggaggatgtgcgggaagatgaggagaagcaagagaagttcttggcaggaatggaccctgagctgtccgtccgtctagtctccggggactatccggatttccaacgtctggtggacaaaagcatccgcttggaagccaagcacaaggaactggagtcgcacaagcgccgcttggcgaatttccgcaatcaacagggtgctaaccaaaggatccgctacaccaatccctatccagggggatcttcctcgcagcagcaacaacagcagcagcaacctcgcttcgcgcctcgacctcaattcgtggtgcgcgtcccacagccgcagcagcagcagaatcaacaagggactcgtgcgccccgtcctcctacgccaactgtgcaacctggtcaaggccgcagggacgctcaaggtccgcaacgtctgtgcttcaactgcttcgagcccgggcactttgcggataaatgcccaaagctgaggcgtcagcaaggccaagcgccttcccgctccaacaacggtgagaaggatgtcatttggggtcgggtgaaccacgtgacagccgaggacgtgctgacaactccagacgtcatcgtcggtacgttcctcattcattccatccctgctaccattctgttcgactctggagcttcccactcgtttatatctgtgccattcgtggggagaaatcagttgggggtagaaaggcttaggaaccctctgctcatcaccacccctggaggggttatgacagcaaagtactatagccctgccgtccctatagaaattcaggggattccttttccctcggatctgattctgctagacaccaagaacttggatgtgatccttgggatgaattggttggctcaattccaaggagtagtggattgtgcgagacgcactgtcactctgtaccgagggccggaacaaccggttgttttctttgcacccccaacctctgtcagtagttccgaacttcaccagatagaactgttagaaatccccatcgtcagggagttcggagacgtgtttccggaagaactacccggtatgccgcccaaacgagagattgagttccggatagatcttgctccaggaaccactcctctgtacaagcgaccctaccgtacggcagcaaatgaactggccgaagtcaagaaacagttggaagagttgaaagaaaaggggtatatacgtccgagtacttccccctggggtgctcctgtgatttttgtggagaagaaagacaagacgaagaggatgtgcgttgactacagagctctcaatgaacttaaaggtgctactgtattctccaagatcgatcttcgttccggatatcaccaattacgtattcgtgaagaagacattccgaagaccgcattcaccacgcgatacggactgtatgaattcacggtgatgtcgttcggtttaaccaatgcacctgcctttttcatgaacttaatgaacaaagtgttcatggaatacttggataagtttgttgtggttttcattgatgacattctggtatactcacaatccgaggaagaccatcagcaccatctccgtctggtattgggaaagttgcgggaacatcaattgtatgccaaacttagcaagtgtgagttctggttgtccgaagtcaaattcttagggcacgtgatatctgctaaaggagttgctgtggaccccgaaacagtgaccgccgtcactgattggaagcaacccaagacagtcactcaagtccgcagtttcttaggtttggcaggatactaccgaaggtttatcgagaacttctccaaaatcgctcgacccatgacacagttgttgaagaaagaagagaaatttgtgtggagcccgcaatgcgagaaggcgtttaaaactctcaaagaaaagctggtttcctcgccagtgttaatcttgccggatactcgcaaggatttcatggatggtcatgtggtggcctacgcctcacgccagctacggcctcatgaaggcaactaccctacccatgatttggagttagctgcggtggttcatgctctaaaaatctggcggcactatctcattgggaatcgctgtgaaatatatactgatcataagagtttgaaatacatcttcactcagtccgacctgaatcttcggcaaaggagatggttagaactcatcaaggattatgatgtgggaattcactatcatcctggtaaggccaacgtggtcgccgacgctctaagtcgagaaagccattgcaacactcttaacgttcgtggcattccacccgaacttagtcaacagatggaagccctgaacctaagcatagttggtcgcggattcttggctgcgttggaagccaagcctaccttgctcgatcaaatccgcgaggctcagaagaacgatccggacatgcatggactcctcaagaatatgaaacagggtaaagccgctggtttcacagaggatgaacacggaaccctatggaacggaaatcgagtatgcgttccagataacagagaacttaaacagctgatacttcaggaagctcacgaaagtccttattccatccaccctggcagtacgaagatgtacttagacttgaaggagaaatactggtgggttagtatgaagcgggaaattgcagagttcgtggccctttgtgatgtgtgccagcgtgtcaaggcagagcaccaacgaccggccggacttctccaacctctccaagtacctgaatggaaatgggatgaaattgggatggatttcatcaccggacttccaaagacccaaggtggatatgattctatatgggtagttgtggatcgattaaccaaggtagctcgattcattcctgtgaagaccacctatggagggaacaaactagccgagctctacttcgctaggatcgtgagtctccatggcgttcccaagaaaatcgtatctgacaggggaagccaattcacctctcacttttggaagaagctccaagaagagctgggtacccgattaaacttcagcaccgcataccacccgcagacagatgggcagaccgagcgtctgaatcagatcctagaagatatgcttcgcgcatgtgtcctggatttcgggaagacctgggataagagtctcccctatgccgagttctcctacaataacagctatcaagccagcatacaaatggcaccttatgaagcgttgtatgggcgcaaatgccggacaccgctcttgtgggatcaagttggggaaagccaagtgttcgggactgatatcctgagagaagctgaagctaaagtcagaaccattcgagataatctaaaggtggcacagtcccggtttcggacaaaagggaagctcgcacctcggtatgtgggtcctttccgtatcgttgcccgacgcggagaagtcgcttaccaattggagctgcccgcctccttgggcaacgtgcatgatgtgttccatgtgtcgcaactcaagaaatgccttcgagtgccatccgagcagactgacccagagcaaattgaagttcgcgaagacttgacctacgtggagaggccagtgaaaatcctggacaccatggagcgcaggaccaggaaccgggtaatccgtttttgcaaggtccagtggagcaaccacgccgaagaagaagctacctgggagcgtgaagacgagctgaaggcagcccatcctgatctcttcgccagttcttccgaatctcggggtcgagattccgtttaa

SEQ ID NO: 14121 - DNA, 5070 bp, Oryza sativa
  unsure (1)..(5070): unsure at all n locations
  Clone ID: TFbOSC15723j.C1.o1.fg
atgccctccctaggccaaataaggcttacacancttcggcccggtattcaagttgtcatgcacaagggcgggtgtcttgtgctaggggctcagtcctgcctgcctgtccggggggttccggccgtaggtggaattgagtcggtactcttgtctatggctaggatgggttggaaactatgtcacgtcttccgtctgtacaccgtggtgatggccggcagcgtcagccgtcgtggtctggacatgactggtttcgtcttggagctgcggggcatgtgcgttgtcctggggtatccacatggagtggactaccagggcaggccgcttccggagcaggagggtgacgatgcagagccccacgctgcttgggaggttactgcagtgatcctcactggctctcccgagcggacttcgttggcagtcaccgcgggtggagattctttccccgccgcttgccagaacgccgctctcctcgccatcggcactcttcaccagcgctacccggacgagttgcagcactcgccctaccgctaccaccctcgccgcggaggagcccgcgactacgccatcttccgggatgctagctcggaggatgacgctaccatcatgcacctggcgcgcatggtggaggcgtacgacgcggctcgtatcgacttccatcagatggtgcgccgtgggatggtcgggaacaacatgaagatcctggagctgcgtcaggagaatctgcagctgaagaaggacctagacgcagtagaggcgcagctgcatcagctcaagatcgcccagggagagatggtgaagaccaggagaaatgctgccaccggtgatggcaaccaacccgaaggcagcaaccacaaccaccagggcagcccacctccacctccttctccgcctccaccaccaccaccagacaccaacgccattctcacccaaatcctcgcccagcaggccaacatgatgactgctttcctccaccacctccaaaatccgccacaacagaatgcaccaccaccacccccacaacactctaaactcgccgagttcctccgcatccgtccacctaccttctctagctccaacaaccccgtggatgcgttggattggttgcatgccgtggggaaaaagctagacactgtgcagtgcagcgatgaggagaaagtcatcttcgccgcccaccagctgcaggggcccgcatctttatggacccatgtgcccgccggagtcgtggcccttaagaaaagggaattccgagagttgaagcaaggcaaccgctctgtgatggagtatttgcatgagttgaacaacctggcccggtacgccccggaggatgtacgggaagatgaggaaaagcaggagaagttcttggcaggaatggaccctgagctgtccgtgcgcctagtctccggggactatccggatttccaacgtctgatggacaagagcatccgcttggaagccaagcacaaggaactggagtcgcacaagcgccgcttggcgaatttccgcaatcaacagggtgctaaccaaagggtccgctacaccaatccctatccagggggatcctcctcgcagcagcaacaacagcagcagcaacctcgctccgcgccccgacctcaattcgtgcctggtcaaggccgcagggacgctcaaggtccgcagcgtctgtgcttcaactgcttcgagcccgggcactttgcggataaatgcccaaagccgaggcgccagcaaggccaagcgcctccccgctccaacaacggtggtaaggatgtcattcggggtcgtgtgaaccacgtgacggccgaggacgtgctgacaactccagacgtcatcgttggtacgttcctcattcattccatccctgctaccattttgttcgactctggagcttcccactcgtttatatttgtgccattcgtggggagaaaacagttgggggtagaaaggcttaggaaccctctgctcatcaccacccctggaggggttatgacagcaaagtattatagccatgccgtccctatagaaattcaggggattccttttccctcggatctgattcttctagacaccaagaacttggatgtgatccttaggatgaattggttggctcaattccaaggagtagtggattgcgcgagacgcactgtcactctgtaccgagggccggaacaaccggttgttttctttgcacccccaacctctgtcagtagttcagaacttcatcagataggactgtcagaaatccccatcgtcagagagttcggagacgtgtttccggaagaactacccggtatgccgcccaagcgagagattgagttccggatagatcttgctccaggaaccactcctttgtacaagcgaccctaccgtatggcagcaaatgaactggccgaaaagaaagacaagatgaagaggatgtgcgttgactacagagctctcaatgaagtcaccatcaaaaacaagtaccctcttccccgtatcgatgatatgttcgatcagcttaaaggtgccactgtattctccaagattgatcttcgttccggatatcaccaattacgtattcgtgaagaagacattcctaagaccgcattcaccacgcgatacggactgtatgaattcacagtgatgtcgttcggtttaaccaatgcacctgccttcttcatgaacttaatgaacaaagtgttcatggaatacttggataagtttgtggtggttttcattgatgacattctgatatactcacaatccgaggaagaccatcagcaccatctccgtctggtgttgggaaagttgcgggaacatcaattgtatgccaaacttagcaagtgtgagttctggttgtccgaagtcaaattcttaggacacgtgatatctgctaaaggagttgcggtggaccccgaaacagtgaccgccgtcactgattggaagcaacccaagacagtcactcaagttcgcagtttcttaggtttggcaggatactaccggaggtttatcgagaacttctccaaaatcgctcgacccatgacacagttgttgaagaaagaagagaaatttgtgtggagcccgcaatgcgagaaggcgttccaaactctcaaagaaaagctggtttcctcgccggtgttaatcttgccggatactcgcaaggacttcatggtgtattgtgacgcttcgcgccaaggattggggtgcgtgctcatgcaggacggtcatgtggtggcctatgcctcacgccagctacggcctcatgaaggcaactaccctacccatgatctggaattagccgcggtggttcatgctctaaaaatctggcggcactatctcattgggaatcgctgtgaaatatatactgatcataagagtttgaaatacatcttcacccagtcggatctgaatcttcggcagaggagatggttagaactcatcaaggattatgacgtgggaattcactatcatcctggtaaggccaacgtggttgccgacgctctaagtcgaaaaagccattgcaacactcttgacgtccgtggcattccacccgaacttaaccaacagatggaagccctgaacctaagcatagttggtcgtggattcttggctacgctggaagccaagcccaccttgctcgatcaaatccgcgaggctcagaagaacgacccggacatgcgtggactcctcaagaatatgaaacagggtaaagccgctggtttcacagaggatgaacacggaaccctatggaacggaaatcgggtatgcgttccagatgacagagaacttaaacagctgatacttcaggaagctcacgaaagtccttattccatccaccctggcagtacgaagatgtacttagacttgaaggagaaatactggtgggttagtatgaagcgggaaattgcagagttcgtggccctttgtgatgtgtgccagcgtgtcaaggcagagcaccaacgaccggccggacttctccaacctctccaagtaccagaatggaaatgggatgaaattgggatggatttcatcaccggacttccaaaaacccaaggtggatatgattctatatgggtagttgtggatcgattaaccaaggtagctcggtttattcctgtgaagaccacctatggagggaacaaactagccgagctttacttcgctaggatcgtgagtctccatggcgttcccaagaaaatcgtatctgataggggaagccaattcacctctcacttttggaagaagctccaagaagagttgggtacccgattaaatttcagcaccgcgtatcacccgcagacagatggacagaccgagcgtctaaatcagatcctagaagatatgcttcgcgcatgtgtcctagatttcgggaagacctgggataagagtctcccctatgccgagttctcctacaataacagctaccaacccagtatacaaatggcaccttatgaagcgttgtatgggcgcaaatgccggacaccgctattgtgggaccgagttggggaaagccaagtgttcgggactgatatcctgagagaagctgaagcgaaggtcagaaccattcgggataatctaaaggtggcacagtcccggcagaaaagttatgcagataaccgtcgccgtaacctggaattcgcagtggacgattttgtgtaccttcgggtcacgccattgcggggtgtgcacaggtttcagacaaaggggaagctcgcacctcggtatgtgggtcctttccgtatcattgctcggtgcggagaagtcgcttaccagttggagctgcccgcctccttgggcaacgtgcacgatgtgttccatgtgtcgcaactcaagaaatgtcttcgagtgccatccgagcaggccgactcagagcaaattgaagttcgcgaagacttgacctacgtggagaggccagtgaaaatcctggacacaatggaacgcaggaccaggaaccgggtaatccatttttgcaaggtccagtggagcaaccacgccgaggaagaagctacttgggagcgtgaagacgagctgaaggcagcccatcccgatctcttcgctagttcttccgaatctcggggtcgagattccgtttaa

SEQ ID NO: 14122 - DNA, 2685 bp, Oryza sativa
  Clone ID: TFbOSC15765j.C1.o1.fg
atggccggcagcgtcagccgtcgtggcttggacatgactggtttcgtcttggagctgcggggcatgtgcgttgtcctggggtatccgcatggagtggactaccaggccaggccgcttccggatcaggagggtgacgatgcagagccccacgctgcgtgggagcactcgccctaccgctaccaccctcgccgtggaggagcccgcgactacgccaccttccgggatgctagctcggaggatgacgctaccatcgtgcacctggcgcgcatggtggaggcgtacgacgcggctcgtatcgacttccatcagatggtgcgccgtgggatggtcgagaacaacttgaagatcctggagctgcatcaggagaacctgcagctcaagaaggacctagacgcagtggaggcgcagctgcatcagctcaagatcgcccagggagaggtctgccgccccaagcgccaccgcgtctaccgcagccagaagatcaccgcccgcaaaagcacctccaggcccgagcttgttcgtcagtccctggcgtggacctgcttcgtggagacccctcgtgccgagcccgcgcccgtggttccccaggagggggaagcctccggcgttggtagcacggaggatgcgctgttgctcaccttccgtcctggcccgtcgcagcggagaagtgctaataccggtgatggcaaccaacctgaaggcagcaaccacaaccaccagggcagcccacctccacctcctcctccgcctccaccaccaccaccagataccaacgccattctcacccaaatcctcgcccagcaggccaacatgatgactgctttcctccaccacctccaaaatccgccacaacagaatgctccaccaccacccccacaacactctaaactcgccgagttcctccgcatccgcccacctaccttctctagctccaacaaccccgtggatgcgttggattggttgcatgccgtggggaaaaagctagacactgtgcagtgcagcgatgaggagaaagtcatcttcgccgcccaccagctgcaggggcccgcatctctatggtgggaccatttccaggctacgcagccagaggggcagcctattacttgggcccgtttcaccgccgctttccggaggacccatgtgcctgccggagtcatggcccttaagaaaagggaattccgggagttgaagcaaggcaaccgctctgtgatggagtatttgcatgagttcaacaacctggcccgttacgccccggaggatgtgcgggaagatgaggagaagcaagagaagttcttggcaggaatggaccctgagctgtccgtccgtctagtctccggggactatccggatttccaacgtctggtggacaagagcatccgcttggaagccaagcacaaggaactggagtcgcacaagcgccgcttggcgaatttccgcaatcaacaggatgctaaccaaagggtccgctacaccaatccctatccagggggatcctcctcgcagcagcaacaacagcagcagcaacctcgctccgcgcctcgacctcaattcgtggtgcgcgtcccacagccgcagcagcagcagaatcaacaagggactcgtgcgccccgtcctcctacgccaactgtgcagcctggtcaaggccgcagggacgctcaaggtccgcagcgtctgtgcttcaactgcttcgagcccgggcactttgcggataaatgcccgaagccgaggcgccagcaaggccaagcgcctccccgctccaacaatggtggtaaggatgttattcggggtcgtgtgaaccatgtgacggccgaggacgtgctgacaactccagacgtcatcgttgggcacgtgatatctgctaaagaagttgctgtggaccccgaaacagtgaccgccgtcactgattggaagcaacccaagaccgtcactcaaattcgcagtttcttaggtttggcaggatactaccggagcgtgtcaaggcagagcaccaacgaccggccggacttctccaacctctccaagtaccagaatggaaatgggatgaaattgggatggatttcatcaccggacttccaaaaacccaaggtagctcgatttattcctgtgaagaccacctatggagggaacaaactagccgagctctacttcgctaggatcctccggtccgccgccgtcgtcaccccggaccgcctcccacctcggggccggctccttcggcttcgccgcatcctcgccgacctcgtccacctctccgtttcggtcgccgaccgccggagcgccgccgcccccgtctacccgagccgcgccgccaccttcctccgctccggtcgccgttcccgtcgtcgccgtcgacccggggtgagccgtggaccgccgtttcacttcccccttccctcccctctctcgggcgccgctccgccgcgccggtggtcgccggcggcgaccatcagggcgcgggtgcgccgcctcccgtcggctgtgccggcgtggccgccttcgggcgcgccccgcggctgccatgtggggcccggccgtcagccgcccgcgccctcgggtgcggctgacgcgtgggacccacggcgccggccggcgcaagccgcgtgcacccggtccaccgtggaccgtgaggctgccgcgtgggccccactcccgtggacccggtccgcgcgcccctccctcggctga

SEQ ID NO: 14123 - DNA, 4907 bp, Oryza sativa
  Clone ID: TFbOSC15868j.C1.o2.np
atggcggccggatcttccgcgcccgtttccccctcgtccggccgccctctcccactcccaaccctatataaaccttccccgtgcctccctccaccgtttccgccactcgccgctctctctccccgccggaatcgagctcgcgccatcgctctctctctccgccgtcgccgccgagctccggtccgccgccgtcgtcgccccggaccttctcccgcttcggcgtcaccttcttcgggttcgccgcaacctcgccgacctcgtccacctctccgtttcggtcgccgaccgccggaacgccgccgtccccgtcgacccgagccgcgccgccgcctctatccgctccggtcgccgttcccgtcgtcgccgtcgacccggggtgagccgtggatcgccgattcgtttcccccttccctcccctctctcgggcaccgctccgccgcgccggtggtcgccggcggcgaccatcggggcacgagtgcgccgcctcccgtcggctgtgccggcgtggccgccttcgggcgcgccccgcggctgccgcgtggggcccggccgtcagccgcccgcgccctcgggtgcggctgacgcgtgggacccacggcgccggtcggtgcgagcccgggtgcacccggtccaccgtggacccaccttggccatataaggaccggtcttcgggcctctgttgcaaagcactaccgtacttccacatgtctagtgggacaaatgaaggctacacgagctacggcccggtagtcgagatgtcatggcacagggccggtgtcctgctgctaggggctcagtcctgcctgcctgtcccggaggttccggccgtaggtgggattgggtcgatgtacacctctgatcagagtataatctattcgaatagccgcgccctcggttatgggcaagccgagcaatgtacccaaatggccggcagcatcagccgtcgtggtctggacctgactggtttcgtcttggagctgcggggcatgtgcgttgtcctggggtatccacatggagtggactaccagggcaggccgcttccggagcaggagggtgacgatgcagagccccacgctgcttgggaggttactgcagtgatcctcactggctctcccgagcggacttcgttggcagtcaccgcgggtggagattctttccccgccgcttgccagaacgccgctctcctcgccatcggcactcttcaccagcgctacccggacgagttgcagcactcgccctaccgctaccaccctcgccgcggaggagcccgcgacttcgccaccttccgggatgctagctcggaggatgacgctaccatcatgcacctggcgcgcatggtggaggcgtacgacgcggctcgtatcgacttccatcagatggtgcgccgtgggatggtcgagaacaacatgaagatcctggagctgcgtcaagagaatctgcagctgaagaaggaactagacgcagtggaggcgcagctgcatcagctcaagatcgcccagggagaggtctgtcgccccaagcgtcgccgcgtctgccgcagccagaagatcaccgcccgcaagagcacctccaggcccgagcttgttcgtcagtccctggcgtggacttgcttcgtcgagacccctcgtgccgagcccgcgcccgtggttcctcaggagggggaagcctccggcgttggtagcacggaggatgcgctgttgctcaccttccatggtgacgaccaggagaagtgctaataccggtgatggcaaccaacccgaaggcagcaaccacaacaaccatggcagtccacctccacctcctcctccgcctccaccaccaccaccagacaccaacgctattctcacccaaatcctcgcccagcaggccaacatgatgactgctttcctccaccacctccaaaatccgccacaacagaatgctcctccaccacccccacaacactgtaaactcgccgagttcctccgcatccgtccaccaaccttctctagctccaataaccccgtggatgcgttggattggttgcatgccgtggggaaaaagctagacactgtgcagtgcagcgatgaggagaaagtcatcttcgccgcccaccagctgcaggggcccgcatctctatggtgggaccatttccaggctacgcagccagaggggcagcctattacttgggctcgcttcaccgccgctttccggagaacccatgtgcccgccggagtcgtggcccttaagaaaagggaattccgagagttgaagcaaggcaaccgctccgtgatggagtatttgcatgagttcaacaacctggcccgttacgccctggaggatgtgcgggaagatgaggaaaagcaggagaagttcttggcaggaatggaccctgagctgtccgtccgtctagtctccggtgactatccggatttccaacgtctggtggacaagagcatccgcttggaagccaagcacaaggaactggagtcgcacaagcgccgcttggcgaatgtccgcaatcaacagggtgctaaccaaagggtccgctacaccaatccctatccagggggatcgtcctcgcagcagcaacagcagcaacaacctcgctccgcgccccgacctcaattcgtggtgcgcgtcccacagccgcagcaacagcagagccagcaagggacccgtgtgccccgtcctcctacgccagctgcgcagtctggtcaaggccgcagggacgcttcaggtccgcagcgtctgtgcttcaactgcttcgagcccgggcactttgcggataaatgcccgaagccgaggcgccagcaaggccaagcgcctccccgctccaacaacggtggtaaggatgtcattcggggtcgtgtgaaccacgtgacggccgaggacgtgctgacaactccagacgtcatcgttggtacgttcctcattcattccatccctgctaccattttgttcgactctggagcttcccactcgtttatatctgtgccattcgtggggagaaatcagttgggggtagaaaggcttaggaaccctctgctcatcaccacccctggaggggttatgacagcaaagtattatagtcctgccgtccctatagaaattcaggggattccttttccctcggatctgattctgctagacaccaagaacttggatgtgatccttgggatgaattggatggctcaattccaaggagtagtggattgcgcgagacgcactgtcactctgtaccgagggccggaacaatcggttgttttctttgcacccccaacctctgtcagtagttcagaacttcatcagataggactgtcagaaatccccatcgtcagggagttcggagatgtgtttccggaagaactacccggtatgccgcccaagcgagagattgagttccggatagatcttgctccaggaaccactcctctgtacaaacgaccctaccgtatggcagcaaatgaattggccgaagtcaagaaacagttggaagagttgaaagaaaaggggtatatacgtccgagtacttccccctagggtgctcctgtgatttttgtggagaagaaagacaagacgaagaggatgtgcgttgactacagagctctcaatgaagtcaccatcaaaaacaagtaccctcttccccggatcgatgatctgttcgatcagcttaaaggtgccactgtattctccaagattgatcttcgttccggatatcaccaattacgtattcgtgaagaagatattcctaagaccgcattcaccacgcgatacggactgtatgaattcacggtgatgtcgttcggtttaaccaatgcacctgccttcttcatgaacttaatgaacaaagtgttcatggaatacttggataagtttgttgtggtgttcattgatgacattctggtgtactcacaatcagaggaagaccatcagcaccatctccgtctggtgttgggaaagttgcgggaacatcaattgtatgccaaacttagcaagtgtgagttctggttgtccgaagtcaaattcttagggcacgtgatatctgctaaaggagttgctgtggaccccgaaacagtgaccgccgtcaccgattggaagcaacccaagacagtcactcaagtccgcagtttcttaggttttgcaggatactaccggaggttcatcgagaacttctccaaaatcgctcgacccatgacacagttgttgaagaaagaagagaaatttgtgtggagcccgcaatgcgagaaggcgtttcaaactctcaaagaaaagctggtttcctcgccggtgttaaccttgccagatactcgcaaggatttcatggtgtattgtgatgcttcgcgccaaggattggggtgcgtgcttatgcaggatggtcatgtggtggcctatgcctcacgccagctacggcctcatgaaggcaactaccctacccatgatttggagttagccgcggtggttcatgctctaaaaatctggcggcactatctcattgggaatcgcagtgaaatatatactgatcataagagtttgaaatacatcttcacccagtcggatctgaatcttcggcagaggagatggttagaactcatcaaggattatgatgtgggaattcactaccatcctggtaaggccaacgtggtcgccgacgctctaagtcgaaagagccattgcaacactcttaacgtccgtggcattccacccgaacttaaccaacagatggaagccctgaatctaagcatagtgggtcgtggattcttggttgcgttggaagccaagcccaccttgctcgatcaaatccgcgaggctcagtgtcgcgaccgggaaaattgccttttcccgaacgccagtaacggctcgacggagggacgaacgccacgacgaccgggaacgacgagaggacgacgacgacgacgacgaccggg

SEQ ID NO: 14124 - DNA, 2110 bp, Oryza sativa
  Clone ID: TFbOSC16514j.C1.o1.fg
tgatcctcgctggctctcccgagcggacttcgctggcagtcaccgcgggtggagattctttccccgccgcttgcaaaacgccgcttttctcgccatcggcactcttcaccagcgctacccggacgagttgcagcactcgccctaccgctaccaccctcgtcgcggaggagcccgcgactacgccaccttccgggatgctagctcggaggatgacgctaccatcatgcacctggcgcgcatggtggaggcgtacgacgcggctcgtatcgacttccatcagatggtgcgccgtgggatggtcgagaacaacatgaagatcctggagctgcgtcaggagaacctgcagctcaagaaggacctagacgcggtggaggcgcagctgcatcagctcaagatcgcccagggagaggtctgccgccccaagcgtcgccgcgtctgccgcagccagaagatcaccgcccgcaagagcacctccaggcccgagcttgttcgtcagtccctggcgtggacttgcttcgtcgagacccctcgtgccgagcccgcgcccgtggttcctcaggagggggaagcctccggcgttggtagcacggaggatgcgctgttgctcaccttccgtcctggcccgtcgcagcggagaagtgctgccaccggtgatggcaaccaacctgaaggcagcaaccaccaccagggcagcccacctccacctcctcctccgcctccaccaccaccgccagataccaacgccattctcacccaaatcctcgcccagcaggccaacatgatgactgctttcctccaccacctccaaaatccgccacaacataatgctccaccaccacctccccaacactctaaactcgccgagttcctccgcatccgcccacctaccttctctagctccaacaaccccgtggatgcgttggattggttgcatgccgtgggaaaaaagctagacactgtgcagtgcagcgatgaggagaaagtcatcttcgccgcccaccagctgcaggggcccgcatctctatggtgggaccatttccaggctacgcagccagaggggcagcctattacttgggcccgtttcaccgccgctttccggaggacccatgtgcccgccggagtcgtggcccttaagaaaagagaattccgagagttgaagcaaggcaaccgctccgtgatggagtatttgcatgagttcaacaacctggcccgttacgccccggaggatgtgcgggaagatgaggagaagcaagagaagttcttggcaggaatggaccctgagctgtccgtccgtctagtctccggggactatctggatttccaacgtctggtggacaaaagcatccgcttggaagccaagcacaaggaactggagtcgcacaagcgccgcttggcgaatttccgcaatcaacagggtgctaaccaaagggtccgctacaccaatccctatccagggggatcctcctcgcagcagcaacaacagcagcagcaacctcgctccgcgcctcgacctcaattcgtggtgcgcgtcccacagccgcagcagcagcagaatcaacaagggactcgtgcgccccgtcctcctacgccaactgtgcagcctggtcaaggccgcagggacgctcaaggtccgcagcgtctgtgcttcaactgcttcgagcccgggcactttgcggataaatgcccaaagccgaggcgtcagcaaggccaagcgcctccccgctccaacaacggtgggaaggatgtcattcggggtcgggtgaaccacgtgacggccgaggacgtgctgacaactccagacgtcatcgttggtacgttcctcattcattccatccctgctaccattctgttcgactctggagcttcccactcgtttatgtctgtgccattcgtggggagaaatcagttgggggtagaaaggcttaggaaccctctgctcatcaccacccctggaggggttatgacagcaaacgtgtcaaggcagagcaccaacgaccggccggacttctccaacctctccaagtaccagaatggaaatgggatgaaattgggatggatttcatcaccggacttccaaaaacccaaggttgatatgattctatatgggtag

SEQ ID NO: 14125 - DNA, 1174 bp, Oryza sativa
  Clone ID: TFbOSC16518j.C1.o1.fg
atggtgacgaccaggagaaatgttaacaccggggaaggcaaccaacccgagggcagcaaccccaacccccaagggaatccacctccaccaccaccaccagacaccaacgccattctcacccagatcctcgcccaacaagccaacatgatgaatactttcctccaccacctccaaaacccgccacaacagaatgctccaccaccaccaccccaacactctaaactcgccgagttcctccgcatccgcccacctaccttctctagctccaacaaccccgtggatgcgttggattggttgcatgccgtggggaagaagctggacactgtgcagtgcagtgatgaagagaaagtcatcttcgccgctcaccagctgcaggggcccgcatctctatggtgggaccacttccaggctacgcagccagaggggcaaccgattacttgggctcgcttcaccgccgctttccggagaacccatgtgcccgctggagtcgtggctcttaagaaaagggaattccgggagttgaagcaaggcaaccgctccgtgatggagtatttgcacgagttcaacaatctggcccgttatgccccggaggatgtgcgggaagatgaggagaagcaagagaagttcttggcaggaatggaccctgagctgtctgttcgtctagtctctggagactatccggatttccaacgtctggtggacaagagcatccgcttggaagccaagcacaaggagctggaatcgcacaagcgccgcttggcgaatttccgcaatcaacagggtgctaaccagagggtccgctacaccaatccctacccagggggatcctcctcgcaacagcagcagcagcagcaacctcgcccagcgcctcgacctcaattcgtggtgcgcgtcccacagccgcagcagcagcagaatcagcaagggactcgtgcaccccgtcctcctacgccaactgtgcagcccgttcaaggccgcagggacgcttcaggtccgcagcggctgtgcttcaactgcttcgagcccgggcactttgcggataaatgcccaaagccaaggcgtcagcaaggccaagcgcctccccgctccaacaacggcgggaaggatgtcattcggggccgtgtgaaccacgtgacggccgaggacgtgctgacgactccagacgtcatcgttg

SEQ ID NO: 14126 - DNA, 2274 bp, Oryza sativa
  Clone ID: TFbOSC1667j.C1.o1.fg
atgtcatggcacagggccggtgtcctgctgctaggggctcagtcctgcctgcctgtcccgggggttccggccatggccggcagcgtcagccgtcgtggtctggacatgactggtttcgtcttggagctgcggggcatgtgcgttgtcctggggtatccgcatggagtggactaccagggcaggccgctcccggagcaggagggtgacgatgcagagccccatgctgcttgggaggttactgcagtgatcctcactggctctcccgagcggacttcgttggcagtcaccgcgggtggagattctttccccgccgcttgccagagcgccgctctcctcgccatcggcactcttcaccagggctacccggacgagttgcagcactcgccctaccgctaccaccctcgtcgcggaggagcccgcgacttcgccaccttccgggatgctagctcggaggatgacgctaccatcatgcacctggcgcgcatggtggaggcgtacgatgcggctcgtatcgacttccatcagatggtgcgtcgtgggatggtcgagaacaacatgaagatcctggagctgcgtcaggagaatctgcagctgaagaaggacctagacgcagtggaggcgcagctgcatcagctcaagatcacccagggagaggtctgtcgccccaagtgtcgccgcgtctgccgcagccagaagatcaccgcccgcaagagcacctccaggcccgagcttgttcgtcagtccctggcgtggacttgcttcgtggagacccctcgtgccgagcctgcgcccgtggttccccaggagggggaagcctccggcgttggtagcatggaggatgcgctgttgctcaccttccgtcctggcccgtcgcagcggagaagtgctgccaccggtgagggcaaccaatctgaaggcagcaaccacaaccaccagggcagcccacctccacctcctcctccgcctccaccaccaccaccagacaccaacgccattctcactcaaatcctcgcccagcaggccaacatgatgactgctttcctccaccacctccaaaatccgccacaacagaatgctccaccaccacccccacaacactctaaactcgccgagttcctccgcatccgtccacctaccttctctagctccaacaaccccgtggatgcgttggattggttgcatgccgtggggaaaaagctagacactgtgcagtgcagcgatgaggagaaagtcatcttcgccgcccaccagctgcaggggcccgcatctctatggtgggaccatttccaggctacgcagccagaggggcagcctattacttgggcccgcttcaccgctgctttccggagaacccatgtgcccgccggagtcgtggcccttaagaaaagggaattccgagagttgaagcaaggcaaccgctctgtgatggagtatttgcatgagttcaacaacctggcccggtacgccccggaggatgtacgggaagatgaggaaaagcaggagaagttcttggcgggaatggatcctgagctgtccgtccgtctagtctccggggactatccggatttccaacgtctggtggacaagagcatccgcttggaagacaagcacaaggaactggagtcacacaagcgccgcttggcgaatttccgcaaccaacagggtgctaaccaaagggtccgctacaccaatccctatccagggggatcctcctcgcagcaggaacaacagcagcagcaaccacgctccgcgcctcgacctcaattcgtggtgcgcgtcccacagccgcagcagcagcagagtcaacaagggactcgtgcgccccgtcctcctatgccaactgtgcagcctggtcaaagccgcagggacgctcaaggtccgcagcgtctgtgcttcaactgcttcgagccggggcactttgcggataaatgcccaaagctgaggcgtcagcaaggccaagcgcctccccgctccaacaacggtggtaaggatgtcattcggggtcgtgtgaaccacgtgacagccgaggacgtgctgacaactccagacgtcatcgttgtcggacctgaatcttcggcaaaggagatggttagaactcatcaaggattacgatgtgggaattcactatcatcctgcgtgtcaaggcagagcaccaacgaccggccggacttctccaacctctccaagtaccagaatggaaatgggatgaaattgggatggatttcatcaccggacttccaaaaacccaaggtggatatgattctatatgggtag

SEQ ID NO: 14127 - DNA, 5315 bp, Oryza sativa
  unsure (1)..(5315): unsure at all n locations
  Clone ID: TFbOSC16834j.C1.o1.np
gtggatgaagtcgggggtcgatggacattctccagggcaaatgaaggctacacgagctgcggcccggtagtcgagatgtcatggcacagggccggtgtcctgctgctaggggctcagtcctgcctgcctgtcccgggggttccggccgtagatgggattgggtcgatgtacacctctgatcagagtaaaatctattcgaatagccgcgccctcggttatgggcaagccgagcaatgtacccaaatggccggcagcgtcagccgtcgtggtttggacatgactggcttcgtcttggagctgcggggcatgtgcgtggtcctggggtatccacatggagtggactaccaggccaggccatttccggagcaggagggtgacgatgcagagccccacgctgcttgggaggtcactgcagtgatcctcgctggctctcccgagcggacttcgctgacagtcaccgcgggtggggactccttccccgccgcttgccagagcgccgctctcctcgccatcggcactcttcaccagcgctacccggacgagttgcagcactcgccctaccgctaccaccctcgtcgcggaggagcccgcgactacgccaccttccgggacgctagctcggaggatgacgctaccatcgtgcacctggcgcgcatggtggaggcgtacgacgcggctcgtatcgacttccatcagatggtgcgtcgtgggatggtcgagaacaacatgaagatcctggagctgcgtcaggagaacctgcagctcaagaaggacctagacgcggtggaggcgcagctgcatcagctcaagatcgcccagggagaggtctgccgccccaagcgccgccgtgtctgccgcagccagaagatcaccgcccgcaagagcacctccaggcccgagcttgttcgtcagtccctggcgtggacttgcttcgtggagacccctcgtgccgagcccgcgcccgtggttccccaggagggggaagcctccggcgttggtagcacggaggatgcgctgttgctcaccttccgtcctggcccgtcgcagcagtagacgagcagttagtaggcttgcgcgtgtgttctaccaggagaaatgctggcaccagtgatggcaaccaacccgaaggcagcaaccacaacaaccatggcagcccaccttcacctnctnctncgccttcaccaccaccaccagataccaatgccattctcacccaaatcctcgcccagcaggccaacatgatgactgcttttctccaccacctccaaaatccgccacaacataatgctccaccaccacctccccaacactctaaactcgccgagttcctccgcatctgtccacctaccttctctagctccaacaaccccgtggatgcgttggattggttgcatgccgtggggaaaaagctagacactgtgcagtgcagcgatgaggagaaagtcatcttcgccgcccaccagctgcagggacccgcatctctatggtgggaccatttccaggctacgcagccagagggacagcctattacatgggctcgcttcacccccgctttccgaagaacccatgtgcccgccggagtcgtggcccttaagaaaagggaattccgagagttgaagcaaggcaaccgctccgtgatggagtatttgcacgagttcaacaacctggcccgttacgctccggaggatgtgcgggaagatgaggagaagcaagagaagttcctggcaggaatggaccctgagctgtccgtctgtctagtctccggggattatccggatttccaacgtctggtggacaagagcatccgcttggaagccaagcacaaggaactggagtcgcacaagcgccgcttggcgaatttccacaaccaacagggtgctaaccaaagggtccgctacaccaatccctatccagggggatcctcctcgcagcagcaacagcagcagcagcaacctcgctccgcgcctcgacctcaattcgtggtgcgcgtcccacagccgcagcaggagcagaatcaacaagggactcgtgcgccccgtcctcctccaccgactgtgcagcctggtcaaggccgcagggacgctcaaggtccgcagcgtctgtgcttcaactgcttcgagcccgggcactttgcggataaatgcccgaagccaaggcgtcagcaaggccaagcgcctccccgccccaacaacggtggtaaggacgtcattcggggtcgtgtgaaccatgtgacggccgaggacgtgctgacaactccagacgtcatcgttggtacgttcctcattcattccatccctgctaccattttgttcgactctggagcttcccactcatttatatctgtgccattcgtggggagaaatcagttgggggtagaaaggcttagaaaccctctgctcatcaccacccctggaggggttatgacagcaaagtattatagccctgccgtccctatagaaattcaggggattccttttccctcggatctgattctgctaggcaccaagaacttggatgtgatccttgggatgaattggttggctcaattccaaggagtagtggattgcgcgagacgcactgtcactctgtaccgagggccgggacaaccggttgttttctttgcacccccaacctctgtcagtagttcagaactgcatcagataggtctgtcagaaatccccatagtcagagagttcggagacgtgtttccggaagaactacctggtatgccgcccaagcgagagattgagttccagatagatcttgctccaggaaccactcctctgtgcaagcgaccctaccgtatggcagcaaatgaactggccgaagtcaagaaacagctggaagagttgaaagaaaaggggtacatacgtccgagcacttccccctggggtgctcctgtgatttttgtggagaagaaagacaagacgaagaggatgtgcgttgactatagagctctcaatgaagtcaccataaaaaacaagtaccctcttccccggatcgatgatctgttcgatcagcttaaaggtgccactgtattttccaagattgatcttcgttccggatatcaccaactgcgtattcgtgatgaagatattccgaagaccgcattcaccacgcgatacggactgtatgaattcacggtgatgtcattcggtttaaccaatgcacccgccttcttcatgaacttaatgaacaaagtgttcatggaatacttggataaatttgttgtggttttcattgatgacattctgatatactcacaatcagaggaagaccatcagcaccatctccgtctggtattgggaaagctgcgggaacatcaattgtatgccaaacttagcaagtgtgagttctggttgtccgaagtcaaattcttagggcacgtgatatctgctaaaggagttgctgtggaccccgaaacagtgatcgccgtcaccgattggaagcaacccaagacagtcactcaagttcgcagtttcttaggtttggcaggatactaccgaaggttcatcgagaacttctccaaaatcgctcgacccatgacacagttgttgaagaaagaagagaaatttgtgtggagcccgcaatgtgagaaggcgttcagaactctcaaagaaaagctggttgcctcgccagtgttaatcttgccggatactcgcaaggacttcatagtgtattgtgacgcttcgcgccaaggattggggtgcgtgctcatgcaggacggtcatgtggtggcctatgcctcacgccagcttcgacctcatgaaggcaactaccctacccatgacttggaattagccgcggtggttcatgctctaaaaatctggcggcactatctcattgggaatcgctgtgaaatatatactgatcataagagtttgaaatacatcttcacccagtcggatctgaatcttcggcaaaggagatggttagaactcatcaaggattatgatgtgggaattcactatcatcctggtaaggccaacgtggtcgccgacgctctaagtcgaaagagccattgcaacactcttaacgtccgtggcattccaccggaacttaatcaacagatggaagccctgaacctaagcatagttagtcgtggattcttggctgcgctggaagccaagcctaccttgctcgatcaaatccgcgaggctcagaagaatgatccggacatgcatgggctcctcaagaatatgaaacagggtaaagccgctggtttcacagaggatgaacacggaaccctatggaacggaaatcgggtatgcgttccagatatcagggaacttaaacagttgatacttcaggaagctcacgaaagtccttattccatccaccctggcagtacgaagatgtacttagacttgaaggagaaatactggtgggttagtatgaagcgggaaattgcagagttcgtggccctttgtgatgtgtgccagcgtgtcaaggcagagcaccaacgaccggccggacttctccaacctctccaagtaccagaatggaaatgggatgaaattgggatggatttcatcaccggacttccaaaaacccaaggtggatatgattctatatgggtagttgtggatcgattaaccaaggtagcacggttcattcccgtaaagaccacctatggagggaacaaactagctgaactctacttcgctaggatcgtaagtctgcatggcgtccccaagaaaatcgtatctgataggggaagccagttcacctctcacttttggaagaagctccaagaagagctgggtacccgattaaacttcagcaccgcgtatcacccgcagacagatgggcagaccgagcgtctaaatcagatcctagaagatatgcttcgcgcatgtgtcctggatttcgggaagacctgggataagagtctcccctatgccgagttctcctacaataacagctaccaagccagcatacaaatggcaccttatgaagcgttgtatggacgcaaatgccggacaccgctattgtgggaccaagttggggaaagccaagtgttcgggactgatatcctgagacaagctgaagcgaaggtcagaaccattcgggataatctaaagatggcacagtcccggcagaaaagttatgcagataaccgtcgccgtgacctggaattcgcagcggatgactttgtgtatgttcgggtcacgccattgcgaggtgtacacaggtttcggacaaaggggaagctcgcacctcggtatgtgggtcctttccgtatcactgctcggcgcggagaagttgtcacgaccggaaataacccaacgggcattccttacgtgcgtgcatta

SEQ ID NO: 14128 - DNA, 4992 bp, Oryza sativa
  Clone ID: TFbOSC16878j.C1.o1.fg
atggccggcagcgttacccgtcgtggtttgagcatgactggcttcgtcttggagctgcgaggcatgtgcgtggtcttggggtatccacatggagtggattaccaggccaggccgctcccggagcaggagggtgaggatgcagagcctcacgctggttgggaggtcactgcagtgattctctccggctctcccgagcggacttcgctggcagtcaccgcgggtggggattccttccccgccgcttgccagaacgccgctctcctcgccatcggcacccttcaccagcgctacccggacgagttgcagcactcgccctaccgctaccacccccgtcgcggaggagccagcgaccacgccaccttccgagacgctagctcggaggatgacgctaccgtcgtgcatctggcacgcatggtggaggcgtacgacgcggctcgtatcgacttccaccagatggtgcgtcgtggcatggtggagaacaacatgaagatcctggagctgcgtcaggagaacctgcagctcaagaaggacctcgacgcgttggaggcgcagccgcaccagctcaaggtcgcccagggagagatcagccgtcccaagcgtcgccgcgtctgccgcagccagaagatcaccgcccgcaagagcacctccaggcccgagcttgtccgtcagtccctggcgtggacttgcttcgtcgagacccctcgtgccgagcctgcgcccgtggttccccaggagggggaagcctccggcgttggtagctcggagggtgcgctgttgctcaccttccgtcctggcccgtcgcagcggcaaccacccgagggcagcaaccccaacccccaaggcaatccacctccaccaccaccaccagacaccaacgccattctcacccagatcctcgcccagcaagccaacatgatgaatgctttcctccaccacctccaaaatccaccacaacagaatgctccaccacctcctccccaacactccaaactcgccgaattcctccgcatccgcccacccaccttctctagctccaacaatcctgtagatgcgttggattggttgcatgccgtggggaagaagctagacacggtgcagtgcagcgacgaagagaaagtcatcttcgccgcccatcagctgcaaggacccgcatctctctggtgggaccatttccaggctgcgcagccagaagggcaaccgatcacttggactcgcttcaccgccgctttccggagaacccatgtgcccgctggagtcgtggctcttaagaaaaaggaattccgggagttgaagcaaggcaaccgctccgtgatggagtacttgcatgagttcaacaatctggcccgttacgcccctgaggatgtgcgggaagatgaggagaagcaagagaagttcctggcaggaatggaccccgagctgtccgttcgtctagtctctggggactacccggacttccaacgactggtggacaagagcatccgcttggaagccaagcacaaggagctggagtcgcacaagcgccgcttggcgaacatccgcaatcaacagggtgctaaccagagggtccgctacaccaatccctacccagggggatcctcctcgcagcagcagcagcagcagcagcagcaacctcgctccgcgcctcgacctcaattcgtggtgcgcgtcccacagcagcaaccgcagcagaatcagcaagggactcgtgcaccccgtcctcctacgccagctgggcagcccgttcaaggccgcagggacgcttcaggtccgcagcggctgtgcttcaactgcttcgagcccgggcactttgcggataaatgcccaaagccaaggcgtcagcaaggccaagcgcctccccgccccaacaacggtggcaaggatgtcatccgtggtcgcgtgaaccacgtgacggccgaggacgtgctgacaactccggacgtcatcgttggagtagtggattgcgcgagacgcactgtcactctgtaccgaggtccggaacaaccggttgttttctttgcacccccaacctctgtccgaagttcagaactgcatcagataggactgtcagaaatccccatcgtcagagagttcggagatgtatttccggaagaactacctggtatgccgcccaagcgagagattgagttccggatagatcttgctccaggaaccactcctctgtacaagcgaccctaccgtatggcagcaaatgaactggccgaagtaaagaaacagttggaagagttgaaagaaaaggggtacatacgtccgagtacttccccatggggtgctcctgtgatttttgtggagaagaaagacaaaacgaagaggatgtgcgttgactacagagctctcaatgaagttaccatcaaaaacaagtaccctcttcctcgaatcgatgatctgttcgaccagcttaaaggtgccactgtattctccaagattgatcttcgttccggatatcaccaattacgtattcgtgaagaagatattccgaagaccgcattcaccacgcgatatgggctgtatgaattcacggtgatgtcgttcggtttgaccaatgctcctgccttcttcatgaacttgatgaacaaagtgttcatggaatacttggataagttcgttgtggttttcatcgacgacattctgatatactcacaaacagaagaagaccatcagcaccatctccgtctggtattgggaaagctgcgggaacatcaattgtatgccaagcttagcaagtgtgagttctggttgtccgaagtcaaattcttggggcacgtgatatctgctaaaggagttgctgtggatcccgaaacagtgaccgccgtcaccgaatggaagcaacccaagacagtcactcaaattcgcagtttcttgggtttggcaggatactaccggagattcatcgagaacttctccaagatcgctcgacccatgacacagttgttgaagaaagaagagaaatttgtgtggagcccgcagtgcgagaaggcgttccaaactctcaaggaaaagctggtttcctcgccagtgttaatcttgccggatactcgcaaggatttcatggtgtattgtgatgcttcgcgccaaggattggggtgcgtgctcatgcaggacggtcatgtggtagcctatgcctcacgtcagctacgtcctcatgaaggcaactaccctacgcatgacttggagctagcagcggtggttcatgctctaaaaatttggcggcactatctcattgggaaccgctgtgaaatatatactgaccataagagtttgaaatacatcttcacccagtcggatctgaatcttcggcaaaggagatggttagaactcatcaaggattatgatgtgggaatacactatcatcctggtaaggccaacgtggttgccgacgctctaagtcgaaagagccactgcaacactctcaacgtccgaggcattccacccgagcttaatcaacagatggaagccctgaacctaagcatagttggtcgcggattcttggctgcgttggaagccaagcctaccttgctcgatcaaatccgcgaggctcagaagaatgatccggacatgcatggactcctcaagaatatgaaacagggtaaagccgcaggtttcacagaggatgaacacggaactctatggaacggaaagcgggtgtgcgttcccgataacagagaacttaaacagctgatacttcaggaagctcacgaaagtccttattccattcacccgggcagtaccaagatgtacttagacttgaaggagaaatactggtgggtcagcatgaagcgggaaattgcagagtttgtggctctatgtgatgtgtgccagcgtgtcaaggcagaacaccaacgaccggccggacttctccaacctctccaagtgccggaatggaaatgggatgaaattgggatggatttcatcaccggacttccaaaaacccaaggaggatatgattccatatgggtagttgtggatcgattaaccaaggtagctcgattcattcctgtgaagaccacctatggagggaacaaactagcggagctctacttcgctaggatcgtgagtctccatggtattcccaagaaaatcgtatctgataggggaagccaattcacctctcacttttggaagaagctccaagaagagctgggtactcgattgaatttcagcaccgcgtatcacccgcagacagatggacagaccgagcgtctgaatcagattctagaagatatgctccgcgcatgtgtcctagatttcgggaagacttgggataagagtctcccctatgccgagttctcctacaataacagctatcaagccagcatacaaatggcaccctatgaagcgttgtacgggcgcaaatgccggacaccgctattgtgggaccaagtcggagaaagccaagtgttcgggactgatatcctgagagaagctgaagctaaagtcagaatcattcgggataatctaaaggtggcacaatctcggcagaaaagttatgcagataaccgtcgtcgtgacttggaattcgcagtggatgattttgtgtaccttcgggtcacgccattgcgaggcgtgcacaggtttcagacgaaagggaagctcgcacctcggtatgtgggtcccttccgtatcatcgctcgacgcggagaagttgcttaccagctggagttgcccgcctccttgggcaacgtgcatgatgtgttccatgtgtcgcaactcaagaaatgtctccgagtgccatccgagcaggccaactcagagcaaattgaagtccgcgaagacctgacctatgtggagaggccagtgaaaatcctggacaccatggagcgcaggaccaggaaccgagtaatccgtttttgcaaggtccagtggagcaaccacgccgaagaagaagctacttgggagcgcgaagacgagctgaaggcagcccatcctgatctcttcgccagttcttccgaatctcggggtcgagattccgtttaa

SEQ ID NO: 14129 - DNA, 471 bp, Oryza sativa
  Clone ID: TFbOSC16878j.C1.o2.gm
atgtggaagtacggtagtgctttgcaacagaggcccgaagaccgccgcgagggcgcgcccgagggcggcctcgccggcgcggccgacgggagcggcgcgcccgcgccccgatggtcaccgccggcgaccaccggcgcggcggagcggcgcccgagagagaggagggaagggggaaggcgaaggggacggtccacggctcaccccgagacagcgaaggcggcggaaacggcggacggagcggaggaagacggcggcgcggctcgggaagacgatgacgacggtgctccggcggtcggcggacgaagcggagcggcggacggggtcggcggcgatgcggcgatgccgaaggaggggtcgccgagccgggaggagaaccggagcggcggcggcggcggaacggaactcgtcggcgacggcggagagaaggaaaagcggcgcgagcacgattccgacggcgagagcgagcggtga

SEQ ID NO: 14130 - DNA, 541 bp, Oryza sativa
  Clone ID: TFbOSC16881j.C1.o1.fg
atggaccctgagctgtccgtccgtctagtctccgtggactatccggatttccaatgtctggtggacaagagcatccgcttggaagccaagcacaaggaactggagtcgcacaagcgccgcttggcgaatttccgtaatcaacagggtgctaaccaaagggtccgctacaccaatccctatccagggggatcctcctcgcagcagcaacaacagcagcagcaacctcgctccgcgccccgccctcaattcatggtgcgcgtcccacagccgcagcaacagcagagtcagcaagggactcgtgcgccccgtcctcctacgccaactgtgcagcctggtcaaggccgcagggacgttcaaggtccgcagcgtctgtgcttcaactgcttcgagcccgggcactttgcggacaaatgcccaaaaccgcggcgtcagcaaggccaagtgcctccccgctccaacaacggtggtaaggatgtcattcggggtcgtgtgaaccacgtgacggccgaggacgtgctgacaactccagatgtcatcgttg

SEQ ID NO: 14131 - DNA, 3903 bp, Oryza sativa
  Clone ID: TFbOSC16923j.C1.o1.np
atggagcccgagagcgccgcgccggtttccttctcctccggccgccctctctcactcccaaccctatataaaccatccccgtgcctccctcctccgtttccgccgctcgccgctctctctccccgtcggaatcgagctcgcgccgtcgccctctctctccgccgccgccgccgagctccggtctgccgccgtcgtcgccccggaccttctcccgtttcggcgtcgccttcttcgggttcgccgcaacatcgccgacctcgtccacccctccgtttcgcccgccgaccgccggaacgccgccgtcctcgtcgacccgagccgcgccgccgcctttttccgctccggtcgccgttcccgtcgtcgccgtcgacccggggtgagccgtggaccgcccatttcgtttcccccttccctcccctctctcggccgccgctccgccgtgcctatggccgccgccggcgaccataggggcgcgggcgcgccgcctcccgtcggctgtgccggcgaggccgccttcgggcgcgccccgcggctgccatgtggggcccggccgtcagccgcccgcgcctcgggtacggctgacgcgtgggacccacggcgccggccggcgtaagccgcgtgcacccgttccaccgtggacccacctcggccatataaggaccggtcttcgggcctctgttgcaaagcactaccgtacttccacatgtctagtggggcaaatgaaggctacacgagctgcggcccggtagtcgagatgtcatggcacagggccggtgtcctgctgctaggggctcagtcctgcctacctgtcccgggggttccggccgtaggtgggattgggtcgatgtacacctctgatcagagtataatctattcgaatagccgcgccctcggttatgggcaagccgagcaatgtacccaaatggccggcagcgtcacccgtcgtggtttggacatgactggcttcgtcttggagctgcggggcatgtgcgtggtcctggggtatccgcatggagtggactaccaggccaggccgcttccgaagcaggagggtgacgatgcagagccccacgctgcttgggaggtcactgcagtgatcctcgctggctctcccgagcggacttcgctggcagtcaccgcgggtggagattctttccccgccgcttgccagaacgccgctctcctcgccatcggcactcttcaccagcgctacccggacgagttgcagcactcgccctaccgctaccaccctcaccgcggaggagcccgcgactacgccaccttccgggatgctagctcggaggacgacgctaccatcgtgcacctggcgcgcatggtggaggcgtacgacgcggctcgtatcgacttccatcagatggtgcgccgtgggatggtcgagaacaacctgaagatcctggagctgcgtcaggagaacctgcagctcaagaaggacctagacgcggtggaggcgcagctgcatcagctcaagatcgcccagggagaggtctgccgccccaagcgtcgccgtgtctgccgcagccagaagatcaccgcccgcaagagcacctccaggcccgagcttgttcgtcagtccctggcgtggacctgcttcgtggagacccctcgtgccgagcccgcgcctgtggttccccaggagggggaagcctccggcgttggtagcacggaggatgcgctgttgctcaccttccatggtgacgaccaggagaagtgctaatgccggtgatggcaaccaacctgaaggcagcaaccgcaaccaccatggcagcccacctccacctcctcctccgcctccaccaccaccaccagataccaacgccattctcacccaaatcctcgcccagcaggccaacatgatgactgctttcctccaccacctccaaaatccgccacaacagaatgctccaccaccacccccgcaacactctaaactcgccgagttcctccgcatccgcccacccaccttctctagctccaacaaccccgtggatgcgttggattggttgcatgccgtggggaaaaagctagacactgtgcagtgcagcgatgaggagaaagtcatcttcgccgcccaccaactgcaggggcccgcatctctatggtgggaccatttccaggctacgcagccagaggggcagcctattacttgggcccgtttcaccgccgctttccggagaacccatgtgcccgccggagtcgtggctcttaaaaaaagggaattctgagagttgaagcaaggcaaccgctccgtgatggagtatttgcatgagttcaacaacctggcccgttacgccccggaggatgtgcgggaagatgaggagaagcaagagaagttcttggcaggaatggaccctgagctgtccgtccgtctagtctccggggactatccggatttccaacgtctggtggacaagagcatccgcttggaagccaagcacaaggaactggagtcgcacaagcgccgcttggcgaatttccgcaatcaacagggtgctaaccaaagggtccgctacaccaatccctatccagggggatcctcctcgcagcagcaacaacagcagcagcaacctcgctccgtgcctcgacctcaatacgtggtgcgcgtcccacagccgcagcagcagcagagtcagcaagggactcgtgcgccccgtcctcctacgccagccgtgcagtctggtcaaggctgcagggacgctcaaggtcagcagcgtctgtgcttcaactgcttcgagcccgggcactttgcggataaatgcccgaaaccgaggcgccagcaaggccaagcgcctccccgctccaacaacggtgggaaggatgtcattcagggtcgtgtgaaccacgtgacggccgaggacgtgctgacaactccagacgtcatcgttggtacgttcctcattcattccatccctgctaccattttgttcgactctggagcttcccactcgtttatatctgtgccattcgtggggagaaatcagttgggggtagaaaggcttagaaaccctctgctcatcaccacccctggaggggttatgacagcaaagtattatagtcctgccgtccctatagaaattcaggggattccttttccctcggacctgattctgctagacaccaagaacttggatgtgatccttggaatgaattggttggctcaatttcaaggagtagtggattgcgcgagacgcactgttactctgtaccgaggaccggaacaaccggttgttttctttgcacccccaacctctgtcagtagttcagaacttcatcagataggactgtcagaaatccccatcgtcagagagttcggagatgtgtttccggaagaactacccggtatgccgcccaagcgagagattgagttccggatagatcttgctccaggaaccactcctctgtacaagcgaccctaccgtatggcagcaaatgaactggccgaagttaagaaacagttggaagagttgaaagagaaggggtatatacgtccgagtacttccccctggggcgctcctgtgatttttgtggagaagaaggacaagacgaagaggaggtgcgtcgactacagagccctcaatgaagtcaccatcaaaaacaagtaccctcttccccggatcgatgacctgttcgatcagcttaaaggtgccacggtattctccaagattgatcttcgttccggatatcaccagttgcgcatccgcgaagaagatattccgaagaccgcattcaccacgcgatacggactgtatgaattcacggtgatgtcgttcggtttaaccaatgcacctgccttcttcatgaacttaatgaacaaagtgttcatggaatacttggataagtttgttgtggttttcattgacgacattctgatatactcacaatcag

SEQ ID NO: 14132 - DNA, 1840 bp, Oryza sativa
  Clone ID: TFbOSC17346j.C1.o1.gm
agtcgttttgggacgcgacaaagcacaaggaactggagtcgcacaagcgccgcttggcgaatttccgcaatcaacagggtgctaaccaaagggtccgctacaccaacccctatccagggggatcctcctcgcaacagcaacaacagcagcagcaacctcgctccgcgccgcgacctcaattcgtggtgcgcgtcccacagccgcagcagcagcagaatcagcaagggactcgtgcgccccgtcctcctacgccaaccgtgcagtctggtcaaggccgcagggacgctcaaggtcagcagcgtctgtgcttcaactgcttcgagcccgggcactttgcggataaatgcccgaagccaaggcgtcagcaaggccaagcgcctccccactccaacaacggtgggaaggatgtcattcggggtcgtgtgaatcacgtgacggccgaggacgtgctgacaactccagacgtcatcgttggtacgttcctcgttcattccatccctgctaccattttgttcgactctggagcttcccactggtttatatctgtgccattcgtggggagaaatcagttgggggtagaaaggcttaggaaccctctgctcatcaccacccctggaggggttatgacagcaaagtattatagccctgccgtccctatagaaattcaggggattccttttccctcggatctgattctgctagacaccaagaacttggatgtgatccttgggatgaattggttggctcaattccaaggagtagtggattgcgcgaggcgcactgtcactctgtaccgagggccggaacaaccggttgttttctttgcacccccaacctctgtcagtagttcagaactgcatcagataggactgtcagaaatccccatcgtcagggagttcggagatgtgtttccggaagaactacccggtatgccgcccaagcgagagattgagttccggatagatcttgctccaggaaccactcctctgcacaagcgaccctaccgtatggcagcaaatgaactggccgaagtaaagaaacagttggaagagttgaaagaaaaggggtatatacgtccgagtacttccccctggggtgctcctgtgatttttgtggagaagaaagacaagactaagaggatgtgcgttgactacagagctctcaatgaagtcaccatcaaaaacaagtaccctcttccccggatcgatgatctgttcgatcagcttaaaggtgccactgtattctccaagattgatcttcgttccggatatcaccaattacgtattcgtgaagaagatattccgaagaccgcattcaccacgcgatacgggctgtatgaattcacggtgatgtcattcggcctaaccaatgcacctgccttcttcatgaacttaatgaacaaagtgttcatggaatacttggataagtttgttgtggttttcattgatgacattctggtatactcacaatcagaggaagaccatcagcaccatctccgtctggtgttgggaaagctgcgggaacatcaattgtatgccaaacttagcaagtgtgagttctggctgtccgaagtcaaattcttaggacacgtgatatctgctaaaggagtttctgtggaccccgaaacagtgaccaccgtcaccgattggaagcaacccaagacagttactcaagtccgcagtttcttaggtttggcaggatactaccggagattcatcgagaacttctccaaaatcgctcgacccatgacacagttgttgaagaaagaagagaaatttgtgtggagcccgcaatgcgagaaggcgttccaaactctcaagaaaagctggtttcctcgccg

SEQ ID NO: 14133 - DNA, 5205 bp, Oryza sativa
  Clone ID: TFbOSC17984j.C1.o1.fg
atggccggcagcgtcacccgtcgtggtttggacatgactggtttcgtcttggagctgcggggcatgtgcgttgtcctggggtatccacatggagtggactaccagggcaggccgcttccggagcaggagggtgacgatgcagagccccacgctgcttgggaggtcactgcagtaatcctcgctggctctcccgagcggacttcgctgacagtcaccgcgggtggagattctttccccgccgcttgccagagcgccgctctcctcgccatcggcactcttcaccagcgctacccggacgagttgcagcactcgccctaccgctaccaccctcgccgcggaggagcccgcgactacgccaccttccgggatgctagctcggaggatgacgctaccatcatgcacctggcgcgcatggtggaggcgtacgacgcggctcgtatcgacttccatcagatggtgcgccgtgggatggtcgagaacaacatgaagatcctggagctgcgtcaagagaacctgcagctcaagaaggacctagacgcggtggaggcgcagctgcatcagctcaagatcgcccagggagaggtctgccgccccaagcgtcgccgtgtctgccgcagccagaagatcaccgcccgcaagagcacctccaggcccgagcttgttcgtcagtccctggcgtggacttgcttcgtcgagacccctcgtgccgagcccgcgcccgtggttccccaggagggagaagcctccggcgttggtagcacagaggatgcgctgttgctcaccttccgtcctggcccgtcgcagcggagaagtgctgccaccggtgatagcaaccaacctgaaggcagcaaccaccaccaccagggcagcccacctccacctcctcctccgcctccaccaccgccagataccaacgccattctcacccaaatcctagcccagcaggccgacatgatggctgctttcctccaccacatccaaaatccgccacaacataatgctccaccaccaccttcccaacactctaaactcgccgagttcctccgcatccgcccacttaccttctctagctccaacaaccccgtggatgcgttggattggctgcatgccgtggggaaaaagctagacactgtgcagtgcagcgatgaggagaaagtcatcttcgccgcccaccagctgcaggggcccgcatctctatggtgggaccatttccaggctacgcagccagaggggcaacctattacttgggcccgtttcaccgccgctttccggagaacccatgtgcccgccggagtcgtggcccttaagaaaagagaattccgagagttgaagcaaggcaaccgctccgtgacggagtatttgcatgagttcaacaacctggcccgttacgccccggaggatgtgcgggaagatgaggagaagcaagagaagttcttggcaggaatggaccctgagctgtccgtccgtctagtctccgggaactatccggatttccaacgtctggtggacaagagcatccgcttggaagccaagcacaaggaactggagtcgcacaagcgccgcttggcgaatttccgcaatcaacagggtgctaaccaaagggtccgctacaccaatccctatccagggggatcctcctcgcagcagcaacaacagcagcagcaacctcgctccgcgcctcgacctcaattcgtggtgcgcgtcccacagccgcagcagcagcagaatcaacaagggactcgtgcgccccgtcctcctacgccaactgtgcagcctggtcaaggccgcagggacgctcaaggtccgcagcgtctgtgcttcaactgcttcgagcccgggcactttgcggataaatgcccaaagccgaggcgtcagcaaggccaagcgcctccccgctccaacaacggtgggaaggatgtcattcggggtcgggtgaaccacgtgacggccgaggacgtgctaacaactccagacgtcatcgttggtacgttcctcattcattccatccctgctactattctgttcgactctggagcttcccactcgtttatatctgtgccattcgtggggagaaatcagttgggggtagaaaggcttaggaaccctctgctcatcaccacccctggaggggttatgacagcaaagtattatagccctgccgtccccatagaaattcaggggattccttttccctcggatctgattctgctagacaccaagaacatggatgtgatccttgggatgaattgtagttccgaacttcatcagataggactatcagaaatccccatcgtcagagagttcggagacgtgtttccggacgaactacccggtatgccgcccaagcgagagattgagttccggatagatcttgctccaggaaccactcctctgtacaagcgaccctatcgtatggcagcaaatgaactggccgaagttaagaaacagttggaagagttgaaagaaaaggggtatatacgtccgagtacttccccctggggtgctcctgtgatttttgtggagaagaaagacaagacgaagaggatgtgcgttgactacagagctctcaatgaagtcaccatcaaaaacaagtaccctcttccccggatcgatgatctgttcgatcagcttaaaggtgccactgtattctccaagatcgatcttcgttccggatatcaccaattacgtattcgtgatgaagatattccgaagaccgcattcaccacgcgatatggactgtatgaattcacggtgatgtcgttcggtttaaccaatgcacctgcctttttcatgaacttaatgaacaaagtgttcatggaatacttggataagtttgttgtggttttcattgatgacattctggtatactcacaatcagaggaagaccatcagcaccatctctgtctggtgttgggaaagttgcgggaacatcaattgtatgccaaacttagcaagtgtgagttctggttgtccgaagtcaaattcttagggcacgtgatatctgctaaaggagttgctgtggaccccgaaacagtgaccgccgtcactgattggaagcaacccaagacagtcactcaagtccgcagtttcttaggtttggcaggatactaccggaggttcatcgagaacttctccaaaatcgctcaacccatgacacagttgttgaagaaagaagagaaatttgtgtggagcccgcaatgcgagaaggcgttcaaaactctcaaagaaaagctggttgcctcgccagtgttaatcttgccggatactcgcaaggatttcatggtgtattgtgacgcttcgcgccaaggattggggtgcgtgctcatgcaggatggtcatgtggtggcctatgcctcacgccagctacggcctcatgaaggcaactaccctacccatgatttggagttagctgcggtggttcatgctctaaaaatctggcggcactatctcattgggaatcgctgtgaaatatatactgatcataagagtttgaaatacatcttcactcagtcggacctgaatcttcggcaaaggagatggttagaactcatcaaggattatgatgtgggaattcactatcatcctggtaaggccaacgtggtcgccgacgccctaagtcgaaaaagccattgcaacacccttaacgtccgtggcattccacccaaacttagtcaacagatggaagccctgaacctaagcatagttggtcgcggattcttggctgcgttggaagccaagcctaccttgctcgatcaaatccgcgaggctcagaagaacgatccggacatgcatggactcctcaagaatatgaaacagggtaaagccgctggtttcacagaggatgaacacggaaccctatggaacggaaatcgagtatgcgttccagataacagagaacttaaacagctgatacttcaggaagcccacgaaagtccttattccatccaccctggcagtacaaagatgtacttagacttgaaggagaaatactggtgggttagtatgaagcgggaaattgcagagttcgtggccctttgtgatgtgtgccagcgtgtcaaggcagagcaccaacgaccggccggacttctccaacctctccaagtacctgaatggaaatgggatgaaattgggatggatttcatcaccggacttccaaagacccaaggtggatatgattctatatgggtagtggtggatcgattaaccaaggtagctcgattcattcctgtgaagaccacctatggagggaacaaactagccgagctctacttcgctaggatcgtgagtctccatggcgttcccaagaaaatcgtatctgataggggaagccaattcacctctcacttttggaagaagctccaagaagagctgggtacccgattaaacttcagcaccgcataccacccgcagacagatgggcagaccgagcgtctaaatcagatcctagaagatatgcttcgcgcatgtgtcctggatttcgggaagacctgggataagagtctcccctatgccgagttctcctacaataacagctatcaagccagcatacaaatggcaccttatgaagcgttgtatgggcgcaaatgccggacaccgctcctgtgggatcaagttggggaaagccaagtgttcgggactgatatcctgagagaagctgaagctaaagtcagaaccattcgggataatctaaaggtggcacagtcccggcagaaaagttatgcagataaccgtcgccgtaacctagaattcgcagtggacgattttgtgtatcttcgggtcacgccattgcggggtgtacacaggtttcagacaaaagggaagcttgcacctcggtatgtgggtcctttccgtatcgttgcccgacacggagaagtcgcttaccaattggagctgcccgcctccttgggcaacgtgcatgatgtgttccatgtgtcgcaactcaagaaatgccttcgagtgccatccgagcaggccgactcagagcaaattgaagttcgcgaagacttgacctacgtggagaggccagtgaaaatcctggacaccatggagcgcaggaccaggaaccgggtaatccgtttttgcaaggtccagtggagcaaccacgccgaagaagaagctacctgggagcatgaagacgagctgaaggcagcccatcctgatctcttcgccagttcttccgaatctcggggtcgagattccgtttaa

SEQ ID NO: 14134 - DNA, 1371 bp, Oryza sativa
  Clone ID: TFbOSC17991j.C1.o1.fg
atggcaatcaacctgaaggcagcaaccacaaccaccagggcaacccacctccaccttcttcttccgcctccgccaccaccaccagacaccaacgccattctcacccaaatcctcgcccagcaagccaacatgatgactactttcctccaccacctccaaaatccgccacaacagaatgctccaccaccacctccccaacactctaaactcgccgagttcctccgcatccgcccacctaccttctctagctccaacaaccccgtggatgcgttggattggttgcatgccgtggggaaaaagctggacactgtgcagtgcagtgatgaagagaaagtcatcttcgccgcccaccagctgcagggacccgcatctctatggtgggaccacttccaagctacgcagccagagggacagcctattacatgggctcgcttcaccgccgctttccggagaacccatgtgctcgccggagtcgtggccctcaagaaaagggaattccgagagttgaagcaaggcaaccgctccgtgatggagtatttgcatgagttcaacaacctggcccgttacgccccggaggatgtgcgggaagatgaggagaagcaagagaagttcctggcaggaatggaccccgagctgtccgtccgtctagtctctggggactatccggatttccaacgtctggtggacaagagcatccgcttggaagccaagcacaaggagctggagtcgcacaagcgccgcttggcgaatttccgcaatcaacagggtgctaaccaaagggtccgctacaccaatccctatccagggggatcctcctcgcagcagcaacaacagcagcagcaacctcgctccgcgcctcgacctcaattcgtggtgcgcgtcccacagccgcagcagcagcagaatcaacaagggactcgtgcgccccgtcctcctacgccagccgtgcagcctggtcaaggccacagggacgctcaaggtcagcagcgtctgtgcttcaactgctttgagcccgggcactttgcggataaatgcccgaagccaaggcgtcagcaaggccaagcgcctccccgctccaacaacggtggcaaggacgtcattcggggtcgtgtgaatcacgtgacggccgaggacgtgctgacaactccagacgtcatcgttgagaagaaagacaagacgaagaggatgtgcgtcgactacagagctctcaatgaagtcaccatcaaaaacaacgtgtcaaggcagagcaccaacgaccggccggactcctccaaccactccaagtacccgaatggaaatgggatgaaattgggatggatttcatcaccggacttccaaagacccaaggtggatatgattctatatgggtag

SEQ ID NO: 14135 - DNA, 4536 bp, Oryza sativa
  Clone ID: TFbOSC18069j.C1.o1.fg
atggtggaggcgtacgatgcggcccgtatcgacttccatcatatggtgcgccgtgggatggtcgtgaacaacatgaagatcctggagctgcgtcaggagaatctgcagctgaagaaggacctagacgcgctggaggcgcagctatgtcagctcaagatggtgacaaccaggagaactgctgctatcggtgatggcaaccaacccgaaggtagcaaccccaacatccaaggcggcccacctccacctcctcccccgccaccaccaccaccaccagacaccaaccccatcctcactcaaatcctcgcccagcaggccaacatgatggctgctttcctccaccacatccaaaatccaccacagcataatgctccacctccaccaccacccccgcagcattctaagctcgccgagttccttcgcatccgcccgcctaccttctccagctccaataaccccgtggatgccttggattggttgcatgccgtggggaagaagttagacaccgtgcagtgcaacgatgaggaggaagtcatctttgccacccaccagctgcaggggcccgcatctctatggtgggaccacttccaggctacgcagcccgaggggcagcctattacctgggcccgcttcaccgccgctttccggaggacccatgtgcctgccggagtcatggcccttaagaaaagggaattccgggagttgaagcaaggcaaccgctctgtgatggagtatttgcatgagtttaacaacctggcccggtacgccccggaggatgttcgggaagatgaggaaaagcaggagaagttcttggcaggaatggaccctgagctatctgtgcgtctggtctccggggattatccggattttcagcgtctggtggacaagagcatccgcttggaagccaagcacaaggaactggagtcgcacaagcgtcgcttggcgaattttcgcaatcaacagggggctaaccaaagggtccgctacaccaatccctatctagggggatcctcctcgcagcagcagcagcagcaacctcgctccgcgccccgaccccaattcgtggtgcgcgtcccacagccgcagcaacagcagggccgcagagacgctcaaggacagcagcgtctgtgcttcaactgcttcgagcccgggcactttgcggacaaatgcccgaagccgcggcgccagcaaggccaagcgcctccccgccccaacaacggtggtaaggacgtcgctcagggtcgtgtgaaccacgtgactgtcgaggatgtgctgacgactccggacgtcatcgttggtacgttcctcatacattccattcctgctaccattttgttcgactctggagcttcccactcgtttatatctgtgcctttcgtgggaagaaatcaactgggggtagaacggcttaggaaccctctgctcatcaccacccctggaggggatatgacagcaaagtattacagcccggccgttcctatagaaatccagggaatcccttttccctcggatttgattcttctggacaccaagaacttggatgtgatccttgggatgaattggttggctcaattccaaggtgtagtggattgcgtaaggcgcacggtcactctgtaccgagggccggaacaaccagttgtgttctttgcacccccaacctctgttggcagttcagaacttcatcagataggactgtcagaaatccctatcgccagtgaattcggtgacgtgtttccggaagaactacccggtatgccgcccaagcgggagatcgagttccggatagatcttgctccaggaacaactcctctgtacaagcggccctaccgtatggcagcgaatgaacttgccgaagtcaagaagcaattggaagagctgaaggaaaaggggtatattcggccgagcacttccccctggggtgctcccgtgatttttgtggaaaagaaggacaagacaaagaggatgtgtgttgactacagagctctcaatgaagtcactatcaaaaacaagtaccctcttcctcggatcgatgatctgttcgaccagctcaagggtgccaccgtcttttctaaaatcgatcttcgctccggatatcatcaattgcgtattcgtgaagaagatatcccgaagaccgcattcaccacgcgatatgggctgtatgaattcacggtgatgtcgttcggtctgactaatgctcctgccttcttcatgaacttaatgaacaaagtgttcatggaatacttggataagtttgttgtggtcttcatcgacgacatcttggtgtactcgcaatcagaggaagaccatcagcagcatctccgtttggtgttgggaaagttacgggaacatcaactgtatgccaagcttagcaagtgtgagttctggttgtccgaagtcaagttcttagggcacgtgagatctgctaaaggagttgctgtggaccccgaaacggtgaccgccgtcaccgattggaagcaacccaagacggtcactcaagtccgcagctttttgggtttggccgggtactatcggagtgtgagaaagcattccaaactcaaagaaaagctggtttcctcgccagtgttaatcttaccggatactcgcaaggacttcctggtgtactatgacgcttcgcgccaaggattggggtgcgtattaatgcaggaaggtcatgtggtagcctatgcctcacgccagctacggcctcatgaaggcaactaccctacccatgatttggaattggccgctgtggttcatgctctaaagatctggcggcactatctcattgggaatcgttgtgaaatatatactgatcataagagtttgaaatacatcttcactcagtcagatctgaatcttcggcaaaggagatggttagaactcatcaaggattatgatgtgggaattcactatcaccctggcaaggccaacgtagtcgccgacgctctaagtcgaaaaagccattgcaacactcttggcgtccgtggcattccaccggaacttaatcaacagttggaagccctgaacctaagcatagttggtcgtggattcttggctatgctggaagccaagcctaccttgctcgatcaaatccgcgaggctcagaagaatgatccggatatgcatgggctcctcaagaatatgaaacaaggtaaagccgctggtttcacagaggatgaacacggaaccctatggaatggaaatcgggtatgcgttccagacgtcagggaacttaaacagttgatacttcaggaagctcacgaaagtccctattccatccatcctggcagcacgaagatgtacttggacttgaaagagaagtattggtgggttagtatgaaacgggaaattgcagagttcgtggccctttgtgatgtgtgccagcgtgtcaaagccgagcaccaacgaccggccggactcctccaacctctacaagtgctagaatggaaatgggatgaaattgggatggattttatcaccggacttccaaaaacccaaggcggatatgattctatatgggtagtcgtggatcgactaaccaaggtagcacgattcattcccgtaaagaccacctatggagggaacaaactagctgaactctacttcgctaggatcgtaagtctccatggcgttcctaagaaaattgtatctgatcggggaagccagttcacctctcatttttggaagaaactccaagaagagttgggaacccgattaaatttcagcaccgcgtaccacccgcagacagatgggcagaccgagcgtctgaaccagatcctcgaagatatgcttcgcgcatgtgtcctagattttgggaagacatgggataagagtctcccttatgccgagttctcctacaataacagctaccaagccagcatacagatggcaccgtacgaagcgttgtatggccgcaaatgccggacaccactattgtgggaccaagttggggaaagccaagtgttcgggaccgatatcttgagagaagctgaagcgaaggtcaggaccattcgggaaaacctaaaggtggcacagtctcggcagaagagttatgcagacaaccgacgccgtgacctggaattcgcagtggatgactttgtgtatctccgggtaacgccgttgcggggtgtacacaggtttcaagcgaaagggaagctcgcccctcggttcgtgggtcctttccgcatcattgctcgacgcggagaagttgcttaccagttggagctgcccgcttccttgggcaacgtgcatgatgtgttccatgtgtcgcaactcaagaaatgtcttcgagtgccgtccgagcaggccgactcagagcagattgaagttcgcgaagacttgacctacgtggagagaccagtgaaaatcctggacaccatggagcgcaggaccaggaatcgggtaatccgtttttgcaaggtccaatggagcaaccatgccgaggaagaagctacttgggagcgtgaagacgagctgaaggcagcccatccagatctcttcgccagttcttccgaatctcggggtcgagattccgtttaa

SEQ ID NO: 14136 - DNA, 1971 bp, Oryza sativa
  Clone ID: TFbOSC18168j.C1.o1.fg
atgactggcttcgtcttggagctgcggggcatgtgcgtggtcttggggtatccacatggagtggattaccaggccaggccgctcccggagcaagagggtgaggatgcagagcctcacgctggttgggaggtcactgcagtgattctctccggctctcccgagcggacttcgctggcagtcaccgcgggtggggattccttccccgccgcttgccagaacgccgctctcctcgccatcggcacccttcaccagcgctacccggacgagttgcagcactcgccctaccgctaccaccctcgtcgcggaggagcccgcgactacgccaccttccgagacgccagctcggaggatgacgccaccgtcgtgcacctggcacgcatggtggaggcgtacgacgcggctcgtatcgacttccaccagatggtgagccgtggcatggtggagaacaacttgaagatcctggagctgcgtcaggagaatctgcagctcaagaaggacctcgacgcgttggaggcgcagctgcaccagctcaagatcgcccagggagagatctgccgccccaagcgtcgccgcgtctgccgcagccagaagatcaccgcccgcaagagcacctccaggcctgagcttgtccgtcagtccctggcgtggacctgcttcgtcgagacccctcgtgccgagcctgcgcccgtggttccccaggagggggaagcctccggcgttggtagctcggaggctccttctctgtttgctggttctgggtggggttttcagatggtgacgaccaggagaaatgttaacaccggtgaaggcaaccaacccgaaggcagcaaccccaaccaccaaggcaatccacctccgccaccaccaccagacaccaacgccattctcacccagatcctcgcccagcaagccaacatgatgaatgctttcctccaccaccttcaaaacccgccacaacagaatgctcccccaccacctccccaacactctaaactcgccgagttcctccgcatccgcccacctaccttctctagctccaacaaccccgtggatgcgttggattggttgcatgccgtggggaagaagttagacactgtgcagtgcagtgacgaagagaaagtcatcttcgccgcccatcagctgcagggacccgcatctctctggtgggaccacttccaggctacgcagccagagggacagccgatcacttgggcccgcttcaccgccgctttccggaaaacccatgtgcccgccggagtcgtggctcttaagaaaagggaattccgagagttgaagcaaggcaaccgctccgtgatggagtatttgcatgagttcaacaatctggcccggtacgctccggaggatgtgcgggaagatgaggagaagcaggagaagttcttggcgggaatggaccctgagctgtccgtccgtctagtctctggggactatcctgattttcaacgactggtggacaagagcatccgcttggaagccaagcacaaggagctggaatcgcacaagcgtcgcttggcgaatttccgcaatcaacagggtgctaaccagagggtccgctacaccaatccctacccagggggatcctcctcgcagcagcagcagcagcagcagcaacctcgcccagcgccccgacctcaattcgtggtgcgcgtcccacagcagcaacagcagcagaatcagcaagggactcgtgcgccccgtcctcctacgccagctgggcagcccgttcaaggccgcagggacgcttcaggtccgcagcgtctgtgcttcaactgcttcgagcccggacactttgcggataaatgcccaaagccaaggcgtcagcaaggccaagcgcctccccgccccaacaacggtggccaggacgtcatccgtggtcgtgtgaatcacgtgacggccgaggacgtgctgacaactccagacgtcatcgttgaagttcagaactgcagcagatag

SEQ ID NO: 14137 - DNA, 1947 bp, Oryza sativa
  Clone ID: TFbOSC1822j.C1.o3.fg
atgactggcttcgtcttggagctgcgaggcatgtgcgtggtcttggggtatccacacggagtggattaccaggccaggccgctcccggagcaggagggtgaggatgcagagcctcacgctggttgggaggtcactgcagtgatcctctccggctctcccgagcggacttcgctggcagtcaccgcgggtggggattccttccccgccgcttgccagaacgccgctctcctcgccatcggcacccttcaccagcgctacccggacgagttgcagcactcgccctaccgctaccaccctcgtcgcggaggagcccgcgactacgccaccttccgagacgccagctcggaggatgacgctaccgtcgtgcatctggcacgcatggtggaggcgtacgacgcggctcgtatcgacttccatcagatggtgcgccgtggcatggtggagaacaacatgaagatcctggagctgcgccaagagaatctgcagctcaagaaggacctcgacgcgttggaggcgcagctgcatcagctcaagatcgcccagggagaggacagccgtcccaagcgtcgccgcgtctgccgcagccagaagatcaccgcccgcaagagcacctccaggcccgagcttgttcgtcagtccctggcgtggacctgcttcgtcgagacccctcgtgccgagcctgcgcccgtggttccccaggagggggaagcctccggcgttggtagctcggaggttgtgtggggcatggttatgccgatggtgacgaccaggagaaatgttaacaccggtgaaggcaaccaacccgagggcagcaaccccaaccaccaaggcaatccacctccaccaccaccaccagacaccaacgccattctcacccaaatcctcgcccagcaagccaacatgatgaatgctttcctccaccacctccaaaatccgccacaacagaatgctccaccaccacccccacaacactctaaactcgccgagttcctccgcatccgcccacctaccttctccagctccaacaaccccgtggatgctttggattggttgcatgccgtggggaagaagctagacacggtgcagtgcagtgatgaggagaaagtcaccttcgccgcccatcagctgcaggggcccgcatctctatggtgggaccatttccaggccacgcagccagaagggcaacctattacttggactcgcttcaccgccgctttccggagaacccatgtgcccgctggagtcgtggctcttaagaaaagggaatttcgggagttgaagcaaggcaaccgctccgtgatggagtatttgcatgagttcaacaatctagcccgttatgccccggaggatgtgcgggaagatgaggagaagcaagagaagttcttggcaggaatggaccctgagctgtccgttcgtctagtctctggggactatcctgattttcaacgactggtggacaagagcatccgcttggaagccaagcacaaggagctggaatcgcacaagcgccgcttggcgaatttccgcaatcagcagggtgctaaccagagggtccgctacaccaatccctacccagggggatcctcctcgcagcagcagcagcagcagcagcaacctcgctccgcgcctcgacctcaattcgtggtgcgcgtcccacagcagcaacagcagcagaatcagcaagggactcgtgcgccacgtcctcctacgccaactgtgcagcctgttcaaggtcgcagggacgcttcaggtccgcagcgtctgtgcttcaactgcttcgagcccgggcactttgcggataaatgcccaaagccaaggcgtcagcaaggccaagcgcctccccgctccaacaacggtggcaaggatgtcattcggggtcgtgtgaatcacgtgacggccgaggacgtgctgacaactccagacgtcatcgttgagaatgatttttaa

SEQ ID NO: 14138 - DNA, 785 bp, Oryza sativa
  Clone ID: TFbOSC20764j.C1.o3.np
cacgccggcgcagcggcgggaggcggcacgcccgcgcccctatggtcgccggcggcggccataggcacggcggagcggcggccgagagaggggaagggaagggggaaaagaagcggcggtccacgactcaccccgggtcgacggcaacgacggaaacggcgaccggtgcggaggaaggcggtggcgcggctcgggtggatggggtcgacggtgctccggcggtcggcgagcgaaacggaggggtggacaaggtcgccggggatgcggcgaagccgaaggaggcggcgccgaggggagaggtggtccggggcgacaacggcggcggaccggagctcggcggcgacgacggagagagagggcgacggcgcgagctcgattccggcggggagagagagcggcgagtggcgaaaacggtggagggaggcacggggagggtttatatagggtcgggagggggacagagcggccggacgagggggaaacggcgcggaagatccggccgccattgatggcgccggcgaggttaggggagaggtttccaaacgaatccgagggagagagggagggaaaaatggggggaaagagagagggaatcacggggaataattcccccctattgattgcacgcggggacgacgggatgcggcggattcggcgacggcggcggcgctagggcgcgggcgaggcggcgggagcggcgggaggacagggatgacaggtgggccccacccgtcagcgagggtggcgggcgggcccgcccgtcagcggcgcgcgcgcggagagag

SEQ ID NO: 14139 - DNA, 547 bp, Oryza sativa
  Clone ID: TFbOSC2192j.C1.o1.fg
atggcccttaagaaaagggaattccgagagttgaagcaaggcaaccgctctgtgatggagtatttgcatgggtttaacaacctggcccggtacgccccggaggatgttcgtgaagatgaggagaagcaagagaagttcttggcaagaatggaccctgagctgtccgtgcgtctggtctccggggactatccggatttccaacgtctggtggacaagagcatccgcttggaagccaagcacaaggaactggagtcgcagaagcgtcgcttggcgaatctccgcaatcaacagggggctaaccaaagggtccgctacaccaatccatatccagggggatcctcctcacagccgcagcaacagcagagtcagcaagggacccgtgtgccccgtcctcctgcgcccgttgtgcagcctggtcaaggccgcagagaagttcaaggtcagcagcgtctgtgcttcaactgcttcgagcccgggcactttgcggataaatgcccaaagccgaggcgccagcaaggccaagcgcctccccgccccaacaatggtg

SEQ ID NO: 14140 - DNA, 5926 bp, Oryza sativa
  unsure (1)..(5926): unsure at all n locations
  Clone ID: TFbOSC22607j.C1.o1.np
tatataaaccatccccgtgcctccttcttcggtttccgccgctcgccgctctctctcccggtcggaatagagcttgcgcngtcgccctctctttccgccgccgccgccgagatccggtctgccgccgtcgtcgccccggaccttctcccgtttcggcgtcgcctcttcgggttcgccgcaacatcgccgacctcgtccacccctccgtttcgcccgccgaccgccggaacgccgccgtcctcgtcgacccgagccgcgccgccgcctttttccgctccggtcgccgttcccgtcgtcgccgtcgacccggggtgagccgtggaccgcccatttcgtttcccccttccctcccctctctcggccgccgctccgccgtgcctatggccgccgccggcgaccaaaggggcgcgggcgcgccgcctcccgtcggctgtgccggcgaggccgccttcgggcgcgccccgcggctgccatgtggggcccggccgtcagccgcccgcgcctcgggtacggctgacgcgtgggacccacggcgccggccggcgtaagccgcgtgcacccgttccaccgtggacccacctcggccatataaggaccggtcttcgggcctctgttgcaaagcactaccgtacttccacatgtctagtggggcaaatgaaggctacacgagctgcggcccggtagtcgagatgtcatggcacagggccggtgtcctgctgctaggggctcagtcctgcctacctgtcccgggggttccggccgtaggagggattgggtcgttgtacacctctgatcagagtataatctattcgaatagccgcgccctcggttatgggcgagccgagcaatgtacccaaatggccggcagcgtcacccgtcgtggtttggacatgactggcttcgtcttggagctgcggggcatgtgcgtggtcctggggtatccgcatggagtggactaccaggccaggccgcttccgaagcaggagggtgacgatgcagagccccacgctgcttgggaggtcactgcagtgatcctcgctggctctcccgagcggacttcgctggcagtcaccgcgggtggagattctttccccgccgcttgccagaacgccgctctcctcgccatcggcactcttcaccagcgctacccggacgagttgcagcactcgccctaccgctaccaccctcaccgcggaggagcccgcgactacgccaccttccgggatgctagctcggaggacgacgctaccatcgtgcacctggcgcgcatggtggaggcgtacgacgcggctcgtatcgacttccatcagatggtgcgccgtgggatggtcgagaacaacctgaagatcctggagctgcgtcaggagaacctgcagctcaagaaggacctagacgcggtggaggcgcagctgcatcagctcaagatcgcccagggagaggtctgccgccccaagcgtcgccgtgtctgccgcagccagaagatcaccgcccgcaagagcacctccaggcccgagcttgttcgtcagtccctggcgtggacctgcttcgtggagacccctcgtgccgagcccgcgcctgtggttccccaggagggggaagcctccggcgttggtagcacggaggatgcgctgttgctcaccttccatggtgacgaccaggagaagtgctaatgccggtgatggcaaccaacctgaaggcagcaaccgcaaccaccatggcagcccacctccacctcctcctccgcctccaccaccaccaccagataccaacgccattctcacccaaatcctcgcccagcaggccaacatgatgactgctttcctccaccacctccaaaatccgccacaacagaatgctccaccaccacccccgcaacactctaaactcgccgagttcctccgcatccgcccacccaccttctctagctccaacaaccccgtggatgcgttggattggttgcatgccgtggggaaaaagctagacactgtgcagtgcagcgatgaggagaaagtcatcttcgccgcccaccaactgcaggggcccgcatctctatggtgggaccatttccaggctacgcagccagaggggcagcctattacttgggcccgtttcaccgccgctttccggagaacccatgtgcccgccggagtcgtggctcttaaaaaaagggaattctgagagttgaagcaaggcaaccgctccgtgatggagtatttgcatgagttcaacaacctggcccgttacgccccggaggatgtgcgggaagatgaggagaagcaagagaagttcttggcaggaatggaccctgagctgtccgtccgtctagtctccggggactatccggatttccaacgtctggtggacaagagcatccgcttggaagccaagcacaaggaactggagtcgcacaagcgccgcttggcgaatttccgcaatcaacagggtgctaaccaaagggtccgctacaccaatccctatccagggggatcctcctcgcagcagcaacaacagcagcagcaacctcgctccgtgcctcgacctcaatacgtggtgcgcgtcccacagccgcagcagcagcagagtcagcaagggactcgtgcgccccgtcctcctacgccagccgtgcagtctggtcaaggctgcagggacgctcaaggtcagcagcgtctgtgcttcaactgcttcgagcccgggcactttgcggataaatgcccgaaaccgaggcgccagcaaggccaagcgcctccccgctccaacaacggtgggaaggatgtcattcagggtcgtgtgaaccacgtgacggccgaggacgtgctgacaactccagacgtcatcgttggtacgttcctcattcattccatccctgctaccattttgttcgactctggagcttcccactcgtttatatctgtgccattcgtggggagaaatcagttgggggtagaaaggcttagaaaccctctgctcatcaccacccctggaggggttatgacagcaaagtattatagtcctgccgtccctatagaaattcaggggattccttttccctcggacctgattctgctagacaccaagaacttggatgtgatccttggaatgaattggttggctcaatttcaaggagtagtggattgcgcgagacgcactgttactctgtaccgaggaccggaacaaccggttgttttctttgcacccccaacctctgtcagtagttcagaacttcatcagataggactgtcagaaatccccatcgtcagagagttcggagatgtgtttccggaagaactacccggtatgccgcccaagcgagagattgagttccggatagatcttgctccaggaaccactcctctgtacaagcgaccctaccgtatggcagcaaatgaactggccgaagttaagaaacagttggaagagttgaaagagaaggggtatatacgtccgagtacttccccctggggcgctcctgtgatttttgtggagaagaaggacaagacgaagaggaggtgcgtcgactacagagccctcaatgaagtcaccatcaaaaacaagtaccctcttccccggatcgatgacctgttcgatcagcttaaaggtgccacggtattctccaagattgatcttcgttccggatatcaccagttgcgcatccgcgaagaagatattccgaagaccgcattcaccacgcgatacggactgtatgaattcacggtgatgtcgttcggtttaaccaatgcacctgccttcttcatgaacttaatgaacaaagtgttcatggaatacttggataagtttgttgtggttttcattgacgacattctgatatactcacaatcagaggaagaccatcagcaccatctccgtctggtgttgggaaagttgcgggaacatcaattgtatgccaaacttagcaagtgtgagttctggttgtccgaagtcaaattcttagggcacgtgatatctgctaaaggagttgctgtggaccccgaaacagtgaccgccgtcactgattggaagcaacccaagaccgtcactcaagtccgcagtttcttaggtttggcaggatactaccggaggttcatcgagaacttctccaaaatcgctcgacccatgacacagttgttgaagaaagaagagaaatttgtgtggagcccgcaatgcgagaaggcgtttcaaactctcaaagaaaagctggtttcctcgccagtgttagtcttgccagatactcgcaaggatttcatggtgtattgtgacgcttcgcgccaaggattggggtgcgtgctcatgcaggacggtcatgtggtggcctatgcctcacgccagctacgacctcatgaaggcaactaccctacccatgatttggagttagccgcggtggttcatgctctaaaaatctggcggcactatcttattgggaatcgctgtgaaatatataccgatcataagagtttgaaatacatcttcacccagtcggatctgaatcttcggcagaggagatggttagaactcatcaaggattatgatgtgggaattcactatcatcctggtaaggccaacgtggtcgccgacgctctgagtcgaaaaagccattgcaacactcttaacgtccgtggcattccacccgaacttaatcaacagatggaagccctgaaccttggcatagttagtcgtggattcttggctgcgttggaagccaaacctaccttgctcgatcaaatccgcgaggctcagaagaacgacccggacatgcatggactcctcaagaatatgaaacagggtaaagccgctggtttcacagaggatgaacacgggaccctatggaatggaaatcggcgtgtcaaggcagagcaccagcgaccggccggacttctccaacctctccaagtaccagaatggaaatgggatgaaattgggatggatttcatcaccggacttccaaaaacccaaggtggatatgattctatatgggtagttgtggatcgattaaccaaggtagctcgatttattcctgtgaagaccacctatggagggaacaaactagccgaactctacttcgctaggatcgtgagtcttcatggcgttcccaagaaaatcgtatctgataggggaagccaattcacctctcacttttggaagaagctccaagaagagctgggtaaatcagatcctagaagatatgcttcgcgcatgtgtcctagattttgggaagacctgggataagagtctcccctatgccgagttctcctacaataacagctaccaggccagtatacaaatggcaccttatgaagcgttgtacgggcgcaaatgccggacaccgctattgtgggaccaagttggggaaagccaagtgttcgggactgatatcctgagggaagctgaagctaaagtcagaaccattcgggataatctaaaagtggcacagtcccggcagaaaagttatgcagataaccgtcgccgtgacctggaattcgcagtgggtgactttgtgtatcttcgggtcacgccattgcgaggtgtacacaggtttcagacaaaagggaagctcgcacctcggtatgtgggtcctttccgtatcattgctcggcgcggagaagtcgcttaccagttggagctgcccgcctccttgggcaacgtgcatgatgtgttccatgtgtcgcaactcaagaaatgtctccgagtgccatccgagcaggccgactcagcgcaaattgaagttcgcgaagacttgacctacgtggagaggccagtgaaaatcctggacaccatggagcgcaggaccaggaaccgggtaatccgtttttgcaaggtccaatggagcaaccacgccgaggaagaagctacctgggagcgtgaagacgagctgaaggcggcccatcccgatctcttcgccagttcttccgaatctcggggtcgagattccgtt

SEQ ID NO: 14141 - DNA, 5373 bp, Oryza sativa
  Clone ID: TFbOSC23004j.C1.o1.fg
atggatgaagtcgggcgtcgatggacattctccagggcaaatgaaggctacacgagctgcggcccgatggccggcagcgttacccgtcgtggtttggacatgactggcttcgttttggagctgcggggcatgtgcgtggtcttggggtatccacatggagtggattaccaggccaggccgctcccggagcaggagggtgaggatgcagagccccgcgctggttgggaggtcactgcagtgatcctcgccggctcttctgagcggacttcgctgacagtcaccgcgggtggcgactccttccccgccgcttgccagaacgccgctctcctcgccatcggcacccttcaccagcgctacccggacgagttgcagcactcgccctaccgctaccaccctcgtcgcggaggagcccgcgactacgccaccttccgagacgccagctcggaggatgacgctaccgtcgtgcatctggcacgcatggtggaggcgtacgacgcggctcgtatcgacttccatcagatggtgcgccgtggcatggtcgagaacaacatgaagatcctggagctgcgtcaggagaacctgcagctcaagaaggacctcgacgcgttggaggcgcagctgcatcagctcaagatcgcccagggagaggacagccgacccaagcgtcgccgcgtctgccgcagccagaagatcaccgcccgcaagagcacctccaggcctgagcttgttcgtcagtccctggcgtggacctgcttcgtcgagacccctcgtgccgagcctgcgcccgtggttccccaggagggggaagcctccggcgttggtagctcggaggttgtgtggggcatggttacaccgatggtgacgaccaggagaaatgttaacaccggtgaaggcaaccaacccgaaggcagcaaccacaaccaccaaggcaatccacctccacctcctcctccgcctccaccaccaccaccagacaccaacgccattctcacccaaatcctcgcccagcaagctaacctgatgaatgctttcctccaccacctccaaaacccgccacaacagaatgctccaccaccacctccccaacactctaaactcgccgagttcctccgcatccgtccacctaccttctccagctccaacaatcccgtagatgctttggattggttgcatgccgtggggaagaagttagacactgtgcagtgcagtgacaaggagaaagtcgtcttcgccgcccaccagctgcaggggcccgcatctctctggtgggaccacttccaggctacgcagccagaggggcagccgatcacttgggctcgcttcaccgccgctttccggaaaacccatgtgcccgccggagtcgtggctctcaagaagagggaattccgagagttgaagcaaggcaaccgctccgtgatggagtacctgcatgagttcaacaatctagcccgttatgccccggaggatgtgcgggaagatgaggagaagcaagagaagttcttggcaggaatggaccccgagctgtctgttcgtctagtctctggagactacccggacttccaacgactggtggacaagagcatccgcttggaagccaagcacaaggagctggaatcgcacaagcgccgcttggcgaatttccgcaatcaacagggtgctaaccagagggtccgctacaccaatccctacccagggggatcctcctcgcagcagcagcagcagcagcaacctcgcccagcgcctcgacctcaattcgtggtgcgcgtcccacagccgcagcagcagcagaatcaacaagggactcgtgcgccccgtcctcctacgccagctgtgcagcccgttcaaggccgcagggacgctcaaggtcagcagcgtctgtgcttcaactgcttcgagcccgggcactttgcggataaatgcccgaagccaaggcgtcagcaaggccaagcgcctccccgctccaacaacggtggcaaggacgtcattcggggtcgtgtgaatcacgtgacggccgaggacgtgctgacaactccagacgtcatcgttggtacgttcctcgttcattccatccctgctacaattttgttcgactctggagcttcccactcgtttatatctgtgccattcgtggggagaaatcagttgggggtagaaaggcttagaaaccctctactcatcaccacccctggaggggttatgacagcaaagtattatagccctgccgtccctatagaaattcaggggattccttttccctcggatctgattctgctagacaccaagaatttggatgtgattcttgggatgaattggttggctcaattccaaggagtagtggattgcgcgaggcgcactgtcactctgtaccgagggccagaacaaccggttgttttctttgcacccccaacctctgccagaagttcagaacttcatcagatagaactgtcagaaatccccatagtcagagagttcggagacgtgtttccggaagaactacctggtatgccgcccaagcgagagattgagttccggatagatcttgctccaggaaccactcctctgtacaagcgaccctaccgtatggcagcaaatgaactagccgaagtaaagaaacagttggaagagttgaaagaaaaggggtacatacgtccgagtacttccccatggggtgctcctgtgatttttgtagagaagaaagacaagacgaagaggatgtgcgttgactacagagctctcaatgaagttaccatcaaaaacaagtaccctcttccccggatcgatgatctgttcgaccagcttaaaggtgccactgtattctccaagattgatcttcgttccggatatcaccaattacgtattcgtgaagaagatattccgaagaccgcattcactacgcgatatggactgtatgaattcacggtgatgtcgttcggcttgaccaatgctcctgccttcttcatgaacttaatgaataaagtgttcatggaatacttggacaagtttgttgtggttttcatcgatgacattctgatatactcacaatcagaggaagaccatcagcaccatctccgtctggtgttgggaaagttgcgggaacatcaattgtatgccaagcttagcaagtgtgagttctggttgtccgaagtcaaattcttggggcacgtgatatctgctaaaggagttgctgtggaccccgaaacagtgatcgccgtcaccgattggaagcaacccaagacagtcactcagattcgcagtttcttgggtttggcaggatattaccggagattcattgagaacttctccaaaatcgctcgacccatgacacagttgttgaaaaaagaagagaaatttgtgtggagcccgcaatgcgagaaggcgtttcaaactctcaaggaaaagctggtttcctcgccagtgttaatcttgccggatactcgcaaggatttcatggtgtattgtgatgcttcgcgccaaggattggggtgcgtgctcatgcaggacggtcatgtggtagcctatgcctcacgtcagctacgacctcatgaaggcaactaccctacacatgacttggagttagcagcggtggttcatgctctaaaaatctggcggcactatctcattgggaaccgctgtgaaatatatactgatcacaagagcttgaaatacatcttcacccagtcggatctgaatcttcggcaaaggagatggttagaactcatcaaggattatgatgtgggaatacactatcatcctggtaaggccaacgtggttgccgacgctctaagtcgaaagagccactgcaacactctcaacgtccgaggcattccacccgagcttaatcaacagatggaagccctgaacctaagcatggttggtcgcggattcttggctgcgttagaagccaagcccaccttgctcgatcaaatccgcgaggctcagaagaatgatccggacatgcatggactcctcaagaatatgaaacagggtaaagccgctggtttcacagaggatgaacacggaaccttatggaacggaaagcgggtatgcgttccagatagcagagaacttaaacagctgatacttcaggaagctcacgaaagtccttattccattcacccgggcagtaccaagatgtacttagacttgaaggagaaatactggtgggttagcatgaagcgggaaattgcagagtttgtggctctatgtgatgtgtgccagcgtgtcaaggcagaacaccaacgaccggccggacttctccaacctctccaagtgccagaatggaagtgggatgaaattgggatggatttcatcaccggacttccaaaaacccaaggtggatatgattctatatgggtaattgtggatcgactaacaaaggtggctcgatttattcctgtgaagaccacttatggagggaacaaactagcggagctctacttcgctaggatcgtgagtctccatggtattcccaagaaaatcgtatctgataggggaagccaattcacctctcacttttggaagaagctccaagaagagctgggtactcgattgaatttcagcaccgcctatcacccgcagacagatggacagaccgagcgtctaaatcagatcctagaagatatgctccgcgcatgtgtcctagatttcgggaagacttgggataagagtctcccctatgccgagttctcctacaataacagctatcaagccagcatacaaatggcaccttatgaagcgttgtacgggcgcaaatgccggacaccgttattgtgggaccaagttggagaaagccaagtgttcgggactgatatcctgagagaagctgaagctaaagtcagaatcattcgggataatctaaaggtggcacagtcccggcagaaaagttatgcagataaccgacgccgtgatctggaattcgcagtggatgattttgtgtatcttcgggtcacgccattgcgaggtgtgcacaggtttcagacaaaagggaagctcgcacctcggtatgtgggtccttttcgtatcactgctcgacgcggagaagtcgcctaccagctggagttgcccgcctccttgggcaacgtgcatgatgtgttccatgtgtcgcaactcaagaaatgtcttcgagtgccatccgagcaggccgactcagagcaaattgaagttcgcgaagatttgacctacgtggagaggccagtgaaaatcctgaacaccatggagcgcaggaccaggaaccgagtaatccgtttttgcaaggtccagtggagcaatcacgccgaaggagaagctacttgggagcgtgaagacgagctgaaggcagcccatcccgatctcttcgccagttcttccgaatctcggggtcgagattccgtttaa

SEQ ID NO: 14142 - DNA, 3609 bp, Oryza sativa
  Clone ID: TFbOSC23023j.C1.o2.fg
atggtcaccgccggcgaccaccggcgcggcggagcggcgcccgagagagcggagaggagagggaagcgagagggacggtccacggctcaccccgggacaacgaggacggcggaaacgacggccggagtggagaaaggcggcggcgcggttcgggatgccgagggcgacggtgctccggcggtcggcgggcgaagcggagcggcggacggggtcgacggcgacgcggcgacgcggaaggaggtgacgccgagtcgggaggaggaccggagcgacgacggtggcgaaacggagctcggcggcgacggcggagagagaggtgcacgacgcgagcacgaatccgacggcgagagcgagcggcgagcggcggaaacggaagagcgaagcacgggggacgattttatagcgccgagagggagagagggcggccggggaggaaggaaaccggccgcggagttctcgggctccattgatgacgccggcgaggattgcgggcgcgattcgaacgaatccgagggagagagagagggaaaagagggggaaacgggagagggaatcacgggggacgtgacactcaggagggggaaacctccggcgttggtagcacggaggatggtgacgaccaggagaaatgttaacaccggtgaaggcaaccaacccgaaggcagcaaccccaaccaccaaggcaatccacctccaccaccaccaccagacaccaatgccattctcacccaaatcctcgctcagcaggccaacatgatgaccgctttcctccaccacctccaaaatccgccacaacagaatgctccaccaccacctccccaacactctaaactcgccgagttcctccgcatccgcccacccaccttctctagctccaacaatcccgtggatgcgttggattggttgcatgccgtggggaagaagctggacactgtgcagtgcagtgatgaagagaaagtcatcttcgccgcccatcagctgcagggacccgcatctctatggtgggaccacttccaggctacgcagccagagggacagccgattacttgggctcgcttcaccgccgctttccggagaacccatgtgcccgccggagtcgtggctctcaagaagagggaattccgagagttgaagcaaggcaaccgctccgtgatggagtatttgcatgagttcaacaatctggcccgttacgctccggaggatgtgcgggaagatgaggagaagcaagagaagttcctggcaggaatggaccccgagctgtccgtccgtctagtctctggggactatccggatttccaacgtctggtggacaagagcatccgcttggaggccaagcacaaggagctggagtcgcacaagcgccgcttggcgaacttccgcaatcagcagggtgctaaccagagggtccgctacaccaatccctatccagggggatcctcctcgcagcagcaacaacagcagcagcaacctcgttccgcgcctcgacctcaattcgtggtgcgcgtcccacagccgcagcagcaacagaatcaacaagggactcgtgcgccccgtcctcctacgccagctgtgcagcccgttcaaggccgcagggacgctcaaggtcagcagcgtctatgcttcaactgcttcgagcccgggcactttgcggataaatgcccgaagccaaggcgtcagcaaggccaagcgcctccccgctccaacaacggagggaaggatgtcattcggggccgtgtgaatcacgtgacggccgaggacgtgctgacaactccagacgtcatcgttggtacgttcctcgttcattccatccctgctaccattttgttcgactctggagcttcccactcgtttatatctgtgccattcgtggggagaaatcagttgggggtagaaaggcttaggaaccctctgctcatcaccacccctggcggggttatgacagcaaagtattatagccctgccgttcctatagaaattcaggggattccttttccctcggatctgattctgctagacaccaagaacttggatgtgatccttgggatgaattggttggctcaattccaaggagtagtggattgcgcgagacgcacggtcactctgtaccgaggaccggaacaaccggttgtcttctttgcacccccaacctctgtcagaagttcagaactgcatcagataggactgtcagaaatccccatcgtcagggagttcggagatgtgtttccggaagaactacctggtatgccgcccaagcgagagattgagttccggatagatcttgctccaggaaccactcctctgcacaagcgaccctaccgtatggcagcaaatgaactggccgaagtaaagaaacagttggaagagttgaaaggaaaggggtatatacgtccgagtacttccccctggggtgcttctgtgatttttgtagagaagaaagacaagacgaagaggatgtgcgttgactacagagctctcaatgaagtcaccatcaaaaacaagtaccctcttcctcggatcgatgatctgttcgatcagcttaaaggtgccactgtattctccaagattgatcttcgttccgggtaccaccaattacgtatccgcgaggaagatattccgaagaccgcattcaccacgcgatacgggctgtatgaattcacggtgatgtcattcggtctaaccaatgcacctgccttcttcatgaacttaatgaacaaagtgttcatggaatacttggataagtttgttgtggttttcattgatgacattctgatatactcacaatcagaggaagaccatcaacaccatctccgtctggtgttgggaaagttgcgggaacatcaattgtatgccaagcttagcaagtgtgagttctggttgtccgaagtcaaattcttggggcacgtgatatctgctaaaggagttgctgtggaccccgaaacagtgaccgccgtcactgaatggaagcaacccaagacagtcacccaaatccgcagtttcttgggtttggcaggatattaccggagattcatcgagaacttctccaaaatcgctcgacccatgacacagttgttgaagaaagaagagaaatttgtgtggagcccgcaatgcgagaaggcgttccaaactctcaaggagaagctggtttcctcgccagtgttaatcttgccggatactcgcaaggatttcatggtgtactgtgatgcttcgcgccaaggattggggtgcgtgctcatgcaggacggtcatgtggtagcctatgcctcacgccaactacgacctcatgaaggcaactaccctacgcatgacttggagttagcagcggtggttcatgctctaaaaatctggcggcactatctcattgggaaccgctgtgaaatatataccgatcataagagcttgaaatacatcttcactcagtcggacctgaatcttcgacaaaggagatggttagaactcatcaaggattatgatgtgggaattcattatcatccgggtaaggctaacgtggttgcctgtcacgtcctgataaattcatcccgaattaaaaatcattcgctaaaaggaataatagaattaattaaaattcgaaaagaaattggcaaacactaa

SEQ ID NO: 14143 - DNA, 5034 bp, Oryza sativa
  Clone ID: TFbOSC23671j.C1.o1.fg
atggaggtggatgaagtcgggggtcgatggacattctccagggcaaatgaaggctacacgagctgcggcccggtagtcgagatgtcatggcacagggccggtgtcctgctgctaggggctcagtcctgcctgcctgtcccgggggttccggccgtaggtgggattgggtcggtactcttgtctatggctaggatgggttggaaactatgtcacgtcttccgtctgtataccgtggtgatggccggcagcgtcacccgtcgtggtttggacatgactggcttcgtcttggagctgcgaggcatgtgcgtggtcttggggtatccacatggagtggattaccaggccaggccactcccggagcaggagggtgaggatgcagagccccacgctggttgggaggtcactgcagtgatcctctccggctctcccgagcggacctcgctggcagtcaccgcgggtggagattccttccccgccgcttgtcagaacgccgctctcctcgccatcggcactcttcaccagcactacccggacgagttgcagcactcgccctaccgctaccaccctcgtcgcggaggagcccgcgactacgccaccttccgggatgctagctcggaggatgacgctaccatcgtgcacctggcgcgcatggtggaggcgtacgacgcggctcgtatcgatttccatcagatggtgcgccgcgggatggtcgagaacaacatgaagatcctggagctgcgtcaggagaacctgcagctcaagaaggacctagatgcggtggaggcgcagctgcatcagctcaagatcgctcagggagaggactgccgtcccaagcgtctgccgcagccagaagatcaccgcccgcaagagcacctccaggcccgagcttgttcgtcagtccctggcgtggacctgcttcgtcgagacccctcgtgccgagcctgcgcccgtggttccccaggagggggaaacctccggcgttggagaaatgttaacaccggtgatggcaatcaacctgaaggcagcaaccccaaccaccagggcaacccaccttcaccttctgcttcgcctccaccaccaccaccagataccaatgccattctcacccaaatcctcgctcagcaggccaacatgatgactgctttcctccaccacctccaaaatccgccacaacagaatgctccaccaccacctccacaacactctaaactcgccgaattcctccgcatccgcccacctaccttctcgagctccaacaaccccgtggatgcgttggattggttgcatgccgtggggaaaaagctagacacggtgcagtgcagcgatgaggagaaagtcatcttcgccgcccaccagctgcaggggcccgcatctctatggtgggaccacttccaggctacgcagccagaggggcaacctatcacctgggctcgcttcaccgccgctttccggagaacccatgtgcccgccggagtcgtggccctcaagaagagggagttccgggagttgaagcaaggcaaccgctccgtgatggagtatttgcacgagttcaacaacctggcccgttacgctccggaggatgtgcgggaagatgaggagaagcaagagaagttcttggcgggaatggaccctgagctgtccgtccgtctagtctccggggactatccggatttccaacgtctggtggacaagagcatccgcttggaagccaagcacaaggaactggagtcgcacaagcgccgcttggcgaatttccgcaatcaacagggtgctaaccagcgggttcgctacaccaatccctacccagggggatcctcttcgcagcagcagcagcaacaacctcgctccgcgcctcgacctcaattcgtggtgcgcgtcccacagccgcagcagcagcagaatcaacaagggactcgtgtgccccgtcctcctacgccagccgtgcagcctggtcaaggccgcagggacgctcaaggtcagcagcgtctgtgcttcaactgcttcgagcccgggcattttgcggataaatgcccaaagccgaggcgtcagcaaggccaagcgcctcctcgctccaacaacggtgggaaggatgtcactcggggtcgtgtgaaccatgtgacggccgaggacgtgctgacaactccagacgtcatcgttggtacgttcctcatccattccgtccctgctaccactttgttcgactctggagcttcccactcgtttatatctgtgccattcgtggggagaaatcagttgggggtagaaaggcttagaaaccctctgctaatcaccacccctggaggggttatgacagcaaagtattatagccctgccgtccctatagaaattcaggggattccttttccctcggatctgattctgctagacaccaagaacttggatgtgatccttgggatgaattggttggctcaattccaaggagtagtggattgcgcgagacgcactgtcaccctgtaccgagggccggaacaaccggttgtcttctttgcacccccaacctctgttagaagttcagaactgcatcagataggactgtcagaaatccccatagtcggagagttcggagacgtgtttccggaagaactacctggtatgccgcccaagcgagagattgagttccggatagatcttgctccaggaaccactcctctgtacaagcgaccctaccgcatggcagcaaatgaactggccgaaaagaaagacaagacgaagaggatgtgcgttgactacagagctctcaatgaagtcaccatcaagaacaaatatcctcttccccggatcgatgatctgttcgatcaacttaaaggtgccactgtattctccaagatcgatcttcgttccggatatcaccaattacgtattcgggaagaagatattccgaagaccgcattcaccacgcgatacgggctgtatgaattcacggtgatgtcattcggtctaaccaatgcacctgccttcttcatgaacttaatgaacaaagtgttcatggaatacttggacaagtttgttgtggttttcattgatgacattctgatatactcacaatctgaggaagaccatcagcaccatctccgtctggtgttgggaaagttgcgggaacatcaattgtatgccaagcttagcaagtgtgagttctggttgtccgaagtcaaattcttagggcatgtgatatctgctgaaggagttgctgtggaccccgaaacagtgaccgccgtcaccgattggaagcaacccaagacagtcactcaaattcgcagtttcttaggtttggcaggatactaccggagattcatcgagaatttctccaaaatcgctcggcccatgacacaattgttgaagaaagaagagaaatttgtgtggagcccgcaatgcgagaaggcattccaaactctcaaagaaaagctggtttcctcgccagtgttaatcttgccggatactcgcaaggatttcatggtgtactgtgatgcttcgcgccaaggattggggtgcgtgctcatgcaggatggtcatgtggtggcctatgcctcacgccagctacggccccatgaaggcaactaccctacccatgatttggagttagcagcggtggttcatgctctaaaaatctggcggcactatctcattgggaatcgctgtgaaatatatactgatcataagagtttgaaatacatcttcacccagtcagatctgaatcttcggcaaaggagatggttagaactcatcaaggattatgatgtgggaattcactatcatcctggtaaggccaacgtggttgccgacgctctaagccggaaaagccattgcaacactcttaacgcccgaggcattccacccgaacttaatcaacagatggaagccctgaacctaagcatagtgggtcgtggattcttagctgcgttggaagccaagcccaccttgctcgatcaaatccgcgaggctcagaagaatgatccggacatgcatggactcctcaagaatatgaaacagggtaaagctgctggtttcacagaagatgaacacggaaccttatggaacggaaatcggcgtgtcaaggcagagcaccaacgaccggccggacttctccaacctctccaagtaccagaatggaaatgggatgaaattgggatggatttcatcaccggacttccaaaaacccaaggtggatatgattctatatgggtagttgtggatcgattaaccaaggtagctcgatttattcctgtgaagaccacctatggagggaacaaactagccgagctctacttcgctaggatcagtcaaactgcaggcatggagttgggaacccggctgaatttcagcaccgcgtatcacccgcagacagatggacagaccgagcgtctaaatcagatcctcgaagatatgcttcgcgcatgtgtcctagatttcgggaagacttgggataagagtctcccctatgccgagttctcctacaataacagctatcaagccagcatacaaatggcaccctatgaagcgttgtacgggcgcaaatgccggacaccgctattgtgggaccaagttggggaaagtcaagtgttcgggactgatatcctgagagaagctgaagctaaagtcagaatcattcgggataatctaaaggtggcacagtcccggcagaaaagttatgcggataaccgtcgccgtgacctggaattcgcagtgggtgattttgtatatcttcgggtcacgccattgcgaggtgtacataggtttcagacaaaggggaagctcgcacctcggtatgtgggtcctttccgcatcattgctcggcgtggagaagtcgcttaccagctggagctgcccgcctccttgggcaacgtgcatgatgtgtttcatgtgtctcaactcaagaaatgtcttcgagtgccatccgagcaggccgactcagagcaaattgaagttcgcgaagatttgacctacgtggagaggccaatgaaaatcctggacaccatggagcgcaggaccaggaaccgggtaatccgtttttgctag

SEQ ID NO: 14144 - DNA, 5106 bp, Oryza sativa
  Clone ID: TFbOSC25209j.C1.o1.fg
atggatgaagtcgggggtcgatggacattctccagggcaaatgaaggctacacgagctgcggcccgatggccggcagcgtcacccgtcgtggtttggacatgactggcttcgttttggagctgcggggcatgtgcgtggtcttgggatatccacatggagtggactaccaggccaggccgctcccggagcaggagggtgaggatgcagagccccacgctggttgggaggcatacgacgcggctcgtatcgacttccatcagatggtgcgtcgtggcatggtggagaacaacatgaagattctggagctgcgtcaggagaacctgcagctcaagaaggacctcgacgcgttggagtcgcagctgcaccagctcaagctcgcccaaggagaggacagccgccccaagcgccgccgcgtctgccgcagccagaagatcaccgcccgcaagagcacctccaggcccgagcttgttcgtcagtccttggcgtggacctgcttcgtcgagacccctcgtgccgagcctgcgcccgtggttcctcaggagggggaagcctccggcgttggtagcacggaggatgcgctgttgctcgccttccgtcctggcccgtcgcagcggagaaatgttagcaccggtgaaggcaaccaacccgaaggcagcaaccccaacccccaaggcaatccacctccaccaccaccaccagacaccaacgccattctcacccaaatcctcgcccagcaggccaacatgatgactgctttcctccaccacctccaaaatccgccacagcagaatgctccaccaccacctccacaacactctaaactcgccgagttcctccgtatccgcccacctaccttctctagctccaacaaccctgtggatgcgttggattggttgcatgccgtggggaaaaagctagacactgtgcagtgcagcgatgaggagaaagtcatcttcgccgcccaccagctgcaggggcccgcatctctatggtgggaccacttccaggctacgcagccagagggacagcctattacttgggcccacttcaccgccgccttccggagaacccatgtgcccgccggagtcatggctctaaagaaaagggaattccgagagttgaagcaaggcaaccgctccgtgatggagtatttgcatgagttcaacaacctggcccggtacgccccggaggatgtgcgggaagatgagaagaagcaagagaagttcttggcaggtatggaccctgagctgtccgtccgtctagtctccggggactatccagatttccaacgtctggtggacaagagcatccgcttggaagccaagcacaaggaactggagtcgcacaagcgccgcttggcgaacttccgcaatcaacagggtgctaaccaaagggtccgctacaccaatccctatccagggggatcctcctcacagcagcaacaacagcagcagcaatctcgctccgcgccccgacctcaattcgtggtgcgcgtcccacagccgcagcagcagcagaatcaacaagggactcgtgcaccccgtcctcctacgccaactgtgcagcccgttcaaggccgcagggacgctcaaggtcagcagcgtctgtgcttcaactgcttcgagcccgggcactttgcggataaatgcccgaagccaaggcgtcagcaaggccaagcgcctccccgccccaacaacggtgggaaggacgtcattcggggtcgtgtgaaccacgtgacggccgaggacgtgctgacaactccggacgtcatcgttggtacgttcctcatccattccatccctgctacaattttgttcgactctggagcttcccactcgtttatatctgtgccattcgtggggaaaaatcagttgggggtagaaaggcttagaaaccctctgctcatcaccacccctggaggggttatgacagcaaagtattatagccctgccgtccctatagaaattcaggggattcctttttcctcggatctgattctgctagataccaagaacttggatgtgattcttgggatgaattggttggctcaattccaaggagtagtggattgcgcgagacgcactgtcactctgtaccgagggccggaacaaccggttgttttctttgcacccccaacctctgtcagaagttcagaacttcatcagataggactgtcagaaatccccattgtcagagagttcggagacgtgtttccggaagaactacctggtatgccgcccaagcgagagattgagttccggatagatcttgctccaggaaccactcctctgcacaagcgaccctaccgtatggcagcaaatcagaacctggcggaattcaagaaacagttggaagagttgaaagaaaaggggtatatacgtccgagtacttccccttggggtgctcctgtgatttttgtggagaagaaagacaaaacgaagaggatgtgcgttgactacagagctctcaatgaagtcaccatcaaaaacaagtaccctcttccccggatcgatgatctgttcgatcagcttaaaggtgccactgtattctccaagattgatcttcgttccggatatcaccaattacgtatccgtgaagaagatattccgaagaccgcattcaccacgcgatacgggctgtatgaattcacggtgatgtcgttcggtctaaccaatgcacctgccttcttcatgaacttaatgaacaaagtgttcatggaatacttggataagtttgttgtggttttcattgatgacattctgatatactcacaatcagaggaagaccatcagcaccatctccgtctggtgttgggaaagttgcgggaacatcaattgtatgccaagcttagcaagtgtgagttctggttgtccgaagtcaaattcttggggcacgtgatatctgctaaaggagttgctgtggaccccgaaacagtgaccgccgtcaccgattggaagcaacccaagacagtcactcaagtccgcagtttcttaggtttggcgggatactaccggagattcatcgagaacttctccaaaatcgctcgacccatgacacagttgttgaagaaagaagagaaatttgtgtggagcccgcaatgcgagaaggcgttccaaactctcaagaaaaagctggtttcctcgccagtgttaatcttgccggatactcgcaaggatttcatggtgtattgtgatgcttcgcgccaaggattggggtgcgtgctcatgcaggatggtcatgtggtagcctatgcctcacgtcagctacggcctcatgaaggcaactaccctacacatgatttggagttagccgcagtggttcatgctctaaaaatctggcggcactatctcattgggaatcgctgtgaaatatatactgatcataagagtttgaaatacatcttcacccagtcagatctgaatcttcggcaaaggagatggttagaactcatcaaggattatgatgtgggaattcactatcatcctggtaaggccaacgtggttgccgacgctctaagtcggaaaagccattgcaatactcttaacgtccgaggcattccacccgaacttaatcaacagatggaagccctgaacctaagcatagttggtcgtggattcttggctgcgttagaagccaagcctaccttgctcgaccaaatccgcgaggctcagaagaatgatccggacatgcatggactcctcaagaatatgaaacagggtaaagccgctggtttcacagaggatgaacacggaactctatggaacggaaagcgggtgtgcgttcccgataacagagaacttaaacagctgatacttcaggaagctcacgaaagtccttattcaatccacccgggcagtacaaagctgtacttagatttgaaggagaaatactggtgggtcagcatgaagcgggaaattgcagagtttgtggccctatgtgatgtgtgccagcgtgtcaaggcagaacaccagcgaccggccggacttctccaacctctccaagtgccagaatggaaatgggatgaaattgggatggatttcatcactggacttccaaaaacccaaggtggatatgattctatatgggtaattgtggatcgactaacaaaggtagctcgatttattcctgtgaagaccacctatggagggaacaaactagcggaactctatttcgctaggatcgtgagtctccatggcattcccaagaaaatcgtatctgataggggaagccaattcacctctcacttctggaagaagctccaagaagagctgggcactcgattgaatttcagcaccgcgtatcacccgcagacagatggacagaccgagcgtctaaaccagatcctagaagatatgctccgcgcatgtgtactagatttcgggaagacctgggataagagcctcccctatgccgagttttcctacaacaacagctatcaagccagcatacaaatggcaccttatgaagcgttgtacgggcgcaaatgccggacaccgctattgtgggaccaagttggagaaagccaagtgttcgggactgacatcctgagagaagctgaagctaaagtcagaatcattcgggataatttaaaggtggcacagtcccggcagaaaagttatgcagataaccgtcgccgtgacctggaattcgcagtgggtgattttgtatatcttcgggtcacgccattgcgaggtgtacacaggtttcagacaaaagggaagctcgcacctcggtatgtgggtcccttccgtatcattgctcgacgcggagaagtcgcctaccagctggagttgcccgcctccttgggtaacgtgcatgatgtgttccatgtgtcgcaactcaagaaatgtcttcgagtgccatccgagcaggccgactcagagcaaattgaagttcgcgaagacttgacctacgtggagaggccagtgaaaatcctggacaccatggagcgcaggaccaggaaccgagtgatccgtttttgcaaggtccagtggagcaaccacgccgaagaagaagctacttgggagcgtgaagacgagctgaaggcagcccatcccgatctcttcgccagttcctccgaatctcggggtcgagattccgtttaa

SEQ ID NO: 14145 - DNA, 1927 bp, Oryza sativa
  Clone ID: TFbOSC25210j.C1.o1.fg
atgtcatggcagagggttggtgccctgctgctaggggctcagtcctgcctgcctgtcccgggggttccggccatggccggcagcgtcacccgtcgtggtttggacatgactggtttcgtcttggagctgcggggcatgtgcgtggtcctggggtatccacatggagtggattaccaggccaggccgctcccggagcaggagggtgaggatgcagagccccacgctggttgggaggtcactacagtgatcctctccggctctcccgagcggacttcgctggcagtcaccgcgggtggagattccttccccgccgcttgccagaacgccgctctcctcgccatcggcactcttcgccagcgctacccggacgagttgcagcactcgccctaccgctaccaccctcgtcgcggaggagcccgcgactacgccaccttccgggatgctagctcggagaatgacgctaccatcgtgcacctggcaggcatggtggaggcgtacgacgcggctcgtatcgacttccaccagatggtgcaccgtgggatggtcgagaacaacatgaagatcctggagctgcgtcaagagaacctgcagctcaagaaggacctcgacgcggtggaggcgcagctgcagcagctcaagatcgcccagggagaggactgccgccccaagcgtcgccgcgtctgccgcagccagaagatcactgcccgcaagagcacctccaggcccgagctgatggtgacgaccaggagaaccgctgttaccggtgatggcaaccaacccgaaggcagcaaccacaaccaccagggcaacccacctccacctccccctccgccaccaccaccaccaccagacaccaacgccattctcacccaaatcctcgcccagcaagccaacatgatgactgctttcctccaccacctccaaaatccgccacaacagaatgctccaccaccacctccacaacactctaaactcgccgagttcctccgcatccgcccacctaccttctcgagctccaacaaccccatggatgcgttggattggttgcatgccgtggggaagaagctggacactgtgcagtgcagtgatgaagagaaagtcatctttgccgcccaccagctgcaggggcccgcatctttatggtgggaccacttccaggctacgcagccagaagggcaaccgattacttgggctcgcttcaccgccgctttccggagaacccatgtgcccgccggagtcgtggctcttaagaagagggagttccgagagttgaagcaaggcaaccgctccgtgatggagtatttgcatgagttcaacaatctggcccggtacgctccggaggatgtgcgggaagatgaggagaagcaagagaagtttctggcgggaatggaccctgagctgtccgttcgtctagtctctggggactacccggacttccaacgtctggtggacaagagcatccgcttggaggccaagcacaaggagctggagtcgcacaagcgccgcttggcgaacttccgcaatcaacagggtgctaatcaaagggtccgctacaccaatccctacccagggggatcctcctcacagcagcaacaacagcagcagcaatctcgctccgcgccccgacctcaattcgtggtgcgcgtcccacagccgcagcagcagcagaatcaaccagggactcgtgcaccccgtcctcctacgccaactgtgcagcctgttcaagtccgcagggacgctcaaggtcagcagcgtctgtgcttcaactgcttcgagcccgggcactttgcggataaatgcccgaagccaaggcgtcagcaaggccaagcgcctccccgccccaacaacggtggcaaggatgtcattcggggtcgtgtgaaccacgtgacggccgaggacgtgctgacaactccagacgtcatcgttg

SEQ ID NO: 14146 - DNA, 1486 bp, Oryza sativa
  Clone ID: TFbOSC25222j.C1.o1.fg
atgaagattctggagctgcgtcaggagaacctgcagctcaagaaggacctcgacgcgttggagtcgcagctgcaccagctcaagctcgcccaaggagaggacagccgccccaagcgccgccgcgtctgccgcagccagaagatcaccgcccgcaagagcacctccaggcccgagcttgttcgtcagtccttggcgtggacctgcttcgtcgagacccctcgtgccgagcctgcgcccgtggttcctcaggagggggaagcctccggcgttggcagcacggaggatgcgctgttgctcgccttccgtcctggcccgtcgcagcggagaaatgttagcaccggtgaaggcaaccaacccgaaggcagcaaccccaacccccaaggcaatccaccttcaccaccaccaccagacaccaacgccattctcacccaaatcctcgcccagcaggccaacatgatgactgctttcctccaccacctccaaaatccgccacagcagaatgctccaccaccacctccacaacactctaaactcgccgagttcctccgtatccgcccacctaccttctctagctccaacaaccccgtggatgcgttggattggttgcatgccgtggggaagaagctggacactgtgcagtgcagtgatgaagagaaagtcatctttgccgcccaccagctgcaggggcccgcatctctctggtgggaccacttccaggctacgcagccagaggggcaacctatcacttgggcccacttcaccgccgctttccggagaacccatgtgcccgccggagttgtggctcttaagaagagggagttccgggagttgaagcaaggcaaccgctccgtgatggagtatttgcatgagttcaacaatctggcccgttacgccccggaggatgtgcgggaagatgaggagaagcaagagaagtttctggcaggaatggaccctgagctgtctgttcgtctagtctctggggactacccggacttccaacgtctggtggacaagagcatccgcttggaggccaagcacaaggagctggagtcgcacaagcgccgcttggcgaacttccgcaatcagcagggtgctaatcaaagggtccgctacaccaatccctatccagggggatcctcctcacagcagcaacaacagcagcagcaatctcgctccgcgcctcgacctcaattcgtggtgcgcgtcccacagccgcagcagcagcagaatcaacaagggactcgtgcaccccgtcctcctacgccaactgtgcagcccgttcaaggccgcagggacgctcaaggtcagcagcgtctgtgcttcaactgcttcgagcccgggcactttgcggataaatgcccgaagccaaggcgtcagcaaggccaagcgcctccccgctccaacaacggtgggaaggacgtcattcggggtcgtgtgaaccacgtgacggccgaggacgtgctgacaactccggacgtcatcgttg

SEQ ID NO: 14147 - DNA, 1959 bp, Oryza sativa
  Clone ID: TFbOSC25596j.C1.o1.fg
atgactggcttcgtcttggagctgcgaggcatgtgcgtggtcttggggtatccacatggagtggattaccaggccaggccactcccggagcaggagggtgaggatgcagagcctcacgctggttgggaggtcactgcagtgatcctctccggctctcccgagcggacttcgctggcagtcaccgcgggtggggattccttccccgccgcttgccagaacgccgctctcctcgccatcggcacccttcaccagcgctacccggacgagttgcagcactcgccctaccgctaccaccctcgtcgcggaggagcttgcgactacgccaccttccgagacgccagctcggaggatgacgctaccgtcgtgcatctggcacgcatggtggaggcgtacgacgcggctcgtatcgacttccatcagatggtgcgccgtggcatggtggagaacaacctgaagatcctggagctgcgacaggagaatctgcagctcaagaaggacctcgacgcgttggaggcgcagctgcaccagctcaagatcgcccagggagagatcagccgtcccaagcgtcgccgcgtctgccgcagccagaagatcaccgcccgtaagagcacctccaggcccgagcttgttcgtcagtccctggcgtggacttgcttcgtcgagacccctcgcgccgagcctgcgcccgtggttccccaggagggggaagcctccggcgttggtagctcggagggtgcgctgttgctcaccttccgtcctggcccgtcgcagcggagaaatgttaacaccggtgaaggcaaccaacccgagggcagcaaccccaacccccaaggcaacccaccttcaccaccaccaccagacaccaatgccattctcacccagatcctcgcccagcaagccaacatgatgaatgctttcctccaccacctccaaaacccgccacaacagaatgctccaccaccccctccccaacactccaaactcgccgaattcctccgcatccgcccacctaccttctccagctccaacaaccccgtggatgctttggattggttgcatgccgtggggaagaagctggacacggtgcagtgcagcgacgaagagaaagtcatcttcgccgcccaccagctgcaggggcccgcatctctctggtgggaccatttccaggccacgcagccagaagggcaaccgattacttgggctcgcttcaccgccgctttccggagaacccatgtgcccgctggagtcgtggctcttaagaaaagggaatttcgggagttgaagcaaggcaaccgctccgtgatggagtatttgcatgagttcaacaatctagcccgttatgccccggaggatgtgcgggaagatgaggagaagcaggagaagttcttggcgggaatggaccctgagctgtccgttcgtctagtctctggggactatccggattttcaacgactggtggacaagagcatccgcttggaagccaagcacaaggagctggaatcgcacaagcgccgcttggcgaatttccgcaatcaacagggtgctaaccagagggttcgctacaccaatccctacccagggggatcctcctcgcagcagcaacaacagcagcagcaacctcgcccagcgccccgacctcagttcgtggtgcgcgtcccacagccgcagcagcagcagaatcagcaagggactcgtgcgccccgtcctcctacgccagctgtgccgcctgttcaaggccgcagggacgctcaaggtcagcagcgtctgtgcttcaactgcttcgagcccgggcactttgcggataaatgcccaaagccaaggcgtcagcaaggccaagcgcctccccgctccaacaacggtggcaaggacgtcatccgtggtcgtgtgaatcacgtgacggccgaggacgtgctgacaactcccgacgtcatcgttgaagttcagaactgcatcagatag

SEQ ID NO: 14148 - DNA, 4254 bp, Oryza sativa
  Clone ID: TFbOSC25709j.C1.o1.fg
atgatgactgctttcctccaccacctccaaaatccgccacaacagaatgctccaccaccacccccacaacactttaaactcgccgagttcctccgcatccgtccacctaccttctctagctccaacaaccccgtggatgcgttggattggttgcatgccgtggggaaaaagctagacaccgtgcagtgcagcgatgaggagaaagtcgtcttcgccgcccaccgactgcaggggcccgcatctctatggtgggaccatttccaggctacgcagccagaggggcagcctattacttgggcccgcttcaccgccgccttccggaggacccatgtgcccgccgaagtcatggcccttaagaaaagggaattccgagagttgaagcaaggcaaccgctccgtgatggagtatttgcatgagtttaacaacctggcccggtacgccccggaggatgtacgggaagatgaggaaaagcaggagaagttcttggcaggaatggaccctgagctgtccgtgcgtctagtctccggtgactatccggatttccaacgtctggtggacaagagcatccgcttggaagccaagcacaaggaactagagtcgcacaagcgccgcttggcgaatttccgcaatcaacagggtgctaaccaaagggtccgctacaccaatccctatccagggggatcgtcctcgcagcagcaacagcagcaacaacctcgctccgcgccccgacctcaattcgtggtgcgcgtcccacagccgcagcaacagcagagtcaacaagggactcgtgcgacccgtcctcctatgccagccgtgcagcctggtcaaggccgcagggacgttcaaggtccgcagcgtctgtgcttcaactgcttcgagcccgggcactttgcggataaatgcccgaagccgaggcgccagcaaggccaaccgcctccccgctccaacaacggtggtaaggatgtcattcgggatcgtgtgaaccacgtgacggccgaggacgtgctgacaactccagacgtcatcgttggtacgttcctcattcattccatccctgctaccattttgttcgactctggagcttcccactcgtttatatcggtgccattcgtggggagaaatcagttgggggtagaaaggcttaggaaccctctgctcatcaccacccctggaggggttatgacagcaaagtattatagtcctgccgtccctatagaaattcaggggattccttttccctcggatctgattcttctagacaccaagaacttggatgtgatccttgggatgaattggttggctcaattccaaggaatagtggattgtgcaagacgcactgtcactctgtaccgagggccggaacaaccggttgttttctttgcacccccaacctctatcagtagttcagaacttcatcagataggactgtcagaaatccccatcgtcagagagttcggagacgtgtttccggaagaactacccggtatgccgcccaagcgagagattgagttccggatagatctttctccaggaaccactcctctgtacaagcgaccctaccgtatggcagcaaatgaactggccaaagttaagaaacagttggaagagttgaaagaaaaggggtatatacgtccgagtacttccccctggggtgctcctgtgatttttgtggagaagaaagacaagacgaagaggatgtgcgttgactacagagctctcaatgaagtcaccatcaaaaacaagtaccctcttccccggatcgatgatctgttcgatcagcttaaaggtgccacggtattctccaagattgatcttcgttccggatatcaccagttgcgcatccgtgaagaagatattccgaagaccgcattcaccacgcgatacggactgtatgaattcacggtgatgtcattcggtttaaccaatgctcctgccttcttcatgaacttaatgaagaaagtgttcatggaatacttggataagtttgttgtggttttcattgatgacattctggtatactcacaatcagaggaagaccataagcaccatctccgtctggtgttggggaagttgcgggaacatcaattgtatgccaaacttagcaagtgtgagttctggttgtccgaagtcaaattcttagggcacgtgatatctgctaaaggagttgctgtggaccccgaaacagtgaccgccgtcactgattggaagcaacccaagacagtcactcaaattcgcagtttcttaggtttggcaggatactaccggaggtttatcgagaacttctccaaaatcgctcgacccatgacacagttgttgaagaaagaagagaaatttgtgtggagcccgcaatgcgagaaggcgttccaaactctcaaagaaaagctggtttcctcgccagtgttaatcttgcaggatactcgcaaggacttcatggtgtattgtgacgcttcgcgccaaggattggggtgcgtgctcatgcatgacggtcatgtggtggcctatgcctcacgccagctacggcctcatgaaggcaactaccctacccatgatttggagttagccgcggtggttcatgctctaaaaatctggcggcactatctcattgggaatcactgtgaaatatatactgatcataagagtttgaaatacatcttcacccagtcggatctgaatcttcggcagaggagatggctagaactcatcaaggattatgatgtgggaattcactatcatcctggtaaggccaacgtggtcgccgacgctctaagtcgaaaaagccattgcaacactcttaacgtccgtggcattccacccgaacttaaccaacagatggaagccctgaatctaagcataaatatgaaacagggtaaagccgctggtttcacagaggatgaacacggaaccctatggaacggaaatcgggtatgcgttccagataacagagaacttaaacaactgatacttcaggaagctcacgaaagtccttattccatccaccctggcagtacgaagatgtacttagacttgaaggagaaatactggtgggttagtatgaagcgggaaattgcagagttcgtggccctttgtgatgtgtgccagcgtgtcaaagcagagcaccaacgaccggccggacttctccaacctctccaagtaccagaatggaaatgggatgaaattgggatggatttcatcaccggacttccaaaaacccaaggtggatatgattctatatgggtagttgtggatcgattaaccaaggtagctcgatttattcctgtgaagaccacctatggagggaacaaactagccgagctctacttcgctaggatcgtgagtctccatggcgttcccaagaaaatcgtatctgataggggaagccaattcacctctcacttttggaagaagctccaagaagagctgggtacccgattaaatttcagcaccgcgtatcacccgcagacggatggacagaccgagcatctaaatcagatcctagaagatatgcttcgcgcatgtgtcctagatttcgggaagacctgggataagagtctcccctatgccgagttctcctacaataacagctaccaagccagtatacaaatggcaccttatgaagcgttgtatgggcgcaaatgccggacaccgctcttgtgggaccaagttggggaaagtcaagtgttcgggactgatatcctgagaaaagctgaagcgaaggtcagaaccattcgggataatctaaaggtggcacagtcccggcagaaaagttatgcagataaccgtcgccgtgacctggaatttgcagtggacgattttgtgtaccttcgggtcacgccattgcggggtgtacacaggtttcagacaaaagggaagctcgcacctcggttcgtgggtcctttccgtatcattgctcggcgcggagaagtcgcttaccagttggagctgcccgcctccttgggcaacgtgcatgatgtgttccatgtgtcgcaactcaagaaatgtcttcgagtgccatccgagcaggccgactcagagcaaattgaagttcgcgaagacttgacctacgtggagaggccagtgaaaatcctggacaccatggagcgcaggaccaggaaccgggtaatccgtttttgcaaggtccaatggagcaaccacgccgaggaagaagctacctgggagcgtgaagacgagctgaaggcagcccatcccgatctcttcgctagttcttccgaatctcggggtcgagattccgtttaa

SEQ ID NO: 14149 - DNA, 1191 bp, Oryza sativa
  Clone ID: TFbOSC25970j.C1.o1.fg
atggtgacaaccaggagaagtgctgctaccggtgaaggcagtcaccccgaaggcagcaaccacaacaaccatgacagcccacctccacctcctcccccgcctccaccaccaccaccagacaccaactccatcctcacccaaatcctcgcccagcaggccaacatgatggctgcttttatccatcacatccaaattccgccacagcataatgctccacctccaccaccacccccgcaacattctaaacttgccgagttcctccgcatccgtccgcctaccttctctagctccaataaccccgtggatgccttggattggttgcatgccgtggggaaaaagttggataccgtgcagtgcaacgatgaggagaaagtcatcttcgccgcccatcaactgcaggggcccgcatctctatggtgggaccacttccaggctacacagctagaggggcagcctattacctgggcccgcttcaccgcagctttccggaggacccatgtgcccgccggagtcatggcccttaagaaaaggaaattccgagagttgaagcaaggcaaccgctctgtgatggagtatttgcatgagtttaacaacctggcccggtacgccccagaagatgttcatgaagatgaggagaagcaggagaagttcttggcaggaatggaccctgagctgtccgtgcgtctggtctccggggattatccggatttccagcgtttggtggacaagagcatccgcttggaagccaagcacaaggaactggagtcgcacaagcgtcgcttggcgaatttccgcaatcaacagggggctaaccaaagggtccgctacactaatccctacccagggggatcctcctcgcagcagcagcagcagcaacctcgctccgcgccccgacctcaattcgtggtgcgcgtctcacagccgcagcaacagcagagtcagcaagggactcgtgcgccccgtcctcctgcaccagccgtgcagcctggacaaggccgcagggatgctcaaggacaacaacgtctgtgcttcaattgctttgagcccgggcactttgcggataaatgcccaaagccgaggcgccagcaaggccaagcgcctccccgccccaacaacggtggtaaggatgtcattccgggtcgtgtgaaccacgtgactgccgaggatgtgctgacgactccggacgtcatc

SEQ ID NO: 14150 - DNA, 5595 bp, Oryza sativa
  Clone ID: TFbOSC26157j.C1.o1.np
atggatgaagtcgggggtcgatggacattctccagggcaaatgaaggctacacgagctgcggcccggtagtcgagatgtcatggcagagggttggtgccctgctgctaggggctcagtcttgcctgcctgtcccgggggttccggccgtaggcgggattgggtcgatgtacacctctgatcagagtataatctattcgaatagccgagccctcggttatgggcaagccgagcaatgtacccaaatggccggcagcgtcacccgtcgtggtttggacatgactggcttcgtcttggagctgcggggcatgtgcgtggtcttagggtatccacacggagtggactaccaggccaggacgcttccggatcaggagggagacgacgcggagccccacgctggttgggaggtcaccgcagtgatcctctccggctctcccgagcggacttcgctggcagtcaccgcgggtggagactccttccccgccgcttgccagaacgccgctctcctcgccatcggcacccttcaccagcgctacccggatgagttgcagcactcgccctatcgctaccaccctcgtcgcggaggagcctgcgaccacgccaccttccgggatgctagctcggaggatgacgctaccatcgtgcacctggcgcgcatggtggaggcgtacgacgcggctcgtatcgacttccatcagatggtgcgccgcgggatggtcgagaacaacatgaagatcctggagctgcgtcaggagaacctgcagctcaagaaggacctcgacgcagtggaggcgcagctgcatcagctcaagatcgcccagggagagatctgccgccccaagcgtcgccgcgtctgccgcagtcagaagatcaccgcccgcaagagcacctccaggcccgagcttgttcgtcagtccctggcgtggacttgcttcgtcgagacccctcgtgccgagcctgcgcccgtggttccccaggagggggaagccttccggcgttggtagcacggagggtgcgctgttgctcaccttccgtcctggcccgtcgcagcagtagacgagcagttagtaggcttgcgcatggtgacgaccaggagaaacgctgctaccggtgatggcaatcaacctgaaggcagcaaccacaaccaccaaggcaatccacctccacctcctcctccgcctccaccaccaccaccagacaccaatgccattctcacccaaatcctcgcccagcaagccaacatgatgaccgctttcctccaccacctccaaaatccgccacaacagaatgctccaccaccacctccccaacactctaaactcgccgagttcctccgcatccgcccacctaccttctccagctccaacaaccccgtggatgctttggattggttgcatgccgtggggaagaagttagacacggtgcagtgcagcgatgaggagaaagtcgtcttcgccgcccaccagctgcggggacccgcatctctatggtgggaccatttccaggctacgcagccaggggagcaacctattacttgggctcgcttcaccgccgctttccggagaacccatgtgcccgctggagtcgtggctcttaagaaaagggaattccgagagttgaagcaaggcaaccgctccgtgatggagtatttgcacgagttcaacaacttggcccgttacgccccagaggatgtgcgggaagatgaggagaagcaagagaagttcctggcaggaatggaccccgagctgtccgtccgcctagtctctggggactatccggattttcaacgattggtggacaagagcatccgcttggaagccaagcacaaggagctggaatcgcacaagcgccgcttggcgaatttccgcaatcaacagggtgctaaccagagggttcgctacaccaatccctatccagggggatcctcctcgcagcagcaacaacagcagcagcaacctcgctccgcgcctcgacctcaattcgtggtgcgcgtcccacagccgcagcagcagcagaatcagcaagggactcgtgcgccccgtcctcttacgccaacggtgcagcctggtcaaggccgcagggacgcttcaggtccgcagcgtctgtgcttcaactgcttcgagcccgggcactttgcggataaatgcccaaagccaaggcgtcagcaaggccaagcgcctccccgctccaacaacggcgggaaggatgtcattcggggtcgtgtgaatcacgtgacggccgaggacgtgctgacaactccggacgtcatcgttggtacgttcctcgttcattccatccctgctacaattttgttcgactctggagcttcccactcgtttatatctgtgccattcgtggggagaaatcagttgggggtagaaaggcttaggaaccctctgctcatcaccacccctggaggggttatgacagcaaagtattatagtcctgccgtccctatagaaattcaggggattccttttccctcggatctgattctgctagacaccaagaacttggatgtgattcttgggatgaattggttggctcaattccaaggagtagtggattgcgcaagacgcactgtcactctgtaccgagggccagaacaaccggttgttttctttgcacccccaacctctgtcagaagttcagaacttcatcagatagaactgtcagaaatccccatcgtcagagagttcggagacgtgtttccggaagaactacctggtatgccgcccaagcgagagattgagttccgaatagatcttgctccaggaaccactcctctgcacaagcgaccctaccgtatggcagcaaatgaactagccgaagtaaagaaacagttggaagaattgaaagaaaaggggtatatacgtccgagtacttccccatggggtgctcctgtgatttttgtagagaagaaagacaagacgaagaggatgtgcgtcgactacagagctctcaatgaagtcaccatcaagaacaagtaccctcttccccggatcgatgatctgttcgaccaactcaaaggtgccactgtattctccaagattgatctccgttccggatatcaccaactacgtattcgtgaagaagatattccaaagaccgcattcaccacgcgatacaggctgtatgaattcacggtgatgtcgttcggtttgaccaatgcgcctgccttcttcatgaacttgatgaacaaagtgttcatggaatacttggataagtttgttgtggttttcattgatgacattctgatatactcacaatcagaggaagaccatcaacaccatctccgtctggtgttgggaaagttgcgggaacatcaattgtatgccaagcttagcaagtgtgagttctggttgtccgaagtcaaattcttagggcacgtgatatctgctaaaggagttgctgtggatcccgaaacagtgaccgccgtcaccgattggaagcaacccaagacagttactcaagtccgcagtttcttaggtttggcaggatactatcggagattcatcgagaacttctccaaaatcgctcgacccatgacacagttgttgaagaaagaagagaaatttgtgtggagcccgcaatgcgagaaggcgtttcaaactctcaaggaaaagctggtttcctcgccggtgttaatcttgccggatactcgcaaggacttcatggtgtattgtgatgcttcgcgccaaggattggggtgcgtgctcatgcaggacggttatgtggtagcctatgcctcacgccagctacgtcctcatgaaggcaactaccctacacatgatttggagttagccgcagtagttcatgctctaaaaatctggcggcactatctcattgggaatcgctgtgaaatctataccgaccataagagtctgaaatacatcttcactcagtcggacctgaatcttcggcaaaggagatggttagaactcatcaaggattatgatgtgggaattcactatcatcctggtaaggccaacgtggttgccgacgctctaagtcgaaagggccattgcaacactcttaacgtccgaggcattccacccgaacttaaccaacagatggaagccctgaatctaagcatagtgggtcgtggattcttagctgcattggaagccaagcccaccttgctcgatcaaatccgcgaggctcagaagaatgatccggacatgcatggactcctcaagaatatgaaacagggtaaggccgctggtttcacagaggatgaacacggaaccctatggaacggaaagcgggtatgcgttccagataacagagaacttaaacagctgatacttcaggaagctcacgaaagtccttattccattcacccgggcagtacaaagatgtacttagacttaagggagaaatactggtgggttagcatgaagcgggaaattgcagagtatgtggccctatgtgatgtgtgccagcgtgtcaaggcagaacaccaacgaccggccggacttctccaacctctccaagtacctgaatggaaatgggatgaaattgggatggatttcatcaccggacttccaaagacccaaggtggatatgattctatatgggtagttgtggatcgattaaccaaggtagctcgatttattcctgtgaagaccacctatggagggaacaagctagctgaactctacttcgccaggatcgtgagtctccatggcgttcccaagaaaatcgtatctgatcggggaagccaattcacctctcacttttggaagaagctccaagaagagttgggtacccgattaaatttcagcaccgcctatcacccgcagacagatggacagaccgagcgtctaaatcagatcctagaagatatgcttcgcgcatgtgtactagatttcgggaagacctgggataagagtctcccctatgccgagttctcctacaataacagctatcaagccagcatacaaatggcaccatatgaagcgttgtatgggcgcaaatgtcggacaccgctattgtgggaccaagttggagaaagtcaagtgttcgggactgatatcctgagagaagctgaagctaaagtcagaatcattcgggataatctaaaggtggcacagtcccggcagaaaagttatgcagataaccgtcgccgtgacctggaattcgcagtggatgattttgtgtatcttcgagtcacgccattgcgaggtgtacacaggtttcagacgaaagggaagcttgcacctcggtatgtgggtcctttccgtatcgttgctcgacgcggagaagtcgcttaccagttggagctacccgcctccttgggcaacgtgcatgatgtgttccatgtgtcgcaactcaagaaatgccttcgagtgccatccgagcaggccgactcagagcaaattgaagttcgtgaagatttgacctacgtggagaggccagtgaaaatcctggacatcatggagcgcaggaccaggaaccgggtaatccgtttttgcaaggtccagtggagtaatcacgccgaagaagaagctacttgggagcgtgaagacgagctgaaggcagcccatcccggtctcttcgccagttcttccgaatctcggggtcgagattccgtt

SEQ ID NO: 14151 - DNA, 4057 bp, Oryza sativa
  Clone ID: TFbOSC26367j.C1.o1.np
cacctcggccatataaggaccggtcttcgggcctctgttgcaaagcactaccgtacttccacatgtctagtgggacaaatgaaggctacacgggctgcggttcggtagtcgagatgtcatggcacagggccggtgtcctgctgctaggggctcagtcctgcctacctgtcccgggagttccggccgtaggtgggattgggtcgatgtacacctctgatcagagtataatctattcgaatagccgcgccctcggttatgggcaagccgagcaatgtacccaaatggccggcagcgtcagccgtcgtggtttggacatgactggcttcgtcttggagctgcggggcatgtgcgtggtcctggggtatccacatggagtggactaccaggccaggccgcttccggagcaggactgtgacgatgcagagccccacgctggttgggaggtcactgcagtgatcctctctggctctcccgagcggacttcgctggcagtcaccacgggtggagattctttccccgccgcttgccagagcgccgctctcctcgccatcggcactcttcaccagcgatacccggacgagttgcagcactcgccctaccgctaccaccctcgccgcggaggagcccgcgactacgccaccttccgggatgctagctcggaggatgacgctaccctcgtgcacctggcgtgcatggtggaggcgtacgacgcggctcgtatcgacttccatcagatggtgcgccgtgggatggtcgagaacaacatgaagatcctggagctgcgtcaagagaatctgcagctcaagaaggacctagacgcagtggaggcgcagctgcatcagctcaagatcgcccagggagaggtctgccgccccaagcgtcgccgtgtctgccgcagccagaagatcaccgcccgcaagagcacctccaggcccgagcttgttcgtcagtccctggcgtggacttgcttcgtcgagacccctcgtgccgagcccgcgcccgtggttccccaggagggggaagcctccagcgttggtagcacggaggatgcgctgttgctcaccttccatggtgacgaccaggagaagtgctaacaccggtgatggcaaccaacctgaaggcagcaaccaccaccaccagggcagcccaccttcaccttcttcttcgccttcaccaccaccaccagataccaacgccattctcacccaaatcctcacccagcaggccaacatgatgactgctttcctccaccacatccaaaatccgccacaacataatgctccaccaccacccccacaacactctaaactcgccgagttcctgcgcatccgcccacctaccttctctagctccaacaaccccgtggatgcgttggattggttgcatgccgtggggaaaaagctggacactgtgcagtgcagcgatgaggagaaagtcatcttcgccgcccaccagctgcaggggcccgcatctctatggtgggaccatttccaggctacgcagccagaggggcaacctattacttggacccgtttcaccgccgctttccggagaacccatgtgcccgccggagtcgtggcccttaagaaaagagaattccgagagttgaagcaaggcaaccgctccgtgatggagtatttgcatgatttcaacaacctggcccgttacgccccggaggatgtgcgggaagatgaggagaagcaagagaagttcttggcaggaatggaccctgagctgtccgtccgtctagtctccggggactatccggatttccaacgtctggtggacaagagcatccgcttggaagccaagcacaaggaactggagtggcacaagcgccgcttggcgaatttccgcaaccaacagggtgctaaccaaagggtccgctacaccaatccctatccagggggatcctcctcgcagcagcaacaacaacagcagcaacctcgctccgcgcctcgacctcaattcgtggtgcgcgtcccacagccgcagcaacagcagagtcagcaagggactcgtgcgcctcgtcctcctacgccaactgtgcagcctggccaaggccgcagggacgcttcaggtccgcagcgtctgtgcttcaactgcttcgagcccgggcactttgcggataaatgcccaaagccgaggcgtcagcaaggccaagcgcctccccgctccaacaacggtgggaaggatgtcattcggggtcgggtgaaccatgtgacggccgagaaggtgttgacaactccagacgtaatcgttggtacgttcttcattcattccatccctgctaccattttgttcgactctggagcttcccactcgtttatatctgtgccattcgtggggagaaatcagttggggatagaaaggcttaggaaccctctgctcatcaccacccctggaggggttatgacagcaaagtattatagtcctgccgtccctatagaaattcagggaattccttttccctcggatttgattctgctagacaccaagaacttggatgtgatccttgggatgaattggttggctcaattccaaggagtagtggattgcgcgagacgcactgtcaccctgtaccgagggccggaacaaccgattgttttctttgcacccccaacctctgtcagaagttcagaacttcatcagataggactgtcagaaatccccatcgtcagagagttcggagacgtgtttccagaagaactacccggtatgccgcccaagcgagagattgagttccggatagatcttgctccaggaaccactcctctgtacaagcgaccctaccgtatggcagcaaatgaactggccgaagtcaagaaacagttggaagagttgaaagaaaaggggtatataggtccgagtacttccccctggggtgctcctgtgatttttgtggagaagaaagacaagacgaagaggatgtgcgttgactacagagctctcaatgaagtcaccatcaaaaacaagtaccctcttccccggatcgatgatctgttcgatcagcttaaaggtgccactgtattctccaagatcgatcttcgttccggatatcaccaattacatattcgtgaagaagatattccgaagaccgcattcaccacgcgatacggactgtatgaattcacggtgatgtcgttcggtttaaccaatgcacctgccttcttcatgaacttaatgaacaaagtgttcatggaatacttggataagtttgttgtggttttcattgatgacattctgatatactcacaatccgaggaagaccatcagcaccatctccgtctggtgttgggaaagttacgggaacatcaattgtatgccaaacttagcaagtgtgagttctggttgtccgaagtcaaattcttagggcacgtgatatctgctaaaggagttgcggtggaccccgaaacagtgaccgccgtcactgattggaagcaacccaagacagtcactcaagtccgcagtttcttaggtttggcaggatactaccgaaggtttatcgagaacttctccaaaatcgctcgacccatgacacagttgttgaagaaagaagagaaatttgtgtggagcccgcaatgcgagaaggcgttcaaaaccctcaaagaaaagctggtttcctcaccagtgttaatcttgccggatactcgcaaggatttcatggtgtattgtgacgcttcgcgccaaggattggggtgcgtgctcatgcaggatggtcatgtggtggcctatgcctcacgccagctacggcctcatgaaggcaactaccctacccatgatttggagttagctgcggtggttcatgctctaaaaatctggcggcactatctcattgggaatcgctgtgaaatatatactgatcataagagcttgaaatacatcttcacccaatcggatctgaatcttcggcaaaggagatggttagaactcatcaaggattatgatgtgggaatttgtcaccggcccggtagtcgagatgtcatggcacagggccggtgtcctgctgctgggggctcagtcctgcctacctgtcccgggggttccggccgtaggt

SEQ ID NO: 14152 - DNA, 3028 bp, Oryza sativa
  Clone ID: TFbOSC27415j.C1.o3.gm
atggagccgagatcgccgcgccggtttccttcccctccggccgccctctctcactcccaacactatttaagcactccctgtgcctccctcctccgtttccgacccttgccgctttctttccccgtcggaatcgagctcgcgccgtcgtcctctctctccgccgtcgccgccgagcttcggttcgccgccgtcgtcgccccggacctcctcccgcttcggcatcgcctcctttggcttcgccgcgtcctcgtcgacctcgtccaccccttcgtttcgcccgccgaccgccggaacgccgccgtcctcgtcgacccgagccgcgccgccgcctctctccgcttcggtcgccgttcccgtcgtcgcagtcgacccggggtgagccgaggaccgccatttcgcttcccccttccctcccctctctcgggcgccgctccgtcgcgccggaggtcgccgccggtgaccatcggggcgcgggcgcgccgcctcccgtcggccgtgccggcgaggccgccttcgggcgcgccctgcggctgccatgtggggcccggccgtcagccgcccgcgccctcgggtgcggctgacgcgtgggacccacggcgccggccggcgcaagccgcgtgcacccggtccaccgtggaccgtgaggctgccgcgtgggccccactcccgtggacccgggcaaatgaaggctacacgagctgcggcccggtagtcgagatgtcatggcacagggccggtgtcctgctgctaggggctcagtcctgcctgcctgtcctgggggttccggccgtaggtgggattgggtcgatggccggcagcgtcacccgtcgtggtttggacatgactggtttcgtcttggagctgcggggcatgtgcgtggccctggggtatccacacggagtggactaccaggccaggccgcttccggagcaggagggtgacgatgcagagccccacgctgcttgggaggtcactgcagtgatcctcgctggctctcccgagcggacttcgctgacagtcaccgcgggtggagactctttccccgccgcttgccagagcgccgctctcctcgccatcggcactcttcaccagcgctacccggacgagttgcagcactcgccctaccgctaccaccctcgtcgcggaggagcccgcgaccacaccaccttccgggatgctagctcggaggatgacgctaccatcgtgcacctggcgcgcatggtggaggcgtacgacgcggctcgtatcgacttccatcagatggtgcgccgtgggatggtcgaggacaacctgaagatcctggagctgcgtcaagagaacctgcagctcaagaaggacctggacgcagtggaggcgcagctgcatcagctcaagatcgcccagggagagatctgccgccccaagcgtcgccgcgtctgccgcagcctgaagatcaccgcccgcaagagcacctccaggcccgagcttgttcgtcagtccctggcgtggacttgcttcgtcgagacccctcgtgccgagcccgcgcccgtggttccccaggagggggaagcctccggcgttgatggtgatgaccagagaagtgctaacaccggtgatggcaaccaacctgaaggcagcaaccacaaccatcagggcaacccacctccacctcctcctctgcctccaccaccaccaccagacaccaacgccattctcacccaaatcctcgcccagcaggccaacatgatgactgctttcctccaccacctccaaaatccgccacaacttaatgctccaccaccacccccacaacactctaaactcgccgagtttctccgcatccgcccacctaccttctctagctccaacaaccccgtggatgcgttggattggttgcatgccgtggggaaaaagctagacactgtgcagtgcagcgatgaggagaaagtcatcttcgccgcccaccagctgcagggacccgcatctctatggtgggaccatttccaggctacgcagccagagggacagcctattacatgggctcgcttcaccgccgttttccgaagaacccatgtgcccgccggagtcgtggcccttaagaaaagggaattccgagagtggaagcaaggcaaccgctccgtgatggagtatttgcacgagttcaacaacctggcccgttacgctccggaggatgtgcgggaagatgaggagaagcaagagaagttcctggcaggaatggaccctgagctgtccgtccgtctagtctccggggattatccggatttccaacgtctggtggacaagagcatccgcttggaagccaagcacaaggaactggagtcgcacaagcgccgcttggcgaatttccgcaaccaacagggtgctaaccaaagggtccgctacaccaatccctatccagggggatcctcctcgcagcagcaacaacagcagcagcaacctcgctccgcgcctcgacctcaattcgtggtgcgcgtcccacagccgcagcagcagcagaatcaacaagggactcgtgcgccccgtcctcctccaccgactgtgcagcctggtcaaggccgcagggacgctcaaggtccgcagcgtctgtgcttcaactgcttcgagcccgggcactttgcggataaatgcccgaagccaaggcgtcagcaaggccaagcgcctccccgccccaacaacggtgttaaggacgtcattcggggtcgtgtgaaccatgtgacggccgaggacgtgctgacaactccagacgtcatcgttgaaattcccatcgtcagagagttcggagacgtgtttccggaagaactacctggtatgccgcccaagcgagagattgagttccggatagatcttgctccaggaaccgctcctctgtacgagcgaccctaccgtatggcagcaaatgaactggccgaagttaaaaaacagttggaagagttgaaagaaaagggagctctcaatgaagtcaccatcaaaaacaagtaccctcttccccggatcgatgatctgttcgatcagcttaaagcgtgccacg

SEQ ID NO: 14153 - DNA, 3652 bp, Oryza sativa
  Clone ID: TFbOSC28701j.C1.o1.gm
atggagtatttgcacgagttcaacaacctggcccgttacgctccggaggatgtgtgggaagatgaggagaagcaagagaagttcctggcaggaatggaccctgagctgtccgtccgtctagtctccggggattatccggatttccaacgtctggtggacaagagcatccgcttggaagccaagcacaaggaactggagtcgcacaagcgccgcttggcgaatttccgcaaccaacagggtgctaaccaaagggtccgctacaccaatccctatccagggggatcctcctcgcagcagcaacagcagcagcagcaacctcgctccgcgcctcgacctcaattcgtggtgcgcgtcccacagccgcagcagcagacgaatcaacaagggactcgtgcgccccgtcctcctccaccgactgtgcagcctggtcaaggccgcagggacgctcaaggtccgcagcgtctgtgcttcaactgcttcgagcccgggcactttgcggataaatgcccgaagccaaggcatcagcaaggccaagcgcctccccgccccaacaacggtggtaaggacgtcattcggggtcgtgtgaaccatgtgacggccgaggacgtgctgacaactccagacgtcatcgttggtacgttcctcattcattccatccctgctaccattttgttcgactctggagcttcccactcgtttatatctgtgccattcgtggggagaaatcagttgggggtagaaaggcttaggaaccctctgctcatcaccacccctggaggggttatgacagcaaagtattatagccctgccgtccctatagaaattcaggggattccttttccctcggatctgattctgctagacaccaagaacttggatataggactgtcagaaattcccatcgtcagagagttcggagacgtgtttccggaagaactacctggtatgccgcctaagcgagaggttgagttccggatagatcttgctccaggaaccgctcctctgtacaagcgaccctaccgtatggcagcaaatgaactggccgaagtcaaggaacagttggaagagctgaaagaaaaggggtatatccgtccgagtacttccccctggggtgctcctgtgatttttgtggagaagaaagacaagacgaaaaggatgtgcgttgactacagagctctcaatgaagtcaccatcaaaaacaagtatcctcttccccgaatcgatgatctgttcgatcagcttaaaggtgccactgtattctccaagattgatcttcgttccggatatcaccaattgcgcattcgtgaagaagatattccgaagaccgcattcaccacgcgatacagactgtatgaattcacggtgaagtcattcggtttaaccaatgcacctgccttcttcatgaacttaatgaacaaagtgttcatggaatacttggataagtttgtggtggtttttattgatgacatcctgatatactcacaatcagaggaagaccatcagcaccatctccgtctggtgttgggaaagttgcgggaacatcaattgtatgccaaacttagcaagtgtgagttctggttgtccgaagtcaaattcttagggcacgtgatatctgctaaaggagttgctgtggaccccgaaacagtgaccgccgtcactgattggaagcaacccaagacagtcactcaagtccgcagtttcttaggtttggcaggatactaccggagattcatcgagaacttctccaaaatcgctcgacccatgacacagttgttgaagaaagaagagaaatttgtgtggagcccgcaatgcgagaagacgttcaaaactctcaaagaaaagctggtttcctcgccagtgttaatcttgccggatactcgcaaggatttcatggtgtattgtgacgcttcgcgccaaggattggggtgcgtgcttatgcaggacggtcatgtggtggcctatgcctcacgccagctacggcctcatgaaggcaattaccctacccatgatttggagttagccgcggtggttcatgctctaaaaatctggcggcactatctcattgggaatcgctgtgaaatatatactgatcataagagtttgaaatacatcttcactcagtcggacctgaatcttcggcaaaggagatggttagaactcatcaaggattatgatgtgggaattcactatcatcctggtaaggccaacgtggttgccgacgctctaagtcgaaaaagccattgcaacactcttaacgtccgtggcgttccacccgaacttaatcaacagatggaagccctgaacctaagcatagttagtcgcggattcttggctgcgctggaagccaagcccaccttgctcgatcaaatccgcgaggctcagaagaatgatccagacatgcatggactcctcaagaatatgaaacagggtaaagccgctggtttcacagaggatgaacacggaaccctatggaacggaaatcgagtatgcgttccagttaacagagaacttaaacagctgatacttcaggaagctcacgaaagtccttattccatccaccctggcagcacgaagatgtacttagacttgaaggagaaatactggtggattagtatgaagcgggaaattgcagagttcgtggccctttgtgatgtgtgccagtgtgtcaaggcagagcaccaacgaccggccggacttctccaacctctccaagtacctgaatggaaatgggatgaaattgggatggatttcatcaccggacttccaaaaacccaaggtggatatgattctatatgggtagttgtggatcgattaaccaaggtagctcgattcattcctgtgaagaccacctatggagggaacaaactagccgaactctacttcgctaggatcacagatgggcagaccgagcgtctaaatcagatcctagaagatatgctccgcgcatgtgttctagatttcgggaagacctgggataagagtctcccctatgccgagttctcctacaacaacagctatcaagccagcatacaaatggcaccttatgaagcgttgtatgggcgcaaatgccggacaccgctaatgtgggatcaagttggggaaagccaagtgttcgggactgatatcctgagagaagctgaagctaaagtcagaaccattcgggataatctaaaggtggcacagtcccggcagaaaagttatgcagataaccgtcgccgtgatctggaattcgcagtggacgattttgtatatcttcgggtcacgccattgcgaggtgtacacaggtttcggacaaaagggaagctcgcacctcggtatgtgggtcctttccgtatcgttgctcgacgcggagaagtcgcttaccaattggagctgcccgcctccttgggcaacgtgcatgatgtgttccatgtgtcgcaactcaagaaatgccttcgagtgccatccgagcaggccgactcagagcaaattgaagttcgcgaagacttgacctacgtggagaggccagtgaagatcctggacaccatggagcgcaggaccaggaaccgggtaatccgtttttgcaaggtccagtggagcaaccacgccgaagaagaagctacttgggagcgtgaagacgagctgaaggcagcccatcctgatctcttcgcca

SEQ ID NO: 14154 - DNA, 2981 bp, Oryza sativa
  Clone ID: TFbOSC28999j.C1.o1.np
atggcggccggacctcccgcgccggtttcctcccttccccggccaccctctctcgacccggctctatttaaaccctccccgctcctcctccttcagtttccgcctctcgccgcccttcctcctcgccggaatcaaggtcgcgccgtcgctctctccctccgccgtcgccatcgagctccggtccgccgccgtcgtcgtcccggatcacctcccacctcggcgccgcctccttcggctttgccgcatcctcgccgacctcgtccacccctccgtttcggtcgccgaccgccggaacgccgtcgaccccgtcgactcgagccgcgccgccgccttcctccgctccggccgcctttttcgtcgtcgccgtcgacctagggtgagccgtggaccgccgcttcttttcccccttcccttcccctctctcggccgccgctccgccgtgcctatggccgccgccggcgaccataggggcgcgggcgccgcctcccgccggccgcaccggcttggccgccctcgggcgcaccgagtggctgccgcgtggggcccggccgtcagccgcccgcgcccttaggtgcggctgacgcgtgggacccacggtgccggccggtgtgagcccgggtgcacccggtccaccgtggacccacctcggccatataaggaccggtcttcgggcctctgttgcaaagcactaccgtacttccacatgtctagtgggacaaatgaaggctacacgagctgcggcccggtagtcgagatgtcatggcacagggccggtgtcctgctgctaggggctcagtcctgcctacctgtcccgggggttccggccgtaggtgggattgggtcgatgtacacctctgatcagagtataatctattcgaatagccgcgccctcggttatgggcaagccgagcaatgtacccaaatggccggcagcatcaatcgtcgtggtctggacctgactggcttcgttttggagctgcggggcatgtgcgttgtcctggggtatccgcatggagtggactaccagggcaagcagctcccggagcaggagggtgacgatgcagagccccacgctgcttgggaggttactgcagtgatcctcactggctcacccgagaggacttcgttggcagtcaccgcgggtggagattccttctccgccgcttgccagaacgccgcactcctcgccatcggcactcttcaccagcgctacccggacgagttgcagcactcgccctaccgctaccaccctcgccgcggaggagcccgcgactacgccaccttccgggatgctagctcggaggatgacgctaccatcatgcacctagcgcgcatggtggaggcgtacgacgcggcccgtatggacttccatcagatggtgcgccgcgggttggtcgagaacaacatgaagatcctggagctgcgtcaggagaatctgcagctgaagaaggacctagacgtagtggaggcgcagctgtgtcagctcaagatcgcccagggagaggtctgtcgccccaagcgtcgccgcgtctgccgcagcctgaagatcaccgcccgcaagagtacctccaggcccgagcttgttcgtcagtccctggcgtggacctgcttcgtcgagacccctcgtgccgagcccgcgcccgtggttcctcaggaggatggagtctccggcgttggcagcacggaggatgcgctgctgctcaccttccatggtgacaaccaggagaagtgctgctaccggtgatggcaaccaacccgtaggcagcaaccacaacaaccatggcagcccacctccacctcctcccccgcctccaccaccaccactagacaccaacaccatcctcacccaaatcatcgcccagcgggccaacatgatggctgctttcctccaccacatccaaaatccgccacaacataatgctccaccaccacccccacaacactctaaactcgccgagttcctccgcatccgtccacctaccttctctagctccaataaccccgtggatgctttggattggttgcatgccgtggggaaaaagttagacaccgtgcagtgcaacgatgaggagaaagtcatctttgccgctcactaactgcaggggcccgcatctctatggtgggaccacttccaggctacgtagccagaggggcagcctattacttgggcccgcttcaccgcctctttccagagaacccatgtgcccgtcggagtcatggcccttaagaaaagggaattctgagagttgaagcaaggcaaccgctccatgatggagtatttgcatgagtttaacaacctggcccggtacgccccggaggatgttcgtgaagatgaggagaagcaagagaagttcttggcaggaatggaccctgagctgtccgtgcgtctggtctccggggactatccggatttccaacgtctggtggacaagagcatccgcttggaagccaagcacaaggaactggagtcgcacaagcgtcgcttggcgaatttccgcaaccaacagggggctaaccaaagggtccgctacaccaatccctatccagggggatcctcctcgcagcagcagcagcagcagcaacctcgctccacgtcccgacctcaattcgtggtgcatgtcccacagccgcagcaacagcagagtcagcaagggactcgtgcgccccgtcctcctacgccagccgtgcagcctgttcaaggccgcagggacgctcaaggtcagcagcgtctgtgcttcaactgcttcgagcctgggcactttgcggataaatgcccaaagccgaggtgccagcaaggccaagcgcctccccgctccaacaacggtggtaaggatgtcattcggggtcgtgtgaaccacgtgacggccgagaacgtgctgacaactccagacgtcatcgttggtacgttcctcattcattccatccctgctaccattttttttaaatgaatatttgcgaatttcttcatttaaattttaatt

SEQ ID NO: 14155 - DNA, 4617 bp, Oryza sativa
  Clone ID: TFbOSC29926j.C1.o5.fg
atgtcatggcacagggccggtgtcctgctgctaggggttcagtcctgcctgcctgtcccgggggttccggccgtaggtgggattgggtcggtactcttgtctatggctaggatgggttggaaactatgtcacgtctttcgtctgtataccgtggtgatgttgacgaccaggagaagtgctgctaccggtgatggcaaccaacccgaaggcagcaaccaccaccaccagggcaggccaccttcacctcctcctacgcctccaccaccaccaccagacaccaacgccattctcacccaaatcctcgcccagcaggccaacatgatgactgctttcctccaccacctccaaaattcgccacaacataatgctccaccaccacctccccaacactctaaactcgccgagttcctccgcatccgcccacctaccttctctagctccaacaaccccgtggatgcgttggattggttgcatgccgtggggaaaaagctagacactgtgcagtgcagcgatgaggagaaagctacgcagccagaggggcaacctattacttgggctcgcttcaccgccgctttccggagaacccatgtgcccgccggagtcatggcccttaagaaaagggaattccgagagttgaagcaaggcaaccgctccgtgatggagtatttgcatgagttcaacaacctggcccgttacgccccggaggatgtgcgggaagatgaggagaagcaagagaagttcttggcaggaatggaccctgagctgtccgtccgtctagtctccggggactatccggatttccaacgtctggtggacaagagcatccgcttggaagccaagcacaaggaactggagtcgcacaagcgccgcttggcgaatttccgcaatcaacagggtgctaaccaaagggtccgctacaccaatccctatccagggggatcctcctcgcagcagcaacaacagcagcagcaacctcgctccgcgcctcgacctcaattcgtggtgcgcgtcccacagccgcagcagcagcagaatcaacaagggactcgtgcgccccgtcctcctacgccaactgtgcagcctggtcaaggccgcagggacgctcaaggtccgcagcgtctgtgcttcaactgcttcgagcccgggcactttgcggataaatgcccaaagccgaggcgtcagcaaggccaagcgcctccccgctccaacaacggtgggaaggatgtcattcggggtcgggtgaaccacgtgacggccgaggacgtgctgacaactccagacgtcatcgttggtacgttcctcattcattccatccctgctaccattctgttcgactctggagcttcccactcgtttatatctgtgccattcgtggggagaaatcagttgggggtagaaaggcttaggaaccctctgctcatcaccacccctggaggggttatgacagcaaagtattatagccctgccgtccccatagaaattcaggggattccttttccctcggatctgattctgctagacaccaagaacttggatgtgatccttgggatgaattggttggctcaattccaaggagtagtggattgtgcgagacgcactgtcactctgtaccgagggccggaacaaccggttgttttctttgcacccccaacctctgtcagtagttccgaacttcatcagataggactgtcagaaatccccattgtcagagagttcggagacgtgtttccggaagaactacccggtatgccgcccaaacgacagattgagttccggatagatcttgctccaggaaccacacctctgtacaagcgaccctaccgtatggcagcaaatgaactggctgaagttaagaaacagttggaagagttgaaagaaaaggggtatatacgtccgagtacttccccctggggtgctcctgtgatttttgtggagaagaaagacaagacgaagaggatgtgcgttgactacagagctctcaatgaagtcaccatcaaaaacaagtaccctcttccccggatcgatgatctgttcgatcagcttaaaggtgccactgtattctccaagatcgatcttcgttccggatatcaccaattacgtattcgtgatgaagatattccgaagaccgcattcaccacgcgatacggactgtatgaattcacggtgatgtcgttcggtttaaccaatgcacctgcctttttcatgaacttaatgaacaaagtgttcatggaatacttggataagtttgttgtggttttcattgatgacattctggtatactcacaatcagaggaagaccatcagcaccatctccgtctggtattgggaaagttgcgggaacatcaattgtatgccaaacttagcaagtgtgagttctggttgtccgaagtcaaattcttagggcacgtgatatctgctaaaggagttgctgtggaccccgaaacagtgaccgccgtcattgattggaaacaacccaagatagtcactcaagtccgcagtttcttaggtttggcaggatactaccggaggttcatcgagaacttctccaaaatcgctcgacccatgacacagttgttgaagaaagaagagaaatttgtgtggagcccgcaatgcgagaaggcgttcaaaactctcaaagaatggctggtttcctcgccagtgttaatcttgccggatactcgcaaggacttcatggtgtattgtgacgcttcgcgccaaggattggggtgcgtgctcatgcaggatggtcatgtggtggcctatgcctcacgccagctacggcctcatgaaggcaactaccctacccatgatttggagttagctgcggtggttcatgctctaaaaatctggcggcactatctcattgggaatcgctgtgaaatatatactgatcataagagtttgaaatacatcttcactcagtcggacctgaatcttcggcaaaggagatggttagaactcatcaaggattacgatgtgggaattcactatcatcctggtaaggccaacgtggtcgctgacgccctaagtcgaaagagccattgcaacactcttaacgtccgcggcattccacccgaacttaatcaacagatggaagccctgaacctaagcatagttggtcgcggattcttggctgcgttggaagccaagcctaccttgctcgatcgaatccgcgaggctcagaagaacgatccggacatgcatggactcctcaagaatatgaaacagggtaaagccgctggtttcacagaggatgaacacggaaccctatggaacggaaatcgagtatgcgttccagataacagagaacttaaacagctgatacttcaggaagcccacgaaagtccttattccatccaccctggcagtacgaagatgtacttagacttgaaggagaaatactggtgggttagtatgaagcgggaaattgcagagttcgtggccctttgtgatgtgtgccagcgtgtcaaggcagagcaccaacgaccggccggacttctccaacctctccaagtacctgaatggaaatgggatgaaattgggatggattttatcaccggacttccaaagacccaaggtggatatgattctatatgggtagtggtggatcgattaaccaaggtagctcgattcattcctgtgaagaccacctatggagggaacaaactagccgagctctacttcgcaaggatcgtgagtctccatggcgttcccaagaaaatcgtatctgataggggaagccaattcacctctcacttttggaagaagctccaagaagagctgggtacccgattaaacttcagcaccgcataccacccgcagacagatgggcagaccgagcgtctaaatcagatcctagaagatatgcttcgcgcatgtgtcctggatttcgggaagacctgggataagagtctcccctatgccgagttctcctacaataacagctatcaagccagcatacaaatggcaccttatgaagcgttgtatgggcgcaaatgccggacaccgctcttgtgggatcaagttggggaaagccaagtattcgggactgatatcctgagagaagctgaagctaaagtcagaaccattcgggataatctaaaggtggcacagtcccggcagaaaagttatgcagataaccgtcgccgtaacctggaattcgcagtggacgattttgtgtaccttcgggtcacgccattgcggggtgtacacaggtttcagacaaaagggaagctcgcacctcggtatgtgggtcctttccgtatcgttgcccgacgcggagaagtcgcttaccaattggacctgcccgcctccttgggcaacgtgcatgatgtgttccatgtgtcgcaactcaagaaatgccttcgagtgccatctgcgcaggccgactcagagcaaattgaagttcgcgaagacttgacctacgtggagaggccagtgaaaatcctggacaccatggagcgcaggaccaggaaccgggtaatccgtttttgcaaggtccagtggagcaaccacgccgaagaagaagctacctgggagcgtgaagacgagctgaaggcagcccatcctgatctcttcgccagttcttccgaatctcggggtcgagattccgtttaa

SEQ ID NO: 14156 - DNA, 2415 bp, Oryza sativa
  Clone ID: TFbOSC29969j.C1.o1.gm
atgtgcgtcgactacagagctctcaatgaggtcaccatcaaaaacaagtaccctcttccccggatcgatgatctgttcgatcagcttaaaggtgccactgtattctccaagattgatcttcgttccggatatcaccaattacgtattcgtgaagaagatattccgaagaccgcattcactacgcgatatggactgtatgaattcacggtgatgtcgttcggcttaaccaatgctcctgccttcttcatgaacttgatgaacaaagtgttcatggaatacttggataagttcgttgtggttttcattgatgacattctgatatactcacaaacagaggaagaccatcagcaccatctccgtctggtgttgggaaagttgcgggaacatcaattgtatgccaagcttagcaagtgtgagttctggttgtccgaagtcaaattcttggggcacgtgatatctgctaaaggagttgctgtggaccccgaaacagtgaccgccgtcaccgattggaagcaacccaagacagtcactcagattcgcagtttcttgggtttggcaggatactatcggagattcatcgagaacttctccaaaatcgctcgacccatgacacagttgttgaagaaagaagagaagtttgtgtggagcccgcaatgcgagaaggcgttccaaactctcaaagaaaagctggtttcctcgcccgtgttaatcttgccggatactcgcaaggatttcatggtgtactgtgatgcttcgcgccaaggattggggtgcgtgctcatgcaggacggtcatgtggtagcctatgcctcacgccagctacgtcctcatgaaggcaactaccctacacatgacttggagttagcagcggtggttcatgctctaaaaatctggcggcactatctcattgggaaccgctgtgaaatatatactgatcataagagtttgaaatacatcttcacccagtcggatctgaatcttcggcaaaggagatggttagaactcatcaaggattatgatgtgggaattcactatcaccctggtaaggccaatgtggttgccgacgctctaagtcgaaagagccactgcaacactctcaatgtccgaggcattccacccgagcttaatcaacagatggaagccctgaacctaagcatagttggtcgcggatttttggccgcgttggaagccaagcccaccttgctcgatcaaatccgcgaggctcagaagaatgatccggacatgcatggactcctcaagaatatgaaacagggtaaagccgctggtttcacagaggatgaacacggaaccttatggaacggaaagcgggagaaatactggtgggtcagcatgaagcgggaaattgcagagtttgtggccctatgtgatgtgtgccagcgtgtcaaggcagaacaccaacgaccggccggacttctccaacctctccaagtgccggaatggaaatgggatgaaattgggatggatttcatcaccggccttccaaaaacccaaggtgggtatgattctatatgggtaatagtggatcgattaaccaaggtagctcgatttattcctgtgaagaccacctatggagggaacaaactagcggagctctacttcgctaggatcgtgagtctccatggcattcccaagaaaatcgtatctgataggggaagccaattcacctctcacttttggaagaagctccaagaagagctgggtactcgattgaattttagcaccgcctatcacccgcagacagatggacagaccgagcgtctaaatcagatcctagaagatatgctccgcgcatgtgtactagatttcgggaagacttgggataagagtctcccctatgccgagttctcctacaataacagctaccaagccagcatacaaatggcaccctatgaagcgttgtacgggcgcaaatgccggacaccgctattgtgggaccaagttggagaaagccaagtgttcgggactgatatcctgagagaagctgaagctaaagtcagaatcattcgggataatctaaaggtggcacagtctcggcagaaaagttatgcagataaccgtcgccgtgatctggaattcgcagtggatgactttgtgtaccttcgggtcacgccattgcgaggtgtgcacaggtttcagacaaaagggaagctcgcacctcggtatgtgggtcccttccgtatcatcgctcgacgcggagaagttgcttaccagctggagttgcccgcctccttgggtaacgtgcatgatgtgttccatgtgtcgcaactcaagaaatgtcttcgagtgccatccgagcaggccgactcagagcaaattgaagttcgcgaagacctgacgtatgtggagaagccagtgaaaatcctggacaccatggagcgcaggaccaggaaccgg

SEQ ID NO: 14157 - DNA, 5238 bp, Oryza sativa
  Clone ID: TFbOSC30011j.C1.o3.fg
atggatgaagtcgggggtcgatggacattctccagggcaaatgaaggctacacgagctgcggcccgatggccggcagcgtcacccgtcgtggtttggacatgactggcttcgttttggagctgcgaggcatgtgcgtggtcctggggtatccacacggagaggactaccaggccaggccgcttccggatcaggagggagatgacgcggagccccacgctgggtgggaggtcaccgcagtgatcctctctggctcccccgagcggacttcgctggcagtcaccgcgggtggagactccttccccgccgcttgccagaacgccgctctcctcgccatcggcacccttcaccagcgctacccggacgagttgcagcactcgccctaccgctaccaccctcgtcgcggaggagcccgcgactacgccaccttctgggatgctagctcggaggatgacgctaccatcgtgcacctggcacgcatggtggaggcgtacgacgcggctcgtatcgacttccatcagatggtacgccgcgggatggtcgagaacaacatgaagatcctggagctgcgtcaggagaacctgcagctcaagaaggacctcgacgcagtggaggcgcagctgcaccagctcaaggtcgcccagggagagatctgccgccccaagcgtcgccgtgtttgccgcagccagaagatcaccgcccgcaagagcacctccaggcccgagcttgtccgtcagtccctggcgtggacttgcttcgtcgagacccctcgtgccgagcctgcgcccgtggttccccaggagggggaagcctccggcgttggtagctcggaggcagtagacgagcagttagtaggcttgcgcgtgtgttctttctcgtttgtcttttttggagtcgtgtggggcatggttatgccgatggtgacgaccaggagaaatgctgttaccggtgatggcaaccaacccgaaggcagcaaccccaaccaccagggcaacccacctccacctcctcctccgcctccaccaccaccaccagacaccaacgccattctcacccaaatcctcgcccagcaagccaacatgatgaatgctttcctccaccacctccaaaatccgccacaacagaatgctccaccaccacccccacaacactctaaactcgccgagttcctccgcatccgcccacctaccttctccagctccaacaaccccgtggatgctttggattggttgcatgccgtggggaaaaagctagacacggtgcagtgcagcgatgaggagaaagtcgtcttcgccgcccatcagctgcagggacctgcatctctatggtgggaccacttccaggctacgcagccagagggacagccgattacttgggctcgcttcaccgccgctttccggagaacccatgtgcccgctggagtcgtggctcttaagaaaagggaattccgagagttgaagcaaggcaaccgctccgtgatggagtatttgcatgagttcaacaacctggcccgttacgctccggaggatgtgcgggaagatgaggagaagcaagagaagttcttggcaggaatggaccctgagctgtccgtccgtctagtctctggggactatccggattttcaacgactggtggacaagagcatccgcttggaagccaagcacaaggagctggaatcgcacaagcgccgcttggcgaatttccgcaatcaacagggtgctaaccaaagggttcgctacaccaatccctatccagggggatcctcctcgcagcagcagcaacagcagcagcaacctcgcccagcgccccgacctcaattcgtggtgcgcgtcccacagccgcagcagcagcagaatcagcaagggactcgtgcgccccgtcctcctacgccaactgtgcagcccgttcaaggccgcagggacgctcaaggtcagcagcgtctgtgcttcaactgcttcgagcccgggcactttgcggataaatgcccaaagccaaggcgtcagcaaggccaagcgcctccccgctccaacaacggcgggaaggatgtcattcggggtcgtgtgaatcacgtgacggccgaggacgtgctgacaactccagacgtcatcgttggtacgttcctcgttcattccatccctgctacaattttgttcgactctggagcttcccactcgtttatatctgtgccattcgtggggaaaaatcagttgggggtagaaaggcttagaaaccctctgctcatcaccacccctggaggggttatgacagcaaagttttatagccctgccgtccctatagaaattcaggggattccttttccctcggatctgattctgctagacaccaagaacttggatgtgattcttgggatgaattggttggcacaattccaaggagtagtggattgcgcgagacgcactgttactctgtaccgagggccggaacaaccggttgttttctttgcacccccaacctctgttagaagttcagaacttcatcagatagaactgtcagaaattcccatcgtcagagagttcggagacgtgtttccggaagaactacctggtatgccgcccaagcgagagattgagttccgaatagatcttgctccaggaactactcctctgcacaagcgaccctaccgtatggcagcaaatgaactagccgaagtaaagaaacagttggaagagttgaaagaaaaggggtacatacgtccgagtacttccccatggggtgctcctgtgatttttgtagagaagaaagacaagacgaagaggatgtgcgttgactacagagctctcaatgaagtcaccatcaaaaacaagtaccctcttccccggatcgatgatttgttcgatcagcttaaaggtgccactgtattctccaagattgatctccgttccggatatcaccaattacgtattcgtgaagaagatattccgaagaccgcattcaccacgcgatacgggctgtatgaattcacggtgatgtcgttcggtttgaccaatgcacctgccttcttcatgaacttaatgaataaagtgttcatggaatacttggataagtttgttgtggttttcattgatgacattctgatatactcacaatcagaggaagaccatcagcaccatctccgtctggtgttgggaaagttgcgggaacatcaattgtatgccaagcttagcaagtgtgagttctggttgtccgaagtcaaattcttagggcacgtgatatctgctaaaggagttgctgtggatcccgaaacagtgaccgccgtcaccgattggaagcaacccaagacagttacccaagtccgcagtttcttaggtttggcaggatactatcggagattcatcgagaacttctccaaaatcgctcgacccatgacacagttgttgaagaaagaagagaaatttgtgtccagcccgcaatgcgagaaggcgttccaaactctcaaggaaaagctggtttcctcgccggtgttaatcttgccggatactcgcaaggacttcatggtgtattgtgatgcttcgcgccaaggattggggtgcgtgctcatgcaggacggtcatgtggtagcctatgcctcacgccagctacgtcctcatgaaggcaactaccctacacatgatttggagttagccgcagtagttcatgctctaaaaatctggcggcactatctcattgggaatcgctgtgaaatctataccgaccataagagtctgaaatacatcttcactcagtcggacctgaatcttcggcaaaggagatggttagaactcatcaaggactatgatgtgggaattcactatcatcctggtaaggccaacgtggttgccgacgctctaagtcgaaagggccattgcaacactcttaacgtccgtggcattccacccgaacttagtcaacagatggaagccctgaacctaaacatagttggtcgtggatttttggccgcgttggaagccaagcccaccttgctcgatcaaatccgcgaggctcagaagaatgatccggacatgcatggactcctcaagaatatgaaacagggtaaagccgctggtttcacagaggatgaacacggaaccctatggaacggaaatcgggtatgcgttccagataaccgagaacttaaacagctgatacttcaggaagctcacgaaagtccttattccatccaccctggcagtacaaagatgtacttagatttgaaggagaaatactggtgggttagcatgaagcgggaaattgcagagtttgtggccctgtgtgatgtgtgccagcgtgtcaaggcagagcaccaacgaccggccggacttctccaaccactccaagtacctgaatggaaatgggatgaaattgggatggatttcatcaccggacttccaaaaacccaaggcggatatgattctatatgggtagttgtggatcgattaaccaaggtggctcgatttattcttgtgaagaccacctatggagggaacaaactagcggagctctacttcgctaggatcgtgagtctccacggcgttcccaagaaaatcgtatctgataggggaagccaattcacctctcacttttggaagaagctccaagaagagctgggtactcgattgaatttcagcaccgcctatcacccgcagacagatggacagaccgagcgtctaaatcaaattctagaagatatgctccgcgcatgtgtactagatttcgggaagacctgggataagagtctcccctatgccgagttctcctacaataacagctatcaatccagcatacaaatggcaccatatgaagcgttgtacgggcgcaaatgccggacaccgctcctgtgggaccaagttggggaaagccaagtgttcgggactgatatcctgagagaagctgaagctaaagtcagaatcattcgggataatctaaaggtggcacagtcacggcagaaaagttatgcagataaccgtcgccgtgacctggaattcgcagtggatgattttgtgtatcttcgagtcacgccattgcgaggtgtccacaggtttcagacgaaagggaagcttgcacctcggtatgtgggtcctttccgtatcgttgctcgacgcggagaagtcgcttaccagttggagctgcccgcctccttgggcaacgtgcatgatgtgttccatgtgtcgcaactcaagaaatgccttcgagtgccatccagcagaccgactcagagcaaattgaagttcgcgaagatttga

SEQ ID NO: 14158 - DNA, 4150 bp, Oryza sativa
  Clone ID: TFbOSC30068j.C1.o1.fg
ggcgaattcgagctcggtacccggggatcctctagagtcgacctgcaggcatgccgtggggaagaagctagacacggtgcagtgcagcgacgaagagaaagtcatcttcgccgcccaccagctgcaggggcccgcatctctctggtgggaccacttccaggctacgcagccagaggggcagccgatcacttgggctcgcttcaccgccgctttccggagaacccatgtgcccgccggagtcgtggctctcaagaagagggaattccgagagttgaagcaaggcaaccgctccgtgatggagtatttgcacgagttcaacaacttggcccgttacgcccctgaggatgtgcgggaagatgaggagaagcaagagaagttcttggcaggaatggaccccgagctgtctgttcgtctagtctctggggactatccggattttcaacgactggtggacaagagcatccgcttggaggccaagcacaaggagctggaatcgcacaagcgccgcttggcgaacttccgcaatcagcagggtgctaaccagagggtccgctacaccaatccctatccagggggatcctcctcgcaacagcaacaacagcagcagcaacctcgcccagcgccccgacctcaattcgtggtgcgcgtcccacagccgcagcagcagaatcagcaagggactcgtgcatcccgtcctcctacgccagctgtgcagcccgttcaaggccgcagggacgcttcaggtccgcagcggctgtgcttcaactgcttcgagcccggacactttgcggataaatgcccaaagccaaggcgtcagcaaggccaagcgcctccccgctccaacaacggcgggaaggatgtcattcggggccgtgtgaatcatgtgacggccgaggacgtgctgacaactcccgacgtcaccgttggtacgttcctcgtccattccatccctgctacaattttgttcgactctggagcttcccactcgtttatatctgtgccattcgtggggaaaaatcagttgggggtagaaaggcttagaaaccctctgctcatcaccacccctggaggggttatgacagcaaagtattatagccctgccgtccctatagaaattcaggggattccttttccctcggatctgattctgctagacaccaagaacttggatgtgatccttgggatgaattggttggcccaattccaaggagtagtggattgcgcgaggcgcactgtcactctgtaccgaggaccagaacaaccggttgttttctttgcacccccaacctctgtcagaagttcaaaacttcatcagatagaactgtcagaaattcccatcgtcagagagttcggagacgtgtttccggaagaactacctggtatgccgcccaagcgagagattgagttccggatagatcttgctccaggaaccactcctctgtacaagcgaccctaccgtatggcagcaaatgaactggccgaagtaaagaaacagttggaagagttgaaagaaaaggggtacatacgtccgagtacttccccatggggtgctcctgtgatttttgtagagaagaaagacaagacgaagaggatgtgcgtcgactacagagctctcaatgaagtcaccatcaaaaacaagtaccctcttccccggatcgatgatctgttcgatcaactcaaaggtgccactgtattctccaagattgatctccgttccggatatcaccaattacgtattcgtgaagaagatattccgaagaccgcattcactacgcgatatggactgtatgaattcacggtgatgtcgttcggcttgaccaatgctcctgccttcttcatgaacttaatgaacaaagcgttcatggaatacttggataagttcgttgtggttttcatcgatgacattctgatatactcacaatcagaggaagaccatcagcaccatctccgtctggtgttgggaaagttgcgggaacatcaattgtatgccaagcttagcaagtgtgagttctggttgtccgaagtcaaattcttggggcacgtgatatctgctaaaggagttgctgtggaccccgaaacagtgaccgccgtcaccgattggaagcaacccaagacagtcactcagattcgcagtttcttgggtttggcaggatactaccggaggttcatcgagaacttctccaaaatcgctcgacccatgacacagttgttgaagaaagaagagaagtttgtgtggagcccgcaatgcgagaaggcgttccaaactctcaaagaaaagctggtttcctcgccagtgttaatcttgccggatactcgcaaggatttcatggtgtattgtgatgcttcgcgccaaggattggggtgcgtgctcatgcaggacggtcatgtggtagcctatgcttcacgtcagctacgacctcatgagggcaactaccctacgcatgacttggagttagcagcggtggttcatgctctaaaaatctggcggcactatctcattgggaaccgctgtgaaatatatactgatcacaagagcttgaaatacatattcacccagtcggatctgaatcttcggcaaaggagatggttagaactcatcaaggattatgacgtgggaatacactatcaccctggtaaggctaacgtggttgccgacgctctaagtcggaagagccattgcaatactctcaacgttcgaggcattccacccgagcttaatcaacagatggaagccctgaacctaaacatagttggtcgtggattcttggctgcgttagaagccaagcccaccttgctcgatcaaatccgcgaggctcagaagaatgatccggacatgcatggactcctcaagaatatgaaacagggtaaagccgctggtttcacagaggatgaacacggaaccttatggaacggaaagcgggtatgcgttccagatagcagagaacttaaacagctgatacttcaggaagctcacgaaagtccttattccattcacccgggcagtaccaagatgtacttagacttgaaggagaaatactgcgtgtcaaggcagagcactagcgaccggctggacttctccaacctctccaagtaccagaatggaaatgggatgaaattgggatggatttcatcaccggacttccaaaaacccaaggtagctcgattcattcctgtgaagaccacctatggaggacacaagctagccgagctctacttcgctaggatcgtgagtctccatggcgttcccaagaaaatcgtatctgataggggaagccaattcacctctcacttttggaagaagctccaagaagagcttggtacccgactaaatttcagcaccgcgtatcacccgcagacagatggacagaccgagcgtctaaatcagatcttagaagatatgcttcgcgcatgtgtcctggacttcgggaagacttgggataagagtctcccctatgccgagttctcctacaataacagctatcaagccagcatacaaatggcaccttatgaagcgttgtatgggcgcaaatgccgaacaccgctattgtgggaccaagttggagaaagccaagtgttcgggactgatatcctgagagaagctgaagctaaagtcagaatcattcgggataatctaaaggtggcacagtctcggcagaaaagttatgcagataaccgtcgccgtgatctggaattcgcagtggatgattttgtgtaccttcgggtcacgccattgcgaggtgtgcacaggtttcagacaaaagggaagctcgcacctcggtatgtgggtccctttcgtatcactgctcgacgcggagaagtcgcttaccagctggagctgcccgcctccttgggcaacgtgcatgatgtgttccatgtgtcgcaactcaagaaatgtcttcgagtgccatccgagcaggccgactcagagcaaatcgaagttcgcgaagatttgacgtatgtggagaagccagtgaaaatcctggacaccatggagcgcaggaccaggaaccgggtaatccgtttttgcaaggtccagtggagcaaccacgccgaagaagaagctacttgggagcgtgaagacgagctgaaggcagcccatcccgatctcttcgccagttcttccgaatctcggggtcgagattccgtttaa

SEQ ID NO: 14159 - DNA, 1162 bp, Oryza sativa
  Clone ID: TFbOSC30470j.C1.o1.fg
atggcaatcaacctgaaggcagcaaccacaaccaccagggcaacccacctccacctcttccttcggcctccgccaccaccaccagacaccaacgccattctcacccaaatcctcgcccagcaagccaacatgatgactactttcctccaccacctccaaaatccgccacaacagaatgctccacctccacctccccaacactctaaactcgccgagttcctccgcatccgcccacctaccttctctagctccaacaaccccgtggatgcgttggattggttgcatgccgtggggaaaaagctggacactgtgcagtgcagtgatgaagagaaagtcatcttcgccgcccaccagctgcagggacccgcatctctatggtgggaccacttccaagctacgcagccagagggacagcctattacatgggctcgcttcaccgccgctttccggagaacccatgtgcccgccggagtcgtggccctcaagaaaagggaattccgagagttgaagcaaggcaaccgctccgtgatggagtatttgcatgagttcaacaacctggcccgttacgctccggaggatgtgcgggaagatgaggagaagcaagagaagttcctggcaggaatggaccccgagctgtccgtccgtctagtctctggggactatccggatttccaacgtctggtggacaagagcatccgcttggaagccaagcacaaggaactggagtcgcacaagcgccgcttggcgaatttccgcaatcaacagggtgctaaccaaagggtccgctacaccaatccctatccagggggatcctcctcgcagcagcaacaacagcagcagcaacctcgctccgcgcctcgacctcaattcgtggtgcgcgtcccacagccgcagcagcagcagaatcaacaagggactcgtgcgccccgtcctcttacgccagccgtgcagcctggtcaaggccacagggacgctcaaggtcagcagcgtctgtgcttcaactgctttgagcccgggcactttgcggataaatgcccgaagccaaggcgtcagcaaggccaagcgcctccccgctccaacaacggtggcaaggacgtcattcggggtcgtgtgaatcacgtgacggccgaggacgtgctgacaactccagacgtcatcgttg

SEQ ID NO: 14160 - DNA, 1956 bp, Oryza sativa
  Clone ID: TFbOSC30764j.C1.o2.gm
atgatgaatgctttcctccaccacctccaaaatccgccacaacagaatgctccaccaccacctccccaacactctaaactcgccgagttcctccgcatccgcccacctaccttctctagctccaacaaccccgtggatgcgttggattggttgcatgccgtggggaagaagttagacacggtgcagtgcagcgatgaggagaaagtcgtcttcgccgcccaccagctgcagggacccgcatctctatggtgggaccatttccaggctacgcagccagaggggcaacctattacttgggctcgcttcaccgccgctttccgaaggacccatgtgcccgctggagtcgtggcacttaagaaaagagaattccgagagttgaagcaaggcaaccgctccgtgatggagtatttgcacgagttcaacaacttggcccgttacgccccagaggatgtgcgggaagatgaggagaagcaagagaagttcttggcaggaatggaccctgagctgtccgtccgtctagtctctggggattatccggattttcaacgactggtggacaagagcatccgcttggaagccaagcacaaggaactggagtcgcacaagcgccgcttggcaaatttccgcaatcagcagggtgctaaccagagggtccgctacaccaatccctatccagggggatcctcctcgcagcagcaacaacagcagcagcaacctcgctccgcgcctcgacctcaattcgtgtctggtcaaggccgcagggacgcttcaggtccgcagcgtctgtgcttcaactgcttcgagcccgggcactttgcggataaatgcccaaagccaaggcgtcagcaaggccaagcgcctccccgctccaacaacggcgggaaggatgtcattcggggtcgtgtgaatcacgtgacggccgaggacgtgctgacaactccggacgtcatcgttggtacgttcctcgtgcattccatccctgctaccattttgttcgactctggagcttcccactcgtttatatctgtgccgttcgtggggagaaatcagttgggggtagaaaggcttagaaaccctctgctcatcaccacccctggaggggttatgacagcaaacaccgcctatcacccgcagacagatgggcagaccgagcgtctaaatcagatcctagaagacatgcttcgtgcatgtgtactagatttcgggaagacctgggataagagtctcccctatgccgagttctcctacaataacagctatcaagccagcatacaaatggcaccttatgaagcgttgtacgggcgcaaatggcggacaccgctattgtgggaccaagttggagaaagccaagtgttcgggactgatatcctgagagaagctgaagctaaagtcagaatcattcgggataatctaaaggtggcacagtcccggcagaaaagttatgcagataaccgtcgccgtgacttggaattcgcagtggatgactttgtgtaccttcgggtcacgccattgcgaggtgtacacaggtttcagacgaaagggaagctcgcacctcggtatgtgggtcctttccgtatcgttgctcgacgcggagaagtcgcttaccagttggagctgcccgcctccttgggcaacgtgcatgatgtgttccatgtgtcgcaactcaagaaatgccttcgagtgccatccgagcaggccgactcagagcaaattgaagttcgtgaagatttgacctacgtggagaggccagtgaaaatcctggacaccatggagcgcaggaccaggaaccgggtaatccgtttttgcaaggtccagtggagcaatcacgccgaagaagaagctacttgggagcgtgaagacgagctgaaggcagcccatcccgtcgtgacagcaaatcagggtcactctgtggctgacgactatgaaatgcttctgggtgagtactggcaaacctga

SEQ ID NO: 14161 - DNA, 546 bp, Oryza sativa
  Clone ID: TFbOSC31097j.C1.o1.fg
atggaccccgagctgtctgttcgtctagtctctggagactacccggacttccaacgtctggtggacaagagcatccgcttggaggccaagcacaaggagctggagtcgcacaagcgccgcttggcgaacttccgcaatcagcagggtgctaaccagagggtccgctacaccaatccctacccagggggatcctcctcgcagcagcaacaacagcagcagccacctcgctccgcgcctcgacctcaattcgtggtgcgcgtcccacagcagcaacagcagcagaatcagcaagggactcgtgcgccccatcctcctacgccagctgggcagcccgttcaaggccgcagggacgcttcaggtccgcagcggctgtgcttcaactgcttcgaacccgggcactttgcggacaaatgcccgaagccaaggcgtcagcaaggccaagcgcctccccgccccaacaacggtggccaggacgtcatccgtggtcgtgtgaatcacgtgacggccgaggacgtgctgacaactcccgacgtcatcgttgcttaa

SEQ ID NO: 14162 - DNA, 1929 bp, Oryza sativa
  Clone ID: TFbOSC31430j.C1.o1.fg
atgactggcttcgtcttggagctgcggggcatgtgcgtggtcttggggtatccacatggagtggattaccaggccaggccgctcccggagcaggagggtgaggatgcagagcctcacgctggttgggaggtcactgcagtgatcctctccggctctcccgagcggacttcgctggcagtcaccgcgggtggggactccttccccgccgcttgccagaacgccgctctcctcgccatcggcacccttcaccagcgctacccggacgagttgcagcactcgccctaccgctaccaccctcgtcgcggaggagcccgcgacttcgccaccttccgagacgccagctcggaggatgacgctaccgtcgtgcacctggcacgcatggtggaggcatacgacgcagctcgtatcgacttccatcagatggtgcgtcgtggcatggtggagaacaacatgaagatcctggagctgcgtcaggagaacctgcagctcaagaaggacctcgacgcgttggaggcgcagctgcaccagctcaagatcgcccagggagaggtcagccgtcccaagcgtcgccgcgtctgccgcagccagaagatcaccgcccgcaagagcacctccaggccagagcttgtccgtcagtccctggcgtggacctgcttcgtcgagacccctcgtgccgagcctgcgcccgtggttccccaggagggggaagcctccggcgttggtagctcggagggtgcgctgttgctcaccttccgtcctggcccgtcgcagcggagaaatgttaacaccggtgaaggcaaccaacccgagggcagcaaccccaacccccaaggcaacccacctccaccaccaccaccagacaccaacgccattctcacccagatcctcgcccaacaagccaacatgatgaatgctttcctccaccacctccaaaacccgccacaacagaatgctccaccaccccctccccaacactccaaactcgccgagttcctccgcatccgcccacctaccttctctagctccaacaaccctgtggatgctttggattggttgcatgccgtggggaagaagctagacacggtgcagtgcagtgatgaggagaaagtcgtcttcgccgcccatcagctgcagggacccgcatctctctggtgggaccacttccaggctacgcagccagagggacagccgattacttgggcccgcttcaccgccgccttccggagaacccatgccccggaggatgtgcgggaagatgaggagaagcaggagaagttcttggcaggaatggaccctgagctgtctgttcgtctagtctctggggactatcctgattttcaacgactggtggacaagagcatccgcttggaggccaagcacaaggaactggaatcgcacaagcgccgcttggcgaacttccgcaatcagcagggtgctaaccagagggtccgctacaccaatccctatccagggggatcctcctcgcagcagcagcagcagcagcaacctcgcccagcgccccgacctcaattcgtggtgcgcgtcccacagccgcagcagcagcagaatcagcaagggactcgtgcgccccgtcctcctacgccaactgtgcagcccgttcaaggccgcagggacgctcaaggtcagcagcgtctgtgcttcaactgtttcgagcccgggcactttgcggataaatgcccgaagccaaggcgtcagcaaggccaagcgcctccccgctccaacaacggcgggaaggatgtcatccgtggtcgtgtgaatcacgtgacggccgaggacgtgctgacaactccagacgtcatcgttgagaagaaagacaagacgaagaggatgtgcgttgatgtcacgaccggaaataacccaacgggcattccttacgtgcgtgcattaatccttgtcccaggaggcaag

SEQ ID NO: 14163 - DNA, 933 bp, Oryza sativa
  Clone ID: TFbOSC31430j.C1.o3.fg
atggctcttaagaaaagggaattccgggagttgaagcaaggcaaccgctccgtgatggagtatttgcatgagttcaacaacctggcccgttacgccccagaggatgtgcgggaagatgaggagaagcaggagaagttcttggcaggaatggaccctgagctgtctgttcgtctagtctctggggactacccggactttcaacggctggtggacaagagcatccgcttggaagccaagcacaaggagctggaatcgcacaagcgccgcttggcaaacttccgcaatcaacagggtgctaaccagagggtccgctacaccaatccctatccagggggatcctcctcgcagcagcagcaacagcagcagcaacctcgcccagcgccccgacctcaattcgtggtgcgcgtcccaccgccgcagcagcagcagaatcagcaagggactcgtgcaccccgtcctcctacgccaactgtgcagcccgttcaaggccgcagggacgctcaaggtcagcagcgtctgtgcttcaactgtttcgagcccgggcactttgcggacaaatgcccgaagccaaggcgtcagcaaggccaagcgcctccccgctccaacaacggtggcaaggatgtcatccgtggtcgagtgaatcacgtgacggccgaggacgtgctgacaactccagacgtcatcgttggagttgctgtggaccccgaaacagtaaccgccgtcaccgaatggaagcaacccaagacagttactcagattcgcagtttcttaggtttggcaggatactaccgaagcgtgtcaaggcagaacaccaacgaccggctggacttctccagcctctccaagtgccggaatggaaatgggatgaaattgggatggatttcatcaccggccttccaaaaacccaaggtggatatgactctatatgggtaa

SEQ ID NO: 14164 - DNA, 5782 bp, Oryza sativa
  Clone ID: TFbOSC31890j.C1.o1.np
atgtcggccagacgtcccggccggtttccttcctctcccggccgccctctcccccttccaaccctatttaaaccctcctgacacctccttcgctcgtttccaccctttgccgtgccttctcctcgccggaatcgagctcgcgccgtcgctctctctctcctccgtcgccgacgacgtccggccggccttctccgctcgccgggaccgtctcccgccccggcgtcgcctcctccggcttcacggcaccgccgccgtccccgtccaccccctcgtcgagctcgccgaccgccgaagcaccgccatccccgtcgacccgagccgcgccgccgccttcctccgctccggccgcctttttcgtcgtcgccatcgacctagggtgagacgtggaccaccgcctcttttcccccttcccttcccctctctcggccgccgctccgccgtgcctatggccgccgccggcgaccataggggcgcgggcgccgcctcccgccggctgcgccgtcgtggccaccttcgggcgcgccgagtggccaccgcgtggggcccggccgtcagccgcccgtgccctcgggtgcggcagacgcgtggggcccacggcgccggtcagtgcgagcccgggtgcgcccggtctaccatggacccacctcggccacataaggaccggtcttcaggcctctgttgcaaagcactaccgtacttccacatgtctagtggggcaaatgaaggctacacgagctgcggcccggtagtcgagatgtcatggcacagggctggtgtcctgctgctaggggctcagtcttgcctacctatcctggaggttccggccgtaggtagggttgggtcgatgtacacctctgatcagagtataacctattcgaatagccgcgccctcggttatgggcaagcctagcaatgtacccaaatggccggcagcctcaaccgtcgtggcctggacctgactggcttcgttttggagctgcggggcatgtgcgttgtcctggggtatccgcatggagtggactaccagggcaagcagctcccggagcaggagggtgacgatgcagagccccacgctgcttgggaggtcactgcagtgatcctcactggctcacccgagaggacttcgttggcagtcaccgcgggtggagattctttctccgccgcttgccagaacgccgcactccttgccatcggcactcttcaccagcgctacccggacgagttgcagcactcgccctaccgctaccacccttgtcgaggaggagcccgcgactacgccaccttcagggatgctagctcggaggatgatgctaccatcatgcatctggcgcgcatggtggaggcgtacaacgcggcccgtatcgacttccatcgtatggtgcgccgtgggttggtcgagaacaacatgaagatcctggagctgcgttaggagaatttgcagctgaagaaggacttggacgcggtggaggcgcagctgtgtcagctcaagatcgcccagggagaggtctgtcgccccaagcgccgccgcgtctgccgcagcctgaagatcaccgcccgcaagagtacctccaggcctgagcttgttcgtcagtccttggcatggacttgcttcgtggagacccctcgcgccgagcccacgccctcggttcctcaggaggagggagcctctggtgttggtagcacggaggatgtgctgttgcttaccttccatggtgacaaccaggagaagcgcggttaccggcaaaggcaatcaccccgaaggcagcaaccacagcaaccatggcaggccaccttcaccttcttccccgccaccaccaccaccacctgacaccaaccccatcctcacccaaatcctcgcccagcaggccaacatgatggctgctttcctccaccacatccaaaatccgccacagcataatgctccacctccaccaccacccccgcaacattctaaactcgccgagttcctccgcatccgcccgcctaccttctctagctccaataaccccgtggatgccttggattggttgcatgccgcggggaaaaagttagacaccgtgcagtgcaacgatgaggagaaagtcatctttgccacccaccagctgcaggggcccgcatctctatggtgggaccacttccaggctacgcagccagaggggtagcctattacctgggcctgcttcaccgccgctttccggaggacccatgtgcccgccggagtcatggcccttaagaagagggaattccgggagttaaagcaaggcaaccactctgtgatggagtatttgcatgagtttaacagcctggcccggtacgccccagaggatgtttgggaagatgaggagaagcaggagaaattcctggcagggatggaccctgagctgtctgtgcgtctggtctccggggattatccggatttccagcgtctggtggacaacagcattcgcctggaagccaagcacaaggaactggagtcgcacaagcgtcgcttggcaaatttccgcaatcaacagggggctaaccaaatgatccgatacaccaatccctatccagggggatcctcctcgcagcagcagcagcaaccacgctccgcgccccgacctcaattcgtggtgcgtgtcccacagtcgcagcaacagcagagtcagcaaggtacccgtgcgccccgtcctcctgcgccagccgtgcagcttggacaaggccgcagggatgctcaaggtcaacaacgtctgtgcttcaactgcttcgagcccgggcactttgcggataaatgcccaaagccgaggcgccagcaaggccaagcgcctccccgacccaacaacggtggtaaggatgtcactcggggtcgtgtgaaccacgtgactgccgaggatgtgctgacaactccagacgtcatcgttggtacgttcctcattcattccatccctgctaccattttgttcgactctggagcttcccactcgtttatatctgtgccattcgtggagagaaattagctgagggtagaaaggcttaggaaccctctgctcatcaccacccttggaggggtaatgacagcaaagtattatagccctgccgttcctatagaaatccagggaattcctttcccctcggatttgattcttctagacaccaagaacttggatgtgatcctcgggatgaattggttggctcaattccaaggagtagtggatcgcgcaagacgcactgtcactctgtatcgggggcctgatcaaccagttgttttctttgcacccccaacttccgccggcagttcagtacttaatcagctaggattgccagaaatacccatcgtcagtgagttcggtgacgtgtttccggaagaactacccagtatgccgccccagcgagagattgagttccagatagatcttgctccagggaccactcctctatacaagcgaccctaccgtatggcagcacatgaactggccgaagtcaagaaacagttggaagagttgaaagaaaaggggtatatacggccgagcacttccccctggggttctcccgtgatttttgtggagaagaaagacaagacaaagaggatatgcgttgactacagagctctcaatgaagttactatcaaaaaacaagtacgctcttccccggattgatgacctgttcgatcagcttaaaggtgccactgtattctccaagatcgatcttcgctccggatatcaccaattgcgtattcgtgaagaagatatcccgaagaccgcgttcaccacgcattatggactgtatgaattcacggtgatgtcgttcggtctaaccaatgcgcctgccttcttcatgaacttaatgaacaaagtgttcatggaatacttggataagtttgttgtggttttcattgacgacatcctggtgtacttacaatcagaggaagaccatcagcagcacctccgtctggcattgggaaagttgcgggaacatccattgtatgccaagcttagcaagtgtgagttctggttgtccgaagtcaagttcttagggcacgtgatatctgctaaaggagttgctgtggatcccgaaacggtgactgccgtcactgattggaagcaacccaagacagtcactcaggttcgcagctttttgggtttggcaggatactaccgaagattcatcgagaatttctccaaaattgctagacccatgacgcagttgctgaagaaggaagaaaaatttgtatggagcccgcaatgcgagaaagcattccaaactctcaaagaaaagctagtttcctcgccagtgttaatcttactggatactcgcaaggacttcctggtgtactgtgacgcttcgcgccaaggattggggtgcgtgttaatgcaggaaggtcatgtggtagcctatgcctcacgccagccacggccccatgaaggcaactaccctacccatgatttggagttggccgctgtggttcatgctctaaaaatctagcggcattatctcattggaaatcgctgcaaaatatataccgatcataagagtttgaaatacatcttcactcagtcggatctgaatcttcggcagagaaggtggttagagctcattaaggattatgatgtgggaatccattatcaccctggtaaggccaacgtggtcgcagacgcgctgagtcgaaaaagcagttgcaacactcttggcgtccgtggcattccaccggagcttaatcaacagttggaagccctgaacctaagcatcgttagccatggattcttggctacattggaagccaagcctaccttgctcgatcaaatccgcgaggcccagaagaatgatctagatatgcatgggatactcaagaatatgaaacagggtaaagccgctggtttcacagaagatgaacacggaaccctatggaacggaaatcgttgtgtcaaggcagagcaccaacgaccggccagacttctccaacctctccaagtaccagaatggaaatgggatgaaattgggatggatttcatcaccggacttccaaaaacccaaggcagatatgattctatatgggtagtcgtggaccgactaaccaaggtagctcggtttattcctgtgaagaccacctatggagggaacaaattagctgaactctacttcgctaggatcgtgagtctccatggcgttcctaagaaaattgtatctgatcagggaagccaattcacttctgacatctggaagaagctccaagaagagttgggtacccgattaaattttagcaccgcgtatcacccgcagacagatgggcagaccgagcgtctaaatcagatcctagaagatatgctccatgcatgtgttctagattttgggaagacctgggataagagtctcccctatgccgagttctcctacaataacagctaccaagccagcatacaaatggcaccttatgaagcgttgtatggccgcaaatgccagacaccactattgtgggaccaagttggggaaagccaagtgttcgggactgatatcctgagagaagctgaagctaaagtcagaaccattcgggataatctaaaggtggcacagtcccggcagaagagttatgcagatacccgacgccgtaacctggaattcgcagtggacgattttgtgtaccttcgggtcacgccattgcgaggagtacacaggtttcagatgaaagggaagctcgcacctcggtttgtgggtcctttccgcatcattgctcgacgcggagaagtagcttatcaattggagctgcccacatccttgggcaacgtgcatgatgtgttccatgtgtcgc

SEQ ID NO: 14165 - DNA, 3213 bp, Oryza sativa
  Clone ID: TFbOSC32968j.C1.o2.fg
atgtcatggcacagggccggtgtcctgctgctgggggctcagtcctgcctgcctgtcccgggggttccggccgtaggtgggattgggtcggtactcttgtctatggctaggatggattggaaactatgtcacgtcttccgtctgtataccgtggtgatggccggcagcgtcacccgtcgtggtttggacatgactggcttcgtcttggagctgcggggcatgtgcgtggtcttggggtatccacatggagtggactaccaggcccggccgcttccggagcaggagggtgacgatgcagagccccacgctggttgggaggtcactgcagtgatcctctctggctctcccgagcggacttcgctggcagtcaccgcgggtggagattctttccccgccgcttgccagaacgccgctctcctcgccatcggcactcttcaccagcgctacccggacgagttgcagcactcgccctaccgctaccaccctcgtcgcggaggagcccgcgactacgccaccttccgggatgctagctcggaggatgacgctaccatcgtgcacctggcgcgcatggtggaggcatacgacgcggctcgtatcgacttccatcagatggtgcgccgtgggatggtcgagaacaacttgaagatcctggagctgcgtcaggagaacctgcagctcaagaaggacctagacgcggtggaggcgcagctgcatcagctcaagatcgcccagggagaggactgccgccccaagcgtcgctgcgtctgccgcagccagaagatcaccgcccgcaagagcacctccaggcccgagcttgttcgtcagtccctggcgtggacctgcttcgtggagacccctcgtgccgagcccgcgcccgtggttccccaggagggggaagcctccggcgttggtagcacggaggatgcgctgttgctcaccttccgccctggcccgtcgcagcggagaaatgctaataccggtgatggcaaccaacctgaaggcagcaaccacaaccaccaaggcaacccacctccacctcctcctccgcctccacctccaccaccagataccaacgccattctcacccaaatcctcgcccagcaagccaacatgatgactgctttcctccaccacctccaaaatccgccacaacataatgctcccccaccacctccccaacactctaaactcgccgagttcctccgcatccgtccacccaccttctctagctccaacaaccctgtggatgcgttggattggttgcatgccgtggggaagaagctagacacggtgcggtgcagtgatgaggagaaagtcgtcttcgccgcccaccagctgcagggacccgcatctctatggtgggaccacttccaggctacgcagcccgaggggcaaccgattacttgggcccgcttcaccgccgctttccggagaacccatgtgcccgctggagtcgtggctcttaagaaaagagaattccgagagttgaagcaaggcaaccgctccgtgatggagtatttgcacgagttcaacaacttggcccgttatgctccggaggatgtgcgggaagatgaggagaagcaagagaagttcttggcaggaatggaccccgaactgtctgttcgtctagtctctggggactatcctgatttccaacgtctggtggacaagagcatccgcttggaggccaagcacaaggagctggagtcgcacaagcgccgcttggcgaacttccgcaatcagcagggtgctaaccagagggtccgctacaccaatccctacccagggggaacctcctcgcagcagcagcagcagcagcaacctcgcccagcgccccgacctcaattcgtggtgcgcgtcccacagccgcagcagcagcagaatcagcaagggactcgtgcgccccgtcctcctacgccaactgtgcagcccgttcaaggccgcagggacgctcaaggtccgcagcggctgtgcttcaactgcttcgagcccggacactttgcggataaatgtccaaagccaaggcgtcagcaaggccaagcgcctccccgctccaacaacggcgggaaggatgtcattcggggtcgtgtgaatcacgtgacggccgaggacgtgctgacaactccagacgtcatcgttggtacgttcctcgttcattccatccccgctacaattttgttcgactctggagcttcccactcgtttatatctgtgccattcgtggggagaaatcagttgggggtagaaaggcttagaaaccctctgctcatcaccacccctggaggggttatgacagcaaagtattatagccctgccgtccctatagaaattcaggggattccttttccctcggatctgattctgctagacaccaagaacttggatgtgattcttgggatgaattggttggctcaattccaaggagtagtggattgcgcgcggcgcactgtcactctgtaccgagggccagaacaaccggttgttttctttgcacctccaacctctgtcagaagttcagaactgcatcagataggtctgtcagaaatccccatagtcagagagttcggagacgtgtttccggaagaactacccggaatgccgcccaagcgagagattgagttccggatagatcttgctccaggaaccactcctctgtacaagcgaccctaccgtatggcagcaaatgaactggccgaagttaagaaacagttggaagagttgaaagaaaaggggtatatacgtccgagtacttccccctggggtgctcctgtgatttttgtggagaagaaagacaagacgaagaggatgtgcgttgactacagagctctcaatgaagtcaccatcaaaaacaagtatcctcttccccggatcgatgacctgttcgatcagcttaaaggtgccactgtattctccaagatcgatcttcgttccggatatcaccaattacgtattcgtgaagaagatattccgaagaccgcattcaccacgcgatacggactgtatgaattcacggtgatgtcgttcggtttaaccaatgcacctgccttcttcatgaacttaatgaacaaagtgttcatggaatacttggacaagtttgttgtggttttcattgatgacattctgatatactcacaatcagaggaagaccatcagcaccatctctgtcacatcctgatttttgtttcaggatttataaattatttaataaattaa

SEQ ID NO: 14166 - DNA, 3861 bp, Oryza sativa
  Clone ID: TFbOSC33328j.C1.o1.fg
atggcccttaagaaaagggaattccgagagttgaagcaaggcaaccgctccgtgatggagtatttgcatgagttcaacaacctggcccggtacgccccggaggatgtacgggaagatgaggaaaagcaggagaagttcttggcaggaatggaccctgagctgtccgtgcgtctagtctccggtgactatctggatttccaacgtctggtggacaagagcatccgcttggaagccaagcacaaggaactggagtcgcacaagcgccgcttggcgaatttccgcaatcaacagggagctaaccaaaggatccgctacaccaatccctatccagggggatcgtcctcgcaacagcaacagcagcagcaacctcgctccgcgccccgacctcaattcgtggtgcgcgtcccacagccgcagcaacagcagagccagcaagggacccgtgcgccccgtcctcctacgccagccgcgcagtctggtcaaggccgcagggacgttcaaggtccgcagcgtctgtgcttcaactgcttcgagcctgggcactttgcggataaatgcccaaagccgaggcgccagcaaggccaagcgcctccccgctcaaacaacggtggtaaggatgtcattcggggtcgtgtgaaccacgtgacggccgaggacgtgctgacgactccagacgtcatcgttggtacgttcctcattcattccatccctgctaccattttgttcgactctggagcttcccactcgtttatatctgtgccattcgtggggagaaatcagttgggggtagaaaggtttaggaaccctctcctcatcaccacccctggaggggttatgacagcaaagtattatagtcctgccgtccctatagaaattcaggggatcccttttccctcggatctgattcttctagacaccaagaacttggatgtgatccttgggatgaattggttggctcaattccaaggagtagtggattgtgcaagacgcactgtcactctgtaccgagggccggaacaaccggttgttttctttgcacctccaacctctgtcagtagttcagaacttcatcagataggactgtcagaaatccccatcgtcagagagttcggagacgtgtttccggaagaactacccgatatgccgcccaagcgagagattgagttccggatagatcttgctccaggaaccactcctctgtacaaacgaccctaccgtatggcagcaaatgaactggccgaagttaagaaacagttggaagagttgaaagaaaaggggtatatacggccgagtactttcccctggggtgctcctatgatttttgtggagaagaaagacaagacgaagaggatgtgcgttgactacagagctctcaataaagtcaccatcaaaaacaagtaccctcttccccggatcgatgatctgttcgatcagcttaaaggtgccacggtattctccaagattgatcttcgttccggatatcaccagttgcgcatccgtgaagaagatattccgaagaccgcattcaccacacgatacggactccatggtcacatcattctggtatactcacaatcagaggaagaccatcagcaccatctccgtctggtgttgggaaagttgcgggaacatcaattgtatgccaaacttagcaagtgtgagttctggttgtccgaagtcaaattcttagggcacgtgatatctgctaaaggagttgctgtggaccccgaaacagtgaccccgtcccgattggaagcaacccaagacagtcactcaaatccgcagtttcttaggtttggcaggatactaccggagttgttgaagaaaaaatataaatttgtgtggagcccgcaatgcgagaaggcgttcaaaactctcaaagaaaagctggtttcctcgccagtgttaatcttgccggatactcgcaaggacttcatggtgtattgtgacgcttcgcgccaaggattggggtgcgtgctcatgcaggaaggtcatgtggtggcctatgcctcacgccagctacggcctcatgaaggcaactaccctacccatgatttggagttagccgcggtggttcatgctctaaaaatctggcggcattatctcattgggaatcgctgtgaaatatatactgatcataagagtttgaaatacatcttcacccagtcggatctgaatcttcggcagagaagatggttagagctcatcaaggattatgatgtgggaatccactatcatcccggtaaggccaacgtggtcgtcgacgctctaagtcaaaaaagccattgcaacactcttaacgtccgtggcattccacccgaacttaatcaacagatggaagccctgaacctaagcatagttggtcgcggattcttggctgcgttggaggccaagcctaccttgctcgatcaaatccgcgaggctcagaagaatgatccggacatgcgtggactcctcaagaatatgaaacagggtaaagccgctggtttcacagaggatgaatacggaaccctatggaacggaaatcgggtatgcgttccagataacagagaacttaaacagctgatacttcaggaagctcacgaaagtccttattccatccaccctggcagtacgaagatgtacttagacttgaaggagaaatactggtgggttagtatgaagcgggaaattgcagagttcgtggccctttgtgatgtgtgccagcgtgtcaaggcagagcaccaacgaccggccggactcctccaacctctccaagtaccagaatggaaatgggatgaaattgggatggatttcatcaccggacttccaaaaacccaaggtggatatgattctatatgggtagttgtggaccgactaaccaaagtagctcggtttattcctgtgaagaccacctatggagggaacaaactagccgagctctacttcgctaggatcgtgagtctccatggcgttcctaagaaaattgtatctgataggggaagccaattcacctctcacttttggaagaagctccaagaagagctgggtacccgattaaatttcagcaccgcgtatcacccgcagacagatggacagaccgagcgtctgaatcagatcctagaagatatgcttcgcgcatgtgtcctagatttcgggaagacctgggataagagtctcccctatgccgagttctcctacaataacagctaccaagccagcatacaaatggcaccctatgaagcgttgtatggacgcaaatgccggacatcgctattgtgggaccaagttggggaaagccaagtgttcgggactgatatcctgagagaagctgaagctaaagtcagaaccattcgggataatctaaaggtggcacagtcctggcagaaaagttatgcagataaccgtcgccgtaacctggaattcgcagtggacgattttgtgtaccttcgggtcacgccattgcgaggtgtacacaggtttcagacgaaagggaagctcgcacctcggtatgtgggtcctttccgtatcgttgcccgacgcggagaagtcgcttaccagttggagctgcccgcctccttgggcaacgtgcatgatgtgttccatgtgtcgcaactcaagaaatgtcttcgagtgccatccgagcaggccgactcagagcaaattgaagttcgcgaagacttgacctacgtggagaggccagtgaaaatcctggacaccatggagcgcaggaccaggaaccgggtaatccgtttttgcaaggtccaatggagcaaccacgccgaggaagaagctacctgggagcgtgaagacgagctgaaggcagcccatcccgatctcttcgccagttcttccgaatctcggggtcgagattccgtttaa

SEQ ID NO: 14167 - DNA, 2007 bp, Oryza sativa
  Clone ID: TFbOSC34304j.C1.o5.fg
atgactggcttcgtcctggagctgcggggcatgtgcgtggtcttggggtatccacatggagtggattaccaggccaggccgctcccggagcaggagggtgaggatgcagagcctcacgctgggtgggaggtcactgcagtgatcctctctggctctcccgagcggacttcgctggcagtcaccgcgggtggggattcttctcccgccgcttgccagaacgccgctctcctcgccatcggcaccctccaccagcgctacccggacgagttgcagcactcgccctatcgctaccaccctcgtcgcggaggagcccgcgacttcgccaccttccgagatgctagcttggaggatgacgctaccgtcgtgcatctggcacgcatggtggaggcatacgacgcggctcgtatcgacttccatcagatggtgcgtcgcgggatggttgagaacaacctgaagatcctggagctgcgtcaggagaacctgcagctcaagaaggacctcgacgcattggaggcgcagctgcaccagctcaagatcgcccagggagaggacagccgccccaagcgtcgccgcgtctgccgcagccagaagatcaccgcccggaagagcacctccaggcccgagcttgttcgtcagtccctggcgtggacttgcttcgtcgagacccctcgtgccgagcctgcgcccgtggttccccaggagggggaagcctccggcgttggtagcacggaggatgcgctgttgctcaccttccgccctggcccgtcgcagcggagaaatgttagcaccggtgaaggcaaccaacccgaaggcagcaaccccaacccccaaggcaatccacctccaccaccaccaccagacaccaacgccattctcacccaaatcctcgcccagcaagccaacatgatgaccgctttcctccaccacctccaaaatccgccacaacagaatgctccaccaccacctccacaacactctaagctcgccgagttcctccgcatccgcccacccaccttctctagctccaacaatcccgtggatgcgttggattggttgcatgccgtggggaagaagctggacactgtgcagtgcagtgatgaagagaaagtcatcttcgccgcccatcagctgcaggggcccgcatctctatggtgggaccatttccaggctacgcagccagaggggcaaccgattacttgggcccgcttcaccgccgctttccggagaacccatgtgcccgccggagtcgtggctcttaagaagagggagttccgggagttgaagcaaggcaaccgctccgtgatggagtatttgcacgagttcaacagtctggcccggtacgctccggaggatgtgcgggaagatgaggagaagcaagagaagttcttggcgggaatggaccctgagctgtccgttcgcctagtctctggggactatccggacttccaacgtctggtggacaagagcatccgcttggaggccaagcacaaggagctggagacgcacaagcgccgcttggcgaacttccgcaatcagcagggcgctaaccagagggtccgctacaccaatccctatccagggggatcctcctcgcagcagcaacaacagcagcagcaacctcgctccgcgcctcgacctcaattcgtggtgcgcgtcccacagccgcagcagcagcagagtcagcaagggactcgtgtagcccgtcctcctacgccagttgtgcagcccgttcaaggccgcagggacgctcaaggtcagcagcgtttgtgcttcaactgcttcgagcccgggcactttgcggataaatgcccaaagccaaggcgtcagcaaggccaagcgcctccccgctccaacaacggtggcaaggacgtcattcggggtcgtgtgaaccacgtgacggccgaggacgtgctgacaactccagacgtcatcgttgagagttcggagatgtgtttccggaagaactacctggtatgccgcctaagcgagagattgagttccggatag

SEQ ID NO: 14168 - DNA, 1414 bp, Oryza sativa
  Clone ID: TFbOSC3431j.C1.o1.fg
atgaagatcctggagctgcggcaggagaacctgcagctcaagaaggacctcgacgcggtggaggcgcagctgcatcagctcaagatcgcccagggagaggtctgccgccccaagcgtcgccgcgtctgccgcagccagaagatcaccgcccgcaagagcacctccaggcctgagcttgttcgtcagtccctggcgtggacctgcttcgtcgagacccctcgtgccgagcccgcgcccgtggttccccaggagggggaagcctccggcgttggcagcaaccacaaccaccagggcaacccacctccacctcctcctccgcctccgccaccaccaccagacaccaacgccattctcacccaaatcctcgcccagcaagccaacatgatgactactttcctccaccacctccaaaatccgccacaacagaatgctccacctccacctccccaacactctaaactcgccgagttcctccgcatccgcccacctaccttctctagctccaacaaccccgtggatgcgttggattggttgcatgccgtggggaagaagctggacactgtgcagtgcagtgatgaagagaaagtcatcttcgccgcccaccagctgcagggacccgcatctctatggtgggaccacttccaagctacgcagccagagggacagcctattacatgggctcgcttcaccgccgctttccggagaacccatgtgctcgccggagtcgtggccctcaagaaaagggaattccgagagttgaagcaaggcaaccgctccgtgatggagtatttgcatgagttcaacaacctggcccgttacgctccggaggatgtgcgggaagatgaggagaagcaagagaagttcctggcaggaatggaccccgagctgtccgtccgtctagtctctggggactatccggatttccaacgtctggtggacaagagcatccgcttggaagccaagcacaaggaactggagtcgcacaagcgccgcttggcgaatttccgcaatcaacagggtgctaaccaaagggtccgctacaccaatccctatccagggggatcctcctcgcagcagcaacaacagcagcagcaacctcgctccgcgcctcgacctcaattcgtggtgcgcgtcccacagccgcagcagcagcagaatcaacaagggactcgtgcgccccgtcctcctacgccagccgtgcagcctggtcaaggccacagggacgctcaaggtcagcagcgtctgtgcttcaactgctttgagcccgggcactttgcggataaatgcccgaagccaaggcgtcagcaaggccaagcgcctccccgctccaacaacggtggcaaggacgtcattcggggtcgtgtgaatcacgtgacggccgaggacgtgctgacaactccagacgtcatcgttg

SEQ ID NO: 14169 - DNA, 3828 bp, Oryza sativa
  Clone ID: TFbOSC34810j.C1.o2.fg
atgtcatggcagagggttggtgccctgctgctagggggctcagtcctgcctgcctgtcccgggtgtcccggccgtagggggattgggtcggtactcttgtttatggctaggatgggttgggaactatgtcacgtcttccgtccgtataccgtggtgatggtgatgaccaggagaagtgctaacaccggtgatggcaaccaacctgaaggcagcaaccacaaccatcagggcaacccacctccacctcctcctccgcctccaccaccaccaccagataccaacgccattctcacccaaatcctcgcccagcaggccaacatgatgactgctttcctccaccacctccaaaatccgccacaacagaatgctccaccaccacctccccaacactctaaactcgccgagtttctccgcatccgcccacctaccttctctagctccaacaaccccgtggatgcgttggattggttgcatgccgtggggaaaaagctagacactgtgcagtgcagcgatgaggagaaagctacgcagccagagggacagcctattacatgggctcgcttcaccgccgctttccgaagaacccatgtgcccgccggagtcgtggcccttaagaaaagggaattccgagagttgaagcaaggcaaccgctccgtgatggagtatttgcatgagttcaacaacctggcccggtacgccccggaggatgttcgggaagatgaggagaagcaagagaagttcctggcaggaatggaccttgagctgtccgtgcgtccagtctccggggactatccggattttcaacgtctggtggacaagagcatccgcttggaagccaagcacaaggaactggagtcgcacaagcgtcgcttggcgaatttccgcaatcaacagggggctaaccaaagggtccgctacaccaatccctatccagggggatcctcctcgcagcagcagcagcaaccacgctttgcgccccgacctcaattcgtggtgcgcgtcccacagccgcagcacagcagagtcagcaagagacccgtgcgccccgtcctcctgcgcccgttgtgcagcctggtcaagagccgtagagacgttcaaggtcagcagcgtctgtgcttcaactgcttcgagccggggcactttgcggataaatgcccaaagccgaggcgccagcaaggccaagcgcctccccgccccaacaacggtggtaaggacgtcattcggggtcgtgtgaaccacgtgacggccgaggacatgctgacaactccagacgtcatcgttggtacgttcctcattcattccatccctgctaccattttgttcgactctggagcttcccactcgtttatatctgtgccattcgtggggagaaatcagttgggggtagaaaggcttaggaaccctctgctcatcaccacccctggaggggttatgacagcgaagtattatagtcctgccgtccctatagaaattcaggggattccttttccctcggatctgattctgctagacaccaagaacttggatgtgatccttgggatgaattggttggctcaattccaaggagtagtggattgcgcgagacgcactgtcactctgtaccgagggccggaacaaccggttgttttctttgcacccccaacctcagtcagaagttcggaacttcatcagataggactgtcagaaatccccatcgtcagagagttcggagacgtgtttccggaagaactacctggtatgccgcctaagcgagagattgagttccggatagatcttgctccaggaaccactcctctgtacaagcgaccctaccgtatggcagcaaatgaactggccgaagtcaagaaacggctggaagagttgaaagaaaaggggtatatacgtccgagcacttccccctggggtgctcccgtgatttttgtggagaagaaagacaagacgaagaggatgtgcgttgactacagagctctcaatgaagtcaccatcaaaaacaagtaccctcttccccggatcgatgatctgttcgatcagcttaaaggtgccactgtattttccaaaatggatcttcgttccggatatcaccaattacgtattcgcgaagaagatattccgaagaccgcattcaccacgcgttatggactgtatgaattcacggtgatgtcgttcggtctaaccaatgctcctgccttcttcatgaacttaatgaacaaagtgttcatggagtacttggataagtttgttgtggttttcattgacgacattctggtgtactcacaatcagatgaagaccatcaacagcatctccgtctggtgttgggaaagttacgggaacatcaattgtatgccaagcttagcaagtgtgagttcttgttgtccgaagtcaaattcttagggcacgtgatatctgctaaaggagttgcggtggaccccgaaacagtgaccgctgtcactgattggaagcaacccaagacagttactcaggttcgcaactttttgggtttggcaggatactaccggaggttcatcgaaaacttctccaaaatcgctcgacccatgacacagttgttgaagaaagaggaaaaatttgtgtggagcccgcaatgcaagaaggcgttccaaactctcaaggaaaagctggtttccttgccagttttaatcttaccggatactcgcaaggacttcatggtgtgctgtgatgcttcgcgccaaagattgggcgtgtcaaggcagagcaccaacgaccggccggacttctccaacctctccaagtacctgaatgaaaatgggatgaaattgggatggatttcatcaccggacttccaaagacccaaggtagctcgattcattcctgtgaagaccacctatggagggaacaaactagccgagctctacttcgctaggatcgtgagtctccatggcgttcccaagaaaatcgtatctgataggggaagccaattcacctttcacttttggaagaagctccaagaagagctgggtacccgattaaacttcagcaccgcgtatcacccgcagacagatgggcagaccgagcgtctaaatcagatcctagaagatatgcttcgcgcatgtgtcctggatttcgggaagacctgggataagagtctcccctatgccgagttctcctacaacaacagctatcaagccagcatacaaatggcaccttatgaagcgttgtatgggcgcaaatgccggacaccgctaatgtgggatcaagttggggaaagccaagtgttcgggactgatatcctgagagaagctgaagctaaagtcagaaccattcgggataatctaaaggtggcacagtcccggcagaaaagttacgcagataaccgtcgccgtgacctggaattcgcagtggatgattttgtatatcttcgggtcacgccattgcgaggtgtacacaggtttcggacaaaagggaagctcgcacctcggtatgtgggtcctttccatatcgttgctcgacgcggagaagtcgcttaccaattggagctgcccgcctccttgggcaacgtgcatgatgtgttccatgtgtcgcaactcaagaaatgtctccgagtgccatctgagcaggctgacccagagcaaattgaagttcgcgaagacttgacctacgtggagaggccagtgaaaattctggacaccatggagcgcaggaccaggaaccgggtaatccgtttttgcaaggtccagtggagcaaccacgccgaggaagaagctacctgggagcgtgaagacgagctgaaggcagcccatcctgatctcttcgcctgttcttccgaatctcggggtcgagattccgtttaa

SEQ ID NO: 14170 - DNA, 938 bp, Oryza sativa
  Clone ID: TFbOSC34815j.C1.o1.np
ccgctccgtgatggagtatttgcacgagttcaacaacctggcccgttacgctctggagaatgtgcgggaagatgagaagaagcaagagaagttcctggcaggaatggaccctgagctgtccgtccgtctagtctccggggactatccggattttcaacgtctggtggacaagagcatccgcttggagccaaacacaaggaactggagtcgcacaagcgtcgcttggcgaatttccgcaatcagcagggtgctaaccaaagggtccgctacaccaatccctatccagggggatcctcctcgcagcagcaacaacagcagcagcaacctcgctccgcgccccgacctcaattcgtggtgcgcgtcccacagccgcagcaacagcagagtcagcaagggactcgtgcgccccgtcctcctacgccaactgtacaacctggtcaaggccgcagggacgcttcaggtccgcagcgtctgtgcttcaattgcttcgagcccgggcactttgcggataaatgcccgaagccgaggcgacagcaaggccaagcgcctccccgctccaacaacggtggtaaggacgtcattcggtgtcgtgtgaaccacgtgacggccgaggacatgctgacaactccagacgtcatcgttggtacgttcctcattcattccatccctgctaccattttgttcgactctggagcttcccactcgtttatatctgtgccattcgtggggagaaatcagttgggggtagaaaggcttaggaaccctctgcttatcaccacccctggaggggttatgacagcaaagtattatagctctgccgttcctatagaaatccaggggattccttttccctcggatctaattcttctagacaccaagaacttggatgtgatccccgggatgaattggttggctcaattccaaggagtagtggattg

SEQ ID NO: 14171 - DNA, 5361 bp, Oryza sativa
  Clone ID: TFbOSC400024j.C1.o11.fg
atgtcatggcacagggccggtgtcctgctgctaggggctcagtcctgcctgcctgtcccgggagttccggccgtaggtgggattgggtcggtactcttgtctatggctaggatgggttggaaactatgtcacgtctttcgtctgtataccgtggtgatggccggcagcgtcacccgtcgtggtttggacatgactggtttcgtcttggagctgcggggcatgtgcgttgtcctggggtatccacatggagtggactaccagggcaggccgcttccggagcaggagggtgacgatgcagagccccacgctgcttgggaggtcactgcagtaatcctcgctggctctcccgagcggacttcgctgacagtcaccgcgggtggagattctttccccgccgcttgccagagcgccgctctcctcgccatcggcactcttcaccagcgctacccggacgagttgcagcactcgccctaccgctaccaccctcgccgcggaggagcccgcgactacgccaccttccgggatgctagctcggaggatgacgctaccatcatgcacctggcgcgcatggtggaggcgtacgacgcggctcgtatcgacttccatcagatggtgcgccgtgggatggtcgagaacaacatgaagatcctggagctgcgtcaagagaacctgcagctcaagaaggacctagacgcggtggaggcgcagctgcatcagctcaagatcgcccagggagaggtctgccgccccaagcgtcgccgtgtctgccgcagccagaagatcaccgcccgcaagagcacctccaggcccgagcttgttcgtcagtccctggcgtggacttgcttcgtcgagacccctcgtgccgagcccgcgcccgtggttccccaggagggagaagcctccggcgttggtagcacagaggatgcgctgttgctcaccttccgtcctggcccgtcgcagcggagaagtgctgccaccggtgatagcaaccaacctgaaggcagcaaccaccaccaccagggcagcccacctccacctcctcctccgcctccaccaccgccagataccaacgccattctcacccaaatcctagcccagcaggccgacatgatggctgctttcctccaccacatccaaaatccgccacaacataatgctccaccaccaccttcccaacactctaaactcgccgagttcctccgcatccgcccacttaccttctctagctccaacaaccccgtggatgcgttggattggctgcatgccgtggggaaaaagctagacactgtgcagtgcagcgatgaggagaaagtcatcttcgccgcccaccagctgcaggggcccgcatctctatggtgggaccatttccaggctacgcagccagaggggcaacctattacttgggcccgtttcaccgccgctttccggagaacccatgtgcccgccggagtcgtggcccttaagaaaagagaattccgagagttgaagcaaggcaaccgctccgtgacggagtatttgcatgagttcaacaacctggcccgttacgccccggaggatgtgcgggaagatgaggagaagcaagagaagttcttggcaggaatggaccctgagctgtccgtccgtctagtctccgggaactatccggatttccaacgtctggtggacaagagcatccgcttggaagccaagcacaaggaactggagtcgcacaagcgccgcttggcgaatttccgcaatcaacagggtgctaaccaaagggtccgctacaccaatccctatccagggggatcctcctcgcagcagcaacaacagcagcagcaacctcgctccgcgcctcgacctcaattcgtggtgcgcgtcccacagccgcagcagcagcagaatcaacaagggactcgtgcgccccgtcctcctacgccaactgtgcagcctggtcaaggccgcagggacgctcaaggtccgcagcgtctgtgcttcaactgcttcgagcccgggcactttgcggataaatgcccaaagccgaggcgtcagcaaggccaagcgcctccccgctccaacaacggtgggaaggatgtcattcggggtcgggtgaaccacgtgacggccgaggacgtgctaacaactccagacgtcatcgttggtacgttcctcattcattccatccctgctactattctgttcgactctggagcttcccactcgtttatatctgtgccattcgtggggagaaatcagttgggggtagaaaggcttaggaaccctctgctcatcaccacccctggaggggttatgacagcaaagtattatagccctgccgtccccatagaaattcaggggattccttttccctcggatctgattctgctagacaccaagaacatggatgtgatccttgggatgaattgtagttccgaacttcatcagataggactatcagaaatccccatcgtcagagagttcggagacgtgtttccggacgaactacccggtatgccgcccaagcgagagattgagttccggatagatcttgctccaggaaccactcctctgtacaagcgaccctatcgtatggcagcaaatgaactggccgaagttaagaaacagttggaagagttgaaagaaaaggggtatatacgtccgagtacttccccctggggtgctcctgtgatttttgtggagaagaaagacaagacgaagaggatgtgcgttgactacagagctctcaatgaagtcaccatcaaaaacaagtaccctcttccccggatcgatgatctgttcgatcagcttaaaggtgccactgtattctccaagatcgatcttcgttccggatatcaccaattacgtattcgtgatgaagatattccgaagaccgcattcaccacgcgatatggactgtatgaattcacggtgatgtcgttcggtttaaccaatgcacctgcctttttcatgaacttaatgaacaaagtgttcatggaatacttggataagtttgttgtggttttcattgatgacattctggtatactcacaatcagaggaagaccatcagcaccatctctgtctggtgttgggaaagttgcgggaacatcaattgtatgccaaacttagcaagtgtgagttctggttgtccgaagtcaaattcttagggcacgtgatatctgctaaaggagttgctgtggaccccgaaacagtgaccgccgtcactgattggaagcaacccaagacagtcactcaagtccgcagtttcttaggtttggcaggatactaccggaggttcatcgagaacttctccaaaatcgctcaacccatgacacagttgttgaagaaagaagagaaatttgtgtggagcccgcaatgcgagaaggcgttcaaaactctcaaagaaaagctggttgcctcgccagtgttaatcttgccggatactcgcaaggatttcatggtgtattgtgacgcttcgcgccaaggattggggtgcgtgctcatgcaggatggtcatgtggtggcctatgcctcacgccagctacggcctcatgaaggcaactaccctacccatgatttggagttagctgcggtggttcatgctctaaaaatctggcggcactatctcattgggaatcgctgtgaaatatatactgatcataagagtttgaaatacatcttcactcagtcggacctgaatcttcggcaaaggagatggttagaactcatcaaggattatgatgtgggaattcactatcatcctggtaaggccaacgtggtcgccgacgccctaagtcgaaaaagccattgcaacacccttaacgtccgtggcattccacccaaacttagtcaacagatggaagccctgaacctaagcatagttggtcgcggattcttggctgcgttggaagccaagcctaccttgctcgatcaaatccgcgaggctcagaagaacgatccggacatgcatggactcctcaagaatatgaaacagggtaaagccgctggtttcacagaggatgaacacggaaccctatggaacggaaatcgagtatgcgttccagataacagagaacttaaacagctgatacttcaggaagcccacgaaagtccttattccatccaccctggcagtacaaagatgtacttagacttgaaggagaaatactggtgggttagtatgaagcgggaaattgcagagttcgtggccctttgtgatgtgtgccagcgtgtcaaggcagagcaccaacgaccggccggacttctccaacctctccaagtacctgaatggaaatgggatgaaattgggatggatttcatcaccggacttccaaagacccaaggtggatatgattctatatgggtagtggtggatcgattaaccaaggtagctcgattcattcctgtgaagaccacctatggagggaacaaactagccgagctctacttcgctaggatcgtgagtctccatggcgttcccaagaaaatcgtatctgataggggaagccaattcacctctcacttttggaagaagctccaagaagagctgggtacccgattaaacttcagcaccgcataccacccgcagacagatgggcagaccgagcgtctaaatcagatcctagaagatatgcttcgcgcatgtgtcctggatttcgggaagacctgggataagagtctcccctatgccgagttctcctacaataacagctatcaagccagcatacaaatggcaccttatgaagcgttgtatgggcgcaaatgccggacaccgctcctgtgggatcaagttggggaaagccaagtgttcgggactgatatcctgagagaagctgaagctaaagtcagaaccattcgggataatctaaaggtggcacagtcccggcagaaaagttatgcagataaccgtcgccgtaacctagaattcgcagtggacgattttgtgtatcttcgggtcacgccattgcggggtgtacacaggtttcagacaaaagggaagcttgcacctcggtatgtgggtcctttccgtatcgttgcccgacacggagaagtcgcttaccaattggagctgcccgcctccttgggcaacgtgcatgatgtgttccatgtgtcgcaactcaagaaatgccttcgagtgccatccgagcaggccgactcagagcaaattgaagttcgcgaagacttgacctacgtggagaggccagtgaaaatcctggacaccatggagcgcaggaccaggaaccgggtaatccgtttttgcaaggtccagtggagcaaccacgccgaagaagaagctacctgggagcatgaagacgagctgaaggcagcccatcctgatctcttcgccagttcttccgaatctcggggtcgagattccgtttaa

SEQ ID NO: 14172 - DNA, 3822 bp, Oryza sativa
  Clone ID: TFbOSC400036j.C1.o74.fg
atggacatctctaggacaaatgaaggctacacgagctgtggcccggtagtcgagatgtcatggcacagtgctggtgtcctgctgctaggggctcagtcctgcctacctatcctggaggttccggccgtaggtggggttgggtcggtactcttgtctatggctaggatgggttggaaattatgtcatgtcttccgtccatatgctgtggtgatggccggcagcgtcaaccgtcatggcctggacctgtgtggctttgtgttggagctgcggggcatgtgcattgtcctgggatacccgcatggagtggactaccagggcaagaagctcccagagcaggatggtgacgatgcagagccccacgctgcttgggaggtcactgcagtgatcctcactggctctcccgagaggacttcgttggcagtcaccgcgggtggagattccttctccgccgcatgccagaacgccgcactccttgccatcggcactcttcaccagcgctacccggacgagttgcagcactcgccctaccgctaccaccctcgtcgcggaggagcccgcgactacgccaccttttgggatgctagctcggaggatgacgctaccatcatgcacctggcgtgcatggtggaggcgtacgacgcggcccgtatcgacttccatcatatggtgcgccgtgggttggtcgagaacaacatgaagatcctggagctgcgtcaagagaatctgcagctgaagaaggaccttgacgcggtggaggcgcagctgtttcagctcaagatcgcccagggagaagtctgccatcccaagcgccgccgcgtctgccgcagcctgaagatcaccgcccgcaagagcaccttcaggcctgagcttgttcgtcagtccttggcgtggacctgcttcgtggagaccccttgcgccgagcccgcgcccgtggttcctcaggaggaggaagcctctggcgttggcagcacggaggatatggtgacaaccaggagaagtgctgttgccggcgatggcaaccaacccgaaggcagcaaccccaacacccaaggcggcccacctccacctcctcccccgccaccaccaccaccacctgacaccaaccccatcctcacccaaattctcgcccagcaggccaacatgatggctgctttcctccaccacatccagaatccgccgcaacataatgctccacctccaccacccccgcagcactctaagctcgccgagttcctccgcatccgcccacctaccttctctagctccaataaccccgtggatgccttggattggttgcatgccgtggggaaaaagttggacaccgtgcagtgcaacaatgaggagaaaatcatctttgccacccaccagctgcaagggcccgcatctctatggtgggaccacttccaggctacgcagcctgagggacatcctattacctgggcccgcttcaccgccgcttttcggaggacccatgtgcccgccggagtcatggcccttaagaagagggaatttcgggagttgaagcaaggcaaccgctctgtgatgaagtatttgcacgagtttaacaacttggcccggtacgccccagaggatgttcgggaagatgaggaaaagcaggagaagttcctggtaggaatggaccctgagctgtctgtgcgtctggtctccggggattatcctgatttccagcgtctgcagcagcagcagccgcaacctcgcttcgcgccccgacctcaattcgtggtgcgcgtcccacagccgcagcaacagcagagccagcaagggacccgtgcgcttcgccctcctgcaccagctgtgcagcttggtcaaggccgcatggacgctcaaggtcagcaacgtctgtgcttcaactgcttcgagcccgggcactttgcggacaaatgcccgaagccgcgacgccagcaaggccaagcgcctccctgccccaacaacggtggtaatgacgtcgctcggggtcgtgtgaaccacgtgaccgccgaggatgtgctgacgactccggacgtcatcgttggtacgttcctcattcattccattcctgctactattttgttcgactctggagcttcctactcgtttatatctgtgcctttcgtgggaagaaatcagctgggggtagaacggcctaggaaccctctgctcatcaccacccctggcggggatatgacagcaaagtattatagcccgacagttcctatagaaatccagggaatcccttttccctttgatttgattcttctggacaccaataacttggatgtgatcctcgggatgaattggttggctcaattccaaggagtagtggattgcgcaaggcgcactgtcattctgtaccaggggccaaaacaaccggttgttttctttgcacccccaacttctgtcggcagttcagaacttcatcagataggactgtcagaaatccccatcgtcagtgaattcggtgacgtgtttccggaagaactacccggtatgccgcccaagcgggagattgagttccggatagatcttgctccagggacaactcctctatacaagcggccctaccgtatggcagcaaataaactggccgaagtcaagaagcagttggaagagttgaagaaaaagggagctctcaatgaagtcactatcaaaaacaagtaccctcttccccggatcaatgatcttttcgaccagcttaaaggtgccattgtcttttctaaaattgatcttcgctccggatatcaccaattgcgtattcgtgaagaagatatcccaaagaccgcgttcaccacacgttatggactgtttgaattcacggtgatgtcattcggtctaaccaatgctcctgccttcttcatgaacttaatgaacaaagtgttcatggaatacttggataagtttgttgtggtcttcattgacgacattctgctcagcaagtgtgagttctggttgtccgaagtcaagttcttagggcatgtgatatctgctaaagaagttgctgtagatcccgaaacggtgaccgccgtcactgattggaagcaacccaagacgttgttgaagaaagaagaaaaatttgtgtggagcccgcaatgcgagaaagcattccaaactctcaaagagaagctggtttcctcgccagtattaattctaccggatactcgcaaggacttcctggtgtactgtgacgcttcgcgccaaggactgggttgcgtactaatgcaggaaggtcacgtggtagcctatgcctcccgacagcttcggcctcatgaaggcaactaccctacccatgatttggagttggccgctgtggttcatgctctaaagatctggcggcactatctcattgggaatcgctgtgaaatatataccgatcataagagtttgaaatacatcttcactcagtcggatttgaatcttcggcagaggaggtggttagaactcatcaaggattatgatgtgggaattcactatcatcctggtaaggccaacgtggtcgccgacgctctaagtcgaaaaagccattgcaacactcttggcgtccgtggcattccaccggaacttaatcaacagttggaggccctgaacctaagcatagttggtcgtggattcttggctacgctggaagccaagcctaccctactcgatcaaatccgcgaggctcagaagaatgatccagacatgcatgggatcctcaagaatatgaaacagggtaaagccgctggtttcacagaggatgaacacggaaccctatggaacggaaatcgtgtatgcgttccagacgaatccccttcctcccgccgctcccgccgcctcgcccgctcctag

SEQ ID NO: 14173 - DNA, 3595 bp, Oryza sativa
  Clone ID: TFbOSC400104j.C1.o3.gm
atggttacgccgatggtgacgaccaggagaaatgttaacaccggtgaaggcaaccaacccgaaggcagcaaccccaaccaccaaggcaatccacctccaccaccaccaccagacaccaacgccattctcacccagatcctcgcccaacaagccaacatgatgactgctttcctccaccacctccaaaatccaccacaacagaatgctccaccaccccctccccaacactccaaactcgccgaattcctccgcatccgcccacccaccttttctagctccaacaaccctgtggatgcgttggattggttgcatgccgtggggaagaagctggacactgtgcagtgcagtgatgaagagaaagtcatcttcgccgcccatcagctgcaggggcccgcatccctatggtgggaccacttccaggctacgcagccagcgggacagccgatcacttgggcccacttcaccgccgctttccggagaacccatgtgcccgccggagtcgtggctcttaagaaaagggaattccgagagttgaagcaaggcaaccgctccgtgatggagtatttgcacgagttcaacaatctggcccggtacgctccggaggatgtgcgggaagatgaggagaagcaagagaagttcttggcaggaatggaccctgagctgtccgttcgtctagtctctggggactatcctgattttcaacgactggtggacaagagcatccgcttggaagccaagcacaaggagctggaatcgcacaagcgccgcttggcgaatttccgcaatcagcagggtgctaaccagagggtccgctacaccaatccctacccagggggatcctcctcgcagcagcaacaacagcagcagcaacctcgcccagcgccccgacctcaattcgtggtgcgcgtcccacagccgcagcaacagcagaatcagcaagggactcgtgcgccccgtcctcctacgccagctgggcagcccgttcaaggccgcagggacgcttcaggtccgcagcggctgtgcttcaactgcttcgagcccggacactttgcggataaatgcccaaagccaaggcgtcagcaaggccaagcgcctccccgctccaacaacggcgggaaggatgtcattcggggtcgtgtgaatcacgtgacggccgaggacgtgctgacaactccagacgtcatcgttgaactgcatcagataggtctgtcagaaatccccatcgtcagagagttcggagacgtgtttcgggaagaactacctggtatgccgcccaagcgagagattgagttccggatagatcttgctccaggaaccactcctctgtacaagcgaccctaccgtatggcagcaaatgaactggccgaagttaagaaacagttggaagaattgaaagaaaaggggtatatacgtccgagtacttccccttggggtgctcctgtgatttttgtagagaagaaagacaagacgaagaggatgtgcgtcgactacagagctctcaatgaagtcaccatcaaaaacaagtaccctcttccccggatcgatgatctgttcgatcagcttaaaggtgccactgtattctccaagattgatcttcgttccggatatcaccaattacgtattcgtgaagaagatattccgaagaccgcattcaccacgcgatacgggctgtatgaattcacggtgatgtcgttcggcttgaccaatgctcctgccttcttcatgaacttaatgaacaaagtgttcatggaatacttggataagttcgttgtggttttcatcgatgacattctgatatactcacaatcagaggaagaccatcagcaccatctccgtctggtgttgggaaagttgcggaaacatcaattgtatgccaagcttagcaagtgtgagttctggttgtccgaagtcaaattcttggggcacgtgatatctgctaaaggagttgctgtggaccccgaaacagtgaccgccgtcaccgattggaagcaacccaagacagtcactcagattcgcagtttcttgggtttggcaggatactaccggaggttcatcgagaacttctccaaaatcgctcgacccatgacacagttgttgaagaaagaagagaagtttgtgtggagcccgcaatgcgagaaggcgttccaaaccctcaaggaaaagctggtttcctcgccagtgttaatcttgccggatactcgcaaggacttcatggtgtattgtgatgcttcgcgccaaggattggggtgcgtgctcatgcaggacggtcatgtggtagcctatgcttcacgtcagctacgacctcatgaaggcaactaccctacgcacgacttgaagttagcagcggtggttcatgctctaaaaatctggcggcactatctcattgggaaccgctgtgaaatatatactgatcataagagtttgaaatacatcttcactcagtcagatctgaaccttcggcaaaggagatggttagaactcatcaaggattatgatgtgggaatacactatcatcctggtaaggccaacgtggttgccgacgctctaagtcgaaagagccactgcaacactctcaacgtccgaggcattccacccgagcttaatcaacagatggaagccctgaacctaagcatagttggtcgcggattcttggctgcgttggaagccaagcccaccttgctcgatcaaatccgcgaggctcagaagaatgatccggacatgcatggactcctcaagaatatgaaacagggtaaagccgctggtttcacagaggatgaacacggaaccttatggaacggaaagcgggtatgcgttccagatagcagagaacttaaacagctgatacttcaggaagctcacgaaagtccttattccattcacccgggcagtaccaagatgtacttagacttgaaggagaattactggtgggttagcatgaagcgggaaattgcagagtttgtggctctatgtgatgtgtgccagcgtgtcaaggcagagcaccagcgaccggccggacttctccaacctctccaagtgccggaatggaaatgggatgaaattgggatggatttcatcaccggccttccaaaaacccaaggtggatatgattctatatgggtaattgtggatcgactaacaaaggtagctcgattcattcctgtgaagaccacctatggagggaataaactagcggagctctacttcgctaggatcacagatggacagaccgagcgtctaaatcagatcttagaagatatgcttcgcgcatgtgtcctggacttcgggaagacttgggataagagtctcccctatgccgagttctcctacaataacagctatcaagccagcatacaaatggcaccatatgaagcgttgtacgggcgcaaatgccggacaccgctattgtgggaccaagttggagaaagccaagtgttcgggactgatatcctgagagaagctgaagctaaagtcagaatcattcgggataatctaaaggtggcacagtcccggcagaaaagttatgcagataaccgacgccgtgatctggaattcgcagtggatgattttgtgtaccttcgggtcacgccattgcgag

SEQ ID NO: 14174 - DNA, 5415 bp, Oryza sativa
  Clone ID: TFbOSC400177j.C1.o48.fg
atggatgaagtcgggggtcgatggacattctccagggcaaatgaaggctacacgagctgcggcccgatggccggcagcgtcacccgtcgtggtttggacatgactggcttcgtcttggagctgcgaggcatgtgcgtggtcttggggtatccacacggagtggattaccaggtcaggccgctcccggagcaggagggtgaggatgcagagcctcacgctgcttgggaggtcactgcagtgatcctctccggctctcccgagcggacttcgctgacagtcaccgcgggtggcgactccttccccgccgcttgccagaacgccgctctcctcgccatcggcactcttcaccagcgctacccggacgagttgcagcactcgccctaccgctaccaccctcgtcgcggaggagcccgcgactacgccaccttccgagacgccagctcggaggatgacgctaccgtcgtgcatctggcacgcatggtggaggcgtacgacgcggctcgtatcgacttccatcagatggtgcgccgtggcatggtcgagaacaacatgaagatcctggagctgcgtcaagagaatctgcagctcaagaaggacctcgacgcgttggaggcgcagctgcatcagctcaagatcgcccagggagagatcagccgccccaagcgtcgccgcgtctgccgcagccagaagatcaccgcccgcaagagcacctccaggcccgagcttgttcgtcagtccctggcgtggacttgcttcgtcgagaccccttgtgccgagcctgcgcccgtggttccccaggagggggaagcctccggcgttggtagctcggagggtgcgctgttgctcaccttccgtcctggcccgtcgcagcgctcttcttctctgtttgctggttccgtgtggggttttcagatggtgacgaccaggagaaatgttaacaccggtggaggcaaccaacccgaaggcagcaaccccaacccccaaggcaacccacctccaccaccaccaccagacaccaacgctattctcacccagatcctcgcccaacaagccaacatgatgaatgctttcctccaccacctccaaaattcaccacaacagaatgctccaccaccccctccccaacactccaaactcgccgaattcctccgcatccgcccacctaccttctccagctccaacaaccctgtggatgctttggattggttgcatgccgtggggaagaagctagacacggtgcagtgcagcgacgaagagaaagtcatcttcgccgcccatcagctgcagggacccgcatctctctggtgggaccatttccaggccacgcagccagaagggcaaccgattacttggactcgcttcaccgccgctttccggagaacccatgtgcccgctggagtcgtggctcttaagaagagggaatttcgggagttgaagcaaggcaatcgctccgtgatggagtatttgcatgagttcaacaatctagcccgttatgccccggaggatgtgcgggaagatgaggagaagcaagagaagttcttggcaggaatggaccctgagctgtccgttcgtctcgtctctggggactatcctgattttcaacgactggtggacaagagcatccgcttggaagccaagcacaaggagctggaatcgcacaagcgccgcttggcgaatttccgcaatcagcagggtgctaaccagagggtccgctacaccaatccctacccagggggatcctcctctcagcagcagcagcagcagcagcaacctcgctccgcgcctcgacctcaattcgtggtgcgcgtcccacagcagcaacagcagcagaatcagcaagggactcgtgcgccacgtcctcctacgccaactgtgcagcctgttcaaggtcgcagggacgcttcaggtccgcagcgtctgtgcttcaactgcttcgagcccgggcactttgcggataaatgcccaaagccaaggcgtcagcaaggccaagcgcctccccgctccaacaacggtggcaaggatgtcattcggggtcgtgtgaatcacgtgacggccgaggacgtgctgacaactccagacgtcatcgttggtacgttcctcgttcattccatccctgctacaattttgttcgactctggagcttcccactcgtttatatctgtgccattcgtggggagaaatcagttgggggtagaaaggcttagaaaccctctgcttatcaccacccctggaggggttatgacagcaaagtattatagccctgccgttcctatagaaattcaggggattccttttccctcggatctgattctgctagacaccaagaacttggatgtgattcttgggatgaattggttggcccaattccaaggggtagtggattgcgcgaggcgcactgtcactctgtaccgagggccagaacaaccggttgttttctttgcacctccaacctctgtcagaagttcagaactgcatcagataggtctgtcagaaatccccatcgtcagagagttcggagacgtgtttccggaagaactacctggtatgccgcccaagcgagagattgagttccggatagatcttgctccaggaaccactcctctgtacaagcgaccctaccgtatggcagcaaatgaactggccgaagtaaagaaacagttggaagagttgaaagaaaaggggtacatacgtccgagtacttccccatggggtgctcctgtgatttttgtagagaagaaagacaagacgaagaggatgtgcgttgactacagagctctcaatgaagtcaccatcaaaaacaagtaccctcttccccggatcgatgatctgttcgatcagcttaaaggtgccaccgtattctccaagattgatcttcgttccggatatcaccaattacgtattcgtgaagaagatattccgaagaccgcattcaccacgcgatatggactgtatgaattcacggtgatgtcgttcggcttgaccaatgctcctgccttcttcatgaacttaatgaacaaagtgttcatggaatacttggacaagtttgttgtggttttcatcgatgacattctgatatactcacaatcagaggaagaccatcagcaccatctccgtttggtattgggaaagttgcgggaacatcaattgtatgccaagcttagcaagtgtgagttctggttgtccgaagtcaaattcttagggcacgtgatatctgctaaaggagttgctgtggatcccgaaacagtgaccgccgtcaccgattggaagcaacctaagacagtcactcaaatccgcagtttcttaggtttggcaggatactaccggagattcatcgagaacttctccaaaatcgctcgacccatgacacagttgctgaagaaagaagagaagtttgtgtggagcccgcaatgcgagaaggcgtttcaaactctcaaggaaaagctggtttcctcgccagtgttaatcttgccggatactcgcaaggacttcatggtgtattgtgacgcttcgcgccaaggattggggtgcgtgctcatgcaggacggtcatgtggtagcctatgcttcacgtcagctacgacctcatgaaggcaactaccctacgcatgacttggagttagcagcggtggttcatgctctaaaaatctggcggcactacctcattgggaatcgctgtgaaatctataccgaccataagagcttgaaatacatcttcacccagtcggatctgaatcttcggcaaaggagatggttagaactcatcaaggattatgatgtgggaatacactatcatcctggtaaggccaacgtggttgccgacgctctaagtcggaagagccactgcaacactctcaacgtccgaggcattccacccgagcttaatcaacagatggaagccctgaacctaagcatagttggtcgcggatgcttggctgcgttggaagccaagcctaccttgctcgatcaaatccgcgaggctcagaagaatgatccggacatgcatggactcctcaagaatatgaaacagggtaaagccgcaggtttcacagaggatgaacacggaaccttatggaacggaaagcgggtatgcgttccagatagcagagaacttaaacagctgatactccaggaagctcacgaaagtccttattccattcacccgggcagtaccaagatgtacttagacttgaaggagaaatactggtgggtcagcatgaagcgggaaattgcagagtttgtggctctatgtgatgtgtgccagcgtgtcaaggcagaacaccaacgaccggccggacttctccagcctctccaagtgccggaatggaaatgggatgaaattgggatggatttcatcaccggccttccaaaaacccaaggtggatatgattctatatgggtaatagtggatcgattaaccaaggtagctcgatttattcctgtgaagaccacctatggagggaacaaactagcggagctctacttcgctaggatcgtgagtctccatggcgttcccaagaaaatcgtatctgataggggaagccaattcacctctcacttttggaagaagctccaagaagagctgggtactcgattgaatttcagcaccgcctatcacccgcagacagatggacagaccgagcgtctaaatcagattctagaagatatgcttcgcgcatgtgtcctagacttcgggaagacttgggataagagtctcccctatgccgagttctcctacaataacagctatcaagccagcatacaaatggcaccctatgaagcgttgtatgggcgcaaatgccggacaccgctattgtgggaccaagttggagaaagccaagtgttcgggactgatatcctgagagaagctgaagctaaagtcagaatcattcgggataatctaaaggtggcacagtctcggcagaaaagttatgcagataaccgtcgccgtgatctggaattcgcagtggatgactttgtgtatcttcgggtcacgccattgcgaggtgtgcacaggtttcagacaaaagggaagctcgcacctcggtatgtgggtcccttccgtatcatcgctcgacgcggagaagtcgcctaccagctggagttgcccgcctccttgggcaacgtgcatgatgtgttccatgtgtcgcaactcaagaaatgtcttcgagtgccatccgagcaggccgactcagagcaaattgaagttcgcgaagacttgacctatgtggagaagccagtgaaaatcctggacaccatggagcgcaggaccaggaaccgagtaatccgtttttgcaaggtccagtggagcaaccacgccaaagaagaagctacttgggagcgcgaagacgagctgaaggcagcccatcccggtctcttcgctagttcttccgaatctcggggtcgagattccgtttaa

SEQ ID NO: 14175 - DNA, 6033 bp, Oryza sativa
  Clone ID: TFbOSC400263j.C1.o2.np
atggcggccggatcttccgcggccgattccccctcatccggccgctctctccccctcccaaccctatataaacactccccgtgcctccctccaccgtttccgccactcgccgctctctctctccgccggaatcgagctcgcgccgtcgctctctctctccgccgtcaccgccgagctccggtccgccgccgtagtcgccccggaccttctcccgcttcggcgtcgccttctccgggttcgccgcaacctcgccgacctcgtccacccctccgtttcgcccgccaaccgccggaacgccgccgtccccgtcgacccgagccgcgccgccgccttcctccgctccggtcgccgttcccgtcgtcgctgtcgacccggggtgagccgtggaccgccgtttcgcttcccccttccctcatctctctcgggcgccgctccgccgcgctggtggtcgccggcggcgaccatcggggcgcgggtgcgccacctcccgtcggctgtgccggcgtggccgccttcgggcgcgccccgcggctgccatgtggggcccggtcgtcagccgcccgcgccctcgggtgcggctgacgcgtgggacccacggcgccggccggtgtgagccgggtgcacccggtccaccgtggacccacctcggccatataaggaccggtcttcgggcctccgttgcatagcactaccgtacttccacatgtctagtggggcaaatgaaggctacacgagctgcggcccagtagtcgagatgtcatggcacagggccggtgtcctgctgctaggggctcagtcctgcctgcctgtcccgggggttccggccgtaggtgggattgggtcgatgtacacctctgatcagagtataatttattcgaatagccgcgccctcggttatgggcaagccgagcaatgtacccaaatggccggcagcgtcagccgtcgtggtctggacatgactggtttcgtcttggagctgcggggcatgtgcgttgtcctggggtatccgcatggagtggactaccagggcaggccgcttccggagcaggagggtgacgatgcagagccccacgctgcttgggaggttactgcagtgatcctcactggctctcccgagcggacttcgctggcagtcaccgcgggtggagattctttctccgccgcttgccagagcgccgctctcctcgccatctgcactcttcaccagcgctacccggacgagttgcagcactcgccctaccgctaccaccctcgccgcggaggagcccgcgactacgccaccttccgggatgctagctcggaggatgacgctaccatcatgcacctggcgcgcatggtggaggcgtacgacgcggctcgtatcgacttccatcagatggtgcgccgtgggatggtcgagaacaatctgaagatcctggagctgcgtcaagagaacctgcagctcaagaaagacctagacgcagtggaggcgcagctgcatcagctcaagatcgcccagggagaggtctgccgccccaagcgtcgccgcgtctgccgcagccagaagatcaccgcccgcaagagcacctccaggcccgagcttgttcgtcagtccctggcatggacttgcttcgtcgagaaccctcgtgccgagcccgcgcccgtggttccccaggagggggaagcctccggcgttggcagcacggaagatgcgctgttgctcaccttccatggtgatgaccaggagaagtgctagtaccggtgatggcaaccaacctgaaggcagcaaccacaaccaccagggcagcccacctccacctcctcctccgcctccaccaccaccaccagataccaacgccattctcacccaaatcctcgcccagcaggccaacatgatgattgctttcctccaccacctccaaaatccgccacaacataatgctccaccaccacccccacaacactctaaactcgccgagttcctccgcatccgtccacccaccttctttagctccaacaaccccgtggatgcgttggattggttgcatgccgtggggaaaaagctagacactgtgcagtgcagcgatgaggagaaagtcatcttcgccgcccaccagctgcaggggcccgcatctctatggtgggaccatttccaggctacgcagccagaggggcagcctattacttgggctcgcttcactgccgctttccggagaacccatgtgcccgccggagtcgtggcccttaagaaaagggaattccgagagttgaagcaaggcaaccgctccgtgatggagtatttgcatgagttcaacaacctggcccgttacgccccggaggatgtgcggagatgaggagaagcaagagaagttcttggcaggaatggaccctgagctgtccgtccgtctagtttccggggactatccggatttccaacgtctggtggacaagagcatccgcttggaagccaagcacaaggaactggagtcgcacaagcgccgcttggcgaatttccgcaatcaacagggtgctaaccaaagggtccgctacaccaatccctatccagggggatcgtcctcgcagcagcaacctcgctccgcgccccgacctcaattcgtggtgcgcgtcccacagccgcagcaacagcagagtcagcaagggactcgtgcgccccgtcctcctacaccaactgtgcagcctggtcaaggccgcagggacgctcaaggtccgcagcgtctgtgcttcaactgcttcgagcctgggcactttgcggataaatgcccgaagccgaggcgccagcaaggccaagcgcctccccgctccaacaacggtggtaaggatgtcattcggggtcgtgtgaaccacgtgacggccgaggacgtgctgacaactccagacgtcatcgttggtacgttcctcattcattccatccctgctaccattttgttcgactctggagcatcccactcgttcatatctgtgccattcgtggggagaaatcagttgggggtagaaaggcttaggaaccctctgctcatcaccacccctggaggggttatgacagcaaagtattatagtcctgccgtccctatagaaattcaggggattccttttccctcggatctgattcttctagacaccaagaacttggatgtgatccttgggatgaattggttggctcaattccaaggagtagtggattgcgcgagacgcactgttactctgtaccgagggccggaacaaccggttgttttctttgcacccccaacctctgtcagaagttcagaacttcatcagatagtactgtcagaaatccccatcgtcagggagttcggagatgtgtttccggaagaactacccggtatgccgcccaagcgagagattgagttccggatagatcttgctccaggaaccactcctctgtacaagcgaccctaccgtatggcagcaaatgaactggccgaatttaagaaacagttggaagagttaaaagaaaaggggtatatacgtccgagtacttccccctggggtgctcctgtgatttttgtggagaagaaagacaagacgaagaggatgtgcgttgactacagagctctcaatgaagtcaccatcaaaaacaagtaccctcttccccggatcgatgatctgttcgattagcttaaaagtgccacggtattctccaagatcgatcttcgttccggaaatcaccagttgcgcattagggaagaagatattccgaagaccgcattcaccacgcgatacggactgtatgaattcacggtgatgtcattcggtctaaccaatgctcctgccttcttcatgaacttaatgaacaaagtgttcatggaatacttggataagtttgttgtggtgttcattgatgacattctgatatactcacaatcagaggaagaccatcagcaccatctccgtctggtgttgggaaagttgcgggaacatcaattgtatgccaaacttagcaagtgtgagttctggttgtccgaagtcaaattcttagggcacgtgatatctgctaaaggagttgctatggaccccgaaacagtgaccgccgtcactgattggaagcaacccaagacagtcactcaagtccgcagtttcttaggtttggcgggatactaccggaggttcatcgagaacttctccaaaatcgctcgacccatgacacagttgttgaagaaagaagagaaatttgtgtggagcccgcaatgcgagaaggcgtttcaaactctcaaagaaaagctggtttcctcgctagtgttagtcttgccagatactcgcaaggatttcatggtgtattgtgacgcttcgcgccaaggattggggtgcgtgctcatgcaggacggtcatgtggtggcctatgcctcacgccagctacggcctcatgaaggcaactaccctacccatgatttggagttagccgcggtggttcatgctctaaaaatctggcggcactatctcattgggaatcgctgtgaaatatatactgatcataagagtttgaaatacatcttcacccagtcggatctgaatcttcggcaaaggagatggttagaactcatcaaggattatgatgtgggaattcactatcatcctggtaaggccaacgtggtcgccgacgctctaagtcgaaagagccattgcaacactcttaacgtccgtggcattccacccgaacttaaccaacagatggaagccctgaatctgagcatagtgggtcgtggattcttggctacgctggaagccaagcccaccttgctcgatcaaatccgcgaggctcagaagaacgacccggacatgcgtggactcctcaaaaatatgaaacagggtaaagccgcgggtttcacagaggatgaacacggagccctatggaacggaaatcggcgtgtcaaggcagagcaccaacgaccggccggacttctccaacctctccaagtaccagaatggaaatgggatgaaattgggatggacttcatcaccggacttccaaaaacccaaggtggatatgattctatatgggtagttgtggaccggttaaccaaggtagctcgatttattcctgtgaagaccacctatggagggaacaaactagccgagctctacttcgctaggatcgtgagtctccatggcgttcccaagaaaatcgtatctgataggggaagccaattcacctctcacttttggaagaagctccaagaagagctgggtacccgattaaatttcagcaccgcgtatcacccgcagacagatggacagaccgagcgtctaaatcagatcctagaagatatgcttcgcgcatgtgtcctagatttcgggaagacctgggataagagtctcccctatgccgagttctcctacaataacagctaccaagccagcatacaaatggcaccttatgaagcgttgtatgggcgcaaatgccggacaccgctcttgtgggaccaagttggggaaagtcaagtgttcgggactgatatcctgagagaagctgaagcgaaggtcagaaccattcgggataatttaaaggtggcacagccacggcagaaaagttatgcagataaccgtcgccgtaacctggaattcgcggtggacgattttgtgtaccttcgaatcacgccattgcggggtgtacacaggtttcggacaaaagggaagctcgcacctcggttcgtgggtcctttccgtatcattgctcggcgcggagaagtcgcttaccagttggagctgcccgcctccttgggcaacgtgcatgatgtgttccatgtgtcgcaactcaagaaatgtctccgagtgccatccgagcaggccgactcagagcaaattgaagttcgcgaagacttgacctacgtggagaggccagtgaaaatcctggacaccatggagcgcaggaccaggaaccgggtaatccgtttttgcaaggtccagtggagcaaccacgccgaagaagaagctacctgggagcgtgaagacgagctgaaggcagcccatcccgatctcttcgccagttcttccgaatctcggggtcgagattccgtt

SEQ ID NO: 14176 - DNA, 5127 bp, Oryza sativa
  Clone ID: TFbOSC400440j.C1.o3.fg
atggatgaagtcaggggtcgatggacattctccagggcaaatgaaggctacacgagctgcggcccgatggccggcagcgttacccgtcgtggtttggacatgactggcttcgtcttggagctgcggggcatgtgcgtggtcttggggtatccgcatggagtggattaccaggccaggccgctcccggagcaggagggtgaggatgcagagcctcacgctggttgggaggtcactgcagtgatcctctccggctctcccgagcggacttcgctggcagtcaccgcgggtggggattccttccccgccgcttgccagaacgccgctctcctcgccatcggcacccttcaccagcgctacccggacgagttgcagcactcgccctaccgctatcaccctcgtcgcggaggagcccgcgactacgccaccttccgagacgccagctcggaggatgacgccaccgtcgtgcatctggcacgcatggtggaggcgtacgacgcggctcgtatcgacttccatcagatggtgcgccgtggcatggtggagaacaacctgaagatcctggagctgcgtcaggagaacctgcagctcaagaaggacctcgacgcagtggaggcgcagctgcatcagctcaagatcgcccagggagaggacagccgcctcaagcgtcgccgcgtctgccgcagccagaagatcaccgcccgcaagagcacctccaggcccgagcttgttcgtcagtccctggcgtggacttgcttcgtcgagacccctcgtgccgagcctgcgcccgtggttccccaggagggggaagcctccggcgttggtagctcggagggtgcgctgttgctcaccttccgccctggcccgtcgcagcgctctccttctctgtttgctggttctgtgtggggttttcagatgaatgctccaccaccacctccccaacactctaaactcgccgagttcctccgcatccgcccacctaccttctccagctccaacaatcccgtagatgcgttggattggttgcatgccgtggggaagaagctagacacggtgcagtgcagtgatgaggagaaagtcgtcttcgccgcccatcagctgcagggacccgcatctctctggtgggaccacttccaggctgcgcagccagaggggcagccgattacttgggcccgcttcaccgccgctttccggagaacccatgtgcccgctggagtcgtggctcttaagaaaagggaattccgggagttgaagcaaggcaaccgctccgtgatggagtatttgcatgagttcaacaatctagcccgttatgccccggaggatgtgcgggaagatgaggagaagcaagagaagttcttggcaggaatggaccctgagctgtccgttcgtctagtctctggggactacccggacttccaacgtctggtggacaagagcatccgcttggaggccaagcacaaggagctggaatcgcacaagcgccgcttggcgaacttccgcaatcagcagggtgctaaccagagggtccgctacaccaatccctacccagggggatcctcctcgcagcagcagcagcagcagcagcaacctcgctccgcgcctcgacctcaattcgtggtgcgcgtcccaccgccgcagcagcagcagaatcagcaagggactcgtgcgccccgtcctcctacgccaactgtgcagcccgttcaaggccgcagggacgctcaaggtcagcagcgtctgtgcttcaactgcttcgagcccggacactttgcggataaatgtccaaagccaaggcgtcagcaaggccaagcgcctccccgctccaacaacggcgggaaggatgtcattcggggtcacgtgaatcacgtgacggccgaggacgtgctgacaactccagacgtcatcgtcggtacgttcctcgtccattccatccctgctacaattttgttcgactctggagcttcccactcgtttatatctgtgccattcgtggggaaaaatcagttgggggtagaaaggcttagaaaccctctgctcatcaccacccctggaggggttatgacagcaaagtattatagccctgccgttcctatagaaattcaggggattccttttccctcggatctgattctgctagacaccaagaatttggatgttatccttgggatgaattggttggctcaattccaaggagtagtggattgcgcgaggcgcactgtcactctgtaccgagggccagaacaaccggttgttttctttgcacccccaacctctgtcagaagttcagaactgcatcagataggtctgtcagaaatccccatagtcagagagttcggagacgtgtttccggaagaactacctggtatgccgcccaagcgagagattgagttccgaatagatcttgctccaggaaccactcctctgcacaagcgaccctaccgtatggcagcaaatgaactggccgaagttaagaaacagttggaagagttgaaagaaaaggggtatatacgtccgagtacttccccttggggtgctcctgtgatttttgtagagaagaaagacaagacgaagaggatgtgcgtcgactacagagctctcaatgaagtcaccatcaaaaacaagtaccctcttccccggatcgatgatctgttcgaccagcttaaaggtgccactgtattctccaagattgatcttcgttccggatatcaccaattacgtattcgggaagaagatattccgaagaccgcattcaccacgcgatacgggctgtatgaattcacggtgatgtcgttcggcttgaccaatgctcctgccttcttcatgaacttaatgaacaaagtgttcatggaatacttggacaagtttgttgtggttttcatcgatgacattctgatatactcacaatcagaggaagaccatcagcaccatctccgtctggtgttgggaaagttgcgggaacatcaattgtatgccaagctcagcaagtgtgagttctggttgtccgaagtcaaattcttggggcacgtaatatctgctaaaggagttgctgtggaccccgaaacagtgaccgccgtcaccgattggaagcaacccaagacagtcactcagattcgcagtttcttgggtttggcaggatattaccggagattcatcgagaacttctccaaaatcgctcgacccatgacacagttgttgaagaaagaagagaaatttgtgtggagcccgcaatgcgagaaggcgttccaaactctcaaagaaaagctggtttcctcaccagtgttaatcttgccggatactcgcaaggatttcatggtgtactgtgatgcttcgcgccaaggattggggtgcgtgctcatgcaggacggtcatgtggtagcctatgcctcacgccagctacgacctcatgaaggcaactaccctacacatgacttggagttagcagcggtggttcatgctctaaaaatctggcggcactatctcattgggaaccgctgtgaaatatatactgatcacaagagcttgaaatacatcttcacccagtcggatctgaatcttcggcaaaggagatggttagaactcatcaaggattatgatgtgggaatacactatcatcctggtaaggccaacgtggttgccgacgctctaagtcgaaagagccactgcaacactctcaacgtccgaggcattccacccgagcttaatcaacagatggaagccctgaacctaagcatagttggtcgcggattcttggctgcgttagaagccaagcccaccttgctcgatcaaatccgcgaggctcagaagaatgatccggacatgcatggactcctcaagaatatgaaacagggtaaagccgctggtttcacagaggatgaacacggaaccttatggaacggaaagcgggtatgcgttcccgataacagagaacttaaacagctgatacttcaggaagctcacgaaagtccttattccattcaccctggcagtacaaagatgtacttagacttgaaggagaaatactgcgtgtcaaggcagaacaccaacgaccggccggacttctccagcctctctaagtgccagaatggaagtgggatgaaattgggatggatttcatcaccggacttccaaaaacccaaggtagctcgattcattcctgtgaagaccacctatggagggaataaactagcggagctctacttcgctaggatcgtgagtctccatggtattcccaagaaaatcgtatctgataggggaagccaattcacctctcacttttggaagaagctccaggaagagctgggtactcgattgaatttcagcaccgcgtatcacccgcagacagatggacagaccgagcgtctaaatcagatcttagaagatatgcttcgcgcatgtgtcctggacttcgggaagacttgggataagagtctcccctatgccgagttctcctacaataacagctaccaagccagcatacaaatggcaccctatgaagcgttgtacgggcgcaaatgccggacaccgctattgtgggaccaagttggagaaagccaagtgttcgggactgatatcctgagagaagctgaagctaaagtcagaatcattcgggataacctaaaggtggcacagtctcggcagaaaagttatgcagataaccgtcgccgtgatctggaattcgcagtggatgactttgtgtatcttcgggtcacgccattgcgaggtgtgcacaggtttcagacaaaagggaagctcgcacctcggtatgtgggtcccttccgtatcatcgctcgacgcggagaagttgcttaccagctggagttgcccgcctccttgggcaacgtgcatgatgtgttccatgtgtcgcaactcaagaaatgtcttcgagtgccatccgagcaggccgactcagagcaaattgaagttcgcgaagacttgacctatgtggagaggccagtgaaaatcctggacaccatggagcgcaggaccaggaaccgagtaatccgtttttgcaaggtccagtggagcaaccacgccgaagaagaagctacttgggagcgcgaagacgaactgaaggcagcccatcccgatctcttcgccagttcttccgaatctcggggtcgagattccgtttaa

SEQ ID NO: 14177 - DNA, 5262 bp, Oryza sativa
  Clone ID: TFbOSC400477j.C1.o45.fg
atgtcatggcacagggccggtgtcctgctgctaggggctcagtcctgcctgcctgtcccgggggttctggccgtaggtgggattgggtcggtactcttgtctatggctaggatgggttggaaactatgtcacgtcttccgtctgtataccgtggtgatggccggcagcgtcacccgtcgtggtttggacatgactggtttcgtcttggagctgcggggcatgtgcgttgtcctggggtatccacatggagtggactaccagggcaggccgcttccggagcaggagggtgacgatgcagagccccacgctgcttgggaggtcactgcagtgatcctcgttggctctcccgagcggacttcgctggcagtcaccgcgggtggagattctttccccgccgcttgccagagcgccgctctcctcgccatcggcactcttcaccagcgctacccggacgagttgcagcactcgccctaccgctaccaccctcgccgcggtggagcccgcgactacgccaccttccgggatgctagctcggaggatgatgctaccatcgtgcacctggcgcgcatggtggaggcatacgacgcggctcgtatcgacttccatcagatggtgcgccgtgggatggtcgagaacaacatgaagatcctggagctgcgtcaagagaacctgcagctcaagaaggacctagacgcggtggaggcgcagctgcatcagctcaagatcgcccagggagagatggtgacgaccaggagaaatgctgccaccggtgatggcaaccaacctgaaggcagcaaccacaacaaccaccaggggaacccacctccacctcctcctccgcctccaccaccaccaccagacaccaacgccattctcacccaaatcctcgcccagcaggccaacatgatgactgctttcctccaccacctccaaaatccgccacaacataatgctccaccaccacccccacaacactctaaactcgccgagttcctccgcatccgcccacctaccttctctagctccaacaaccccgtggatgcgttggattggttgcatgctgtggggaaaaagctagacactgtgcagtgcagcgatgaggagaaagtcatcttcgccgcccaccagctgcaggggcccgcatctctatggtgggaccatttccaggctacgcagccagaggggcaacctattacttgggcccgtttcaccgccgctttccagagaacccatgtgcccgccggagtcgtggcccttaagaaaagagaattccgagagttgaagcaaggcaactgctccgtgatggagtatttgcatgagttcaacaacctggcccgttacgccccggaggatgtgcgggaagatgaggagaagcaagagaagttcttggcaggaatggaccctgagctgtccgtccgtctagtctccggggactatccggatttccaacgtctggtggacaagagcatccgcttggaagccaagcacaaggaactggagtcgcacaagcgccgcttggcgaatttccgcaatcaacagggtgctaaccaaagggtccgctacaccaatccctatccagggggatcctcctcgcagcagcaacaacagcagcagcaacctcgctccgcgcctcgacctcaattcgtggtgcgcgtcccacagccgcagcagcagcagaatcaacaagggactcgtgcgccccgtcctcctacgccagccgtgcagcctggtcaaggccgcagggacgctcaaggtcagcagcgtctgtgcttcaactgcttcgagcccgggcactttgcggataaatgcccaaagccgaggcgtcagcaaggccaagcgcctccccgctccaacaacggtgggaaggatgtcattcggggtcgtgtgaaccatgtgacggccgaggacgtgctgacaactccagacgtcatcgtcggtacgttcctcattcattccatccctgctaccattttgttcaactctggagcttcccactcgtttatatctgtgccattcgtggggagaaatcagttgggggtagaaaggcttaggaaccctctgctcatcaccacccctggaggggttatgacagcaaagtattatagccctgccgtccctatagaaattcaggggattccttttccctcggatctgattctgctagacaccaagaacttgaatgtgatccttgggatgaattggttggctcaattccaaggagtagtggattgcgcgagacgcactgtcactctgtaccgagggccggaacaaccggttgttttctttgcacccccaacctctgtcagtagttcagaactccatcagataggactgtcagaaatccccatcgtcagagagttcggagacgtgtttccggaagaactacccggtatgccgcccaagcgagagattgagttctggatagatcttgctccaggaaccactcctctgtacaagcgaccctaccgtatggcagcaaatgaactggccgaagtcaagaaacagttggaagagttgaaagaaaaggggtatatacgtccgagtacttccccctggggtgctcctgtgatttttgtggagaagaaagacaagacgaagaggatgtgcgttgactacagagctctcaatgaagtcaccatcaagaacaagtaccctcttccccggatcgatgatctgttcgatcagcttaaaggtgccactgtattctccaagattgatcttcgttccggatatcaccagttgcgcattagggaagaagatattccgaagaccgcattcaccacgcgatacggactgtatgaattcacggtgatgtcattcggtttaaccaatgcacctgcctttttcatgaacttaatgaacaaagtgttcatggaatacttggataagtttgttgtggttttcattgatgacattctgatatactcacaatccgaggaagaccatcagcaccatctccgtctggtattgggaaagttgcgggaacatcaattgtatgccaaacttagcaagtgtgagttctggttgtccgaagtcaaattcttagggcacgtgatatctgctaaaggagttgctgtggaccccgaaacagtgaccgccgtcactgattggaagcaacccaagacagtcactcaagtccgcagtttcttaggtttggcaggatactaccggaggttcatcgagaacttctccaaaatcgctcgacccatgacacagttgttgaagaaagaagagaaatttgtgtggagcccgcaatgcgagaaggcgttcaaaactctcaaagaaaagctggttgcctcgccagtgttaatcttgccggatactcgcaaggatttcatggtgtattgtgacgcttcgcgccaaggattggggtgcgtgctcatgcaggatggtcatgtggtggcctatgcctcacgccagctacggcctcatgaaggcaactaccctacccatgatttggagttagctgcggtggttcatgctctaaaaatctggcggcactatctcattgggaatcgctgtgaaatatatactgatcataagagtttgaaatacatcttcacccagtcggatctgaaccttcggcaaaggagatggttagaactcatcaaggatcatgatgtgggaattcactatcatcctggtaaggccaacgtggtcgccgacgctctaagtcgaaagagccattgcaacactcttaacgtccgtggcatcccacccgaacttagtcaacagatggcagccctgaacctaagcatagttagtcgtggattcttggctgcgttggaagccaagcctaccttgctcgatcaaatccgcgaggctcagaagaatgatccggacatgcatggactcctcaagaatatgaaacagggtaaagccgctggtttcacagaggatgaacacggaaccctatggaacggaaatcgagtatgcgtcccagataacagagaacttaaacagctgatacttcaggaagcccacgaaagtccttattccatccaccctggcagtacgaagatgtacttagacttgaaggagaaatactggtgggttagtatgaagcgggaaattgcagagttcgtggcactttgtgatgtgtgccagcgtgtcaaggcagagcaccaacgaccggccggactcctccaacctctccaagtacctgaatggaaatgggatgaaattgggatggatttcatcaccggacttccaaagacccaaggtggatatgattctatatgggtagttgtggatcgattaaccaaggtagctcgatttattcctgtgaagaccacctatggagggaacaaactagccgagctctacttcgctaggatcgtgagtctccatggcgttcccaagaaaatcgtatctgataggggaagccaattcacctctcacttttggaagaagctccaagaagagctgggtacccgattaaacttcagcaccgcatatcacccgcagacagatgggcagaccgagcgtctaaatcagatcctagaagatatgcttcgcgcatgtgtcctagatatcgggaagacctgggataagagtctcccctatgccgagttctcctacaataacagctaccaagccagtatacaaatggcaccttatgaagcgttgtatgggtgcaaatgccggacaccgctcttgtgggaccaagttggggaaagccaagtgttcgggactgatatactgagagaagctgaagcgaaggtcagaaccattcgggataatctaaaggtggcacagtcccggcagaaaagttatgcaaataaccgtcgccgtaacctggaattcgcagtggatgattttgtgtaccttcgggtcacgccattgcgaggtgtacacaggtttcagacgaaagggaagctcgcacctcggtatgtgagtcctttccgtatcgttgcccgacgcggagaagtcgcttaccaattggagctgcccgcctccttgggcaacgtgcatgatgtgttccatgtgtcgcaactcaagaaatgccttcgagtgccatccgagcaggccgactcaaagcaaattgaagttcgcgaagacttgacctacgtggagaggccagtgaaaatcctggacaccatggagcgcaggaccaggaaccgggtaatccgtttttgcaaggtccagtggagcaaccacgccgaagaggaagctacctgggagcgtgaagacgagctgaaggcagcccatcctgatctcttcgccagttcttccgaatctcggggtcgagattccgtttaa

SEQ ID NO: 14178 - DNA, 4410 bp, Oryza sativa
  Clone ID: TFbOSC400477j.C1.o54.gm
atggttatgccgatggtgacgaccaggagaagtgctaacaccggtgatggcaaccaacccgaaggcagcaaccacaacaaccatggcagcccacctccacctcctcctccgcctccaccaccaccaccagacaccaacgccattctcacccaaatcctcgcccagcaggccaacatgatgactgctttcctccaccacctccaaaatccgccacaacagaatgctccaccaccacccccacaacactctaaactcgccgagttcctccgcatccgtccacctaccttctctagctccaacaaccccgtggatgtgttggattggttgcatgccgtggggaaaaagctagacaccgtgcagtgcagcgatgaggagaaagtcatcttcgccgcccaccaactgcaggggcccgcatctctatggtgggaccatttccaggctacgcagccagagggacagcctattacttgggcccgcttcaccgccgccttccggagaacccatgtgcccgccggagtcatggcccttaagaaaagggaattccgggagttgaagcaaggcaaccgctccgtgatggagtatttgcatgagttcaacaacctggcccggtacgccccggaggatgtacgggaagatgaggaaaggcagaagaagttcttggcaggaatggaccctgagctgtccgtgcgtctagtctccggtgactatccggatttccaacgtctggtggacaagagcatccgcttggaagccaagcacaaggaactggagtcgcacaagcgccgcttggcgaatttccgcaatcaacagggagctaaccaaaggatccgctacaccaatccctatccagggggatcgtcctcgcagcagcagcagcaaccacgctccgcgccccgacctcaattcgtggtgcgcgtcccacagccgcagcaacagcagagccagcaagggacctgtgcgccccgtcctcctacgccagccgcgcagtctggtcaaggccgcagggacgttcaaggtccgcagcgtctgtgcttcaactgcttcgagcctgggcactttgcggataaatgcccaaagccgaggcgccagcaaggccaagcgcctccccgctccaacaacggtggtaaggatgtcattcggggtcgtgtgaaccacgtgacggccgaggacgtgctgacaactccagacgtcatcgttgaactccatcagataggactgtcagaaatccccatcgtcagagagttcggagacgtgtttccggaagaactacccggtatgccgcccaagcgagagattgagttccggatagatcttgctccaggaaccactcctcggtacaagcgaccctaccgtatggcagcaaatgaactggccgaagtcaagaaacagttggaagagttgaaagaaaaggggtacatacgtccgagtacttccccctggggtgctcctgtgatttttgtggagaagaaagacaagacgaagaggatgtgcgttgactacagagctctcaatgaagtcaccatcaaaaacaagtaccctcttccccggatcgatgatctgttcgatcagcttaaaggtgccacggtattctccaagattgatcttcattccggatatcaccagttgcgcatccgtgaagaagatattccgaagaccgcattcaccacgcgatacggactgtatgaattcacggtgatgtcattcggtttaaccaatgctcctgccttcttcatgaacttaatgaacaaagtgttcatggaatacttggataagtttgttgtggttttcattgatgacattctggagaaatactggtgggttagtatgaagcgggaaattgcagagttcgtggccctttgtgatgtgtgccagcgtgtcaaggcagagcaccaacgaccggccggacttctccaacctctccaagtaccagaatggaaatgggatgaaattgggatggatttcatcaccggactcccaaaaacccaaggtggatatgattctatatgggtagttgtggaccgattaaccaaggtagctcggtttattcctatgaagaccacctatggagggaacaaactagccgagctctacttcgctaggatcgtgagtctccatggcgttcctaagaaaattgtatctgataggggaagccaattcacctctcacttttggaagaagctccaagaagagctgggtacccgattaaatttcagcaccgcgtatcacccgcagacagatggacagaccgagcgtctaaatcagatcctagaagatatgcttcgcgcatgtgtcctagatatcgggaagacctgggataagagtctcccctatgccgagttctcctacaataacagctaccaagccagtatacaaatggcaccttatgaagcgttgtatgggtgcaaatgccggacaccgctcttgtgggaccaagttggggaaagccaagtgttcgggactgatatactgagagaagctgaagcgaaggccgacttagagcaaattgaagttcgcgaagacttgacctacgtggagaggccagtgaaaatcctggacaccatggagcgcaggaccaggaaccgggggcgcgggcgcaccgcctcctgccgctgcgccggcgtggtcgccttcgggcgcaccgagcggctgccgcgtggggcccggctgtcagccgcccgcgcccttaggaccatgatcatcaccagttcagaatttactcctgaagacgcagcaaggatacccaagcttcaagttcttggccaagcacttttgctgatagctttcggctcgggagaaaacagacgcgaagagcaagtactgttcgatgtcgtcgacatcccgtacaactacaatgccatcctcggccgtgcgaccctgaaccagttcgaagccatttcccaccacaactatctcaagctcaagatacccggcccagcgggagtgatagtggtcaaggggcttcagccttcggccacgtcaaaaggcgatctggccataatcaacagggctgtgcacaatgtcgaagccgaattgcacagccggccgaaacacgcgccaaaacccacccctcacagcaagatagtaaaagtgcagattgacgatgccgaccccgcaaagctcatatcgctgggggacggcatgggcgaacaagaagctgagggcatcctagcggtgctcaagaagaacattgatatcttcgcctggagccccgacgaagtgggggttgtttcaacagacctcatcatgcatcaactggcaatcaagccggatgccaagccaagaaagcagaagttgtgtaagatgtccgccgatcgtcaagaggcggcgaaagccgaagtccaaaaactactcagggctggggtcattcaagagattgaccacccagagtggctggcgaatccagtactggtgcggaagtcaaacggcaaatggcgcatgtgtgtagatttcacggacctgaacaaagcatgtccgaaagacgatttccctttgccgcggattgatcagctcgtggattcaacagctggctacgaactcatgagtttcctggacgcatattccagctatcaccagatccatatgaacccgcccgacatcccgaaaacagcattcatcaccctgttgggcattttctgtcacctcaggatgcctttcggcctgaggaacgccggagcaaccttcgccagactagtgtacaaggagaccttcgacaacttgcgcgcagcgggcataaaactgaatcctgagaagtgtgtcttcggcattcgcgcgggcaagttgctgggtttcctggtttccgaaagaggcatcgaagcgaaccccgagaaaatcgacgccattcagcaaatgaagcccccgtcaagtgtacatgaggtacaaaagcttgcaggccgaattacggcacttagccggttcctcccaaaggtggccgaaagaggtctgccattcttcaagaccctccggggcatgggaaagttcagttggacaccagaatgccaagcagcattcgacgagctaaagcaatacttgcaaagcccaccagccctcataagcccaacactaggaagcgaactgctgctatacttagcagcttcaccagtggcagtcagtgctgccctcgtccaagaaacagagttcggccagaaaccggtttattttgtctccgaagcactgcaaggggcgaaggcaagatacatcgaaatggaaaagctcgcttacgccctggtgatggcttcgcgcaagctcaagcactacttccaggcccacaaagtaatagtgccttcacagtaccccttgggcgaaatactccgaggcaaggaaatctcaggcaggcttagcaaatgggcggcagagctatccccgttcgacttgcattttgttgcacgcactgctgttaagtctcaagcctaa

SEQ ID NO: 14179 - DNA, 5577 bp, Oryza sativa
  Clone ID: TFbOSC400482j.C1.o1.fg
atggccaatctcaaccctaatccgctgcgcttcctaatgcatggtcttgttgttcatgctggaggtgacttccgcatcccgcgggttgacctcactgtcccgcaacgccctgctcggcgccatgaagacttctatgtggccattgtagagccaatccccttggagcaggactgggatcatcatcgggccctcattgcaaacttcgttcaagatgagctacactatgaggtttgtaacagcttctggtacccgtctgtagtaggtttcttccagatgaggtctgccatgaatagggatgctctggtcctctccccgcccgagttctatgatggggttcactctgttatttttgttaatcatgaccaatgtcctaattggagggcggctaactaccatagagaaggctggttcatgttcctagatttcccgcttgatttcattgatcgccatcatgtgcaccaggcagttacctcttttggggctcagtcctgcctgcctgtcccgggggttccggccgtaggcgggattgggtcggtactcttgtctatggctaggatgggttggaaactatgtcacgtcttccgtctgtataccgtggtgatggccggcagcgtcacccgtcgtggtttggacatgactggcttcgtcttggagctgcgcggcatgtgcgttgtcttagggtatccacatggagtgggctaccaggccaggccgctcccggagcaggagggtgaggacgcggagccccacgctggttgggaggtcactgcagtgatcctcgctggctcttctgagcggacttcgctgacagtcaccgcgggtggcgactccttccccgccgcttgccagaacgccgctctcctcgccatcggcactcttcaccagcgctacccggacgagttgcagcactcgccctaccgctaccaccctcgtcgcggaggagcccgcgactacgccaccttccgggatgctagctcggaggatgacgctaccgtcgtgcatctggcacgcatggtggaggcatacgacgcggctcgtatcgacttccatcagatggtgcgtcgtgggatggtcgagaacaacctgaagatcctggagctgcgtcaagagaacctgcagctcaggaaggacctcgacgcagtggaggcgcaactgcatcagctcaagatcgcccagggagagatctgccgccccaagcgtcgccgcgtctgccgcagccagaagatcaccgcccgcaagagcacctccaggcctgagctagtccgtcagtccctggcgtggacctgcttcgtcgagacccctcgtgccgagcctgcgcccgtgatggtgacgaccaggagaaacactgttaccggtgatggcaaccaacctgaaggcagcaaccacaaccaccagggcaacccacctccacctccaccttcttctccaccaccaccaccagacaccaacgccattctcacccaaatcctcgcccagcaagccaacatgatgaatgctttcctccaccacctccaaaatccaccacaacagaatgtttcaccaccaccttcccaacactctaaactcgccgagttccttcgcatccgcccacctaccttctctagctccaacaaccccgtggatgcgttggattggttgcatgccgtggggaaaaagctagacacggatgtgcggggagatgaggagaagcaagagaagttcctggcaggaatggaccttgagctgtccgtccgcctagtctctggggactatccggatttccaccgactggtggacaagagcatccgcttggaagccaagcacaaggaactggagtcgcacaagcgccgcttggcgaatttccgcaatcaacagggtgctaaccagagggtccgctacaccaatccctatccagggggatcctcctcgcagcagcaacaacagcagcagcaacctcgcccagcgcctcgacctcaattcgtggtgcgtgtcccacagccgcagcaacagcagaatcaacaagggactcgtgcgccccgtcctcctacgccaactgtgccgcctggtcaaggccgcagggacgctcaaggtcagcagcgtctgtgcttcaactgcttcgagcccgggcactttgcggataaatgcccaaagccaaggcgtcagcaaggccaagctcctccccgctccaacaacggcgggaaggatgtcattcggggtcgtgtgaatcacgtgacggccgaggacgtgctgacaactccagacgtcatcgttggtacgttcctcgttcattccatccctgctacaattttgttcgactctggagcttcccactcgtttatatctgtgccattcgtggggagaaatcagttgggggtagaaaggcttaggaaccctctgctcatcaccacccctggaggggttatgacagcaaagtattatagccctgccgtccctatagaaattcaggggattccttttccctcggatctgattcttctagacaccaagaacttggatgtgatccttgggatgaattggttggctcaattccaaggagtagtggattgcgcgagacgcactgtcactctgtaccgagggccggaacaaccggttgttttctttgcacccccaacctctgtcagaagttcagaacttcatcagataggactgtcagaaatccccatcgtcagggagttcggagacgtgtttccggaagaactacccggtatgccgcccaagcgagagattgagttccggatagatcttgctccaggaaccactcctctgtacaaacgaccctaccgtatggcagcaaatgaactggccgaagtaaagaaacagctggaagagttgaaagaaaaggggtacatacgtccgagtacttccccatggggtgctcctgtgatttttgtagagaagaaagacaagacgaagaggatgtgcgtcgactacagagctctcaatgaagtcaccataaaaaacaagtaccctcttccccggatcgatgatctgttcgatcagctcaaaggtgccactgtattctccaagattgatctccgttccggatatcaccaattacgtattcgtgaagaagatattgcgaagaccgcattcaccacgcgatacgggctgtatgaattcacggtgatgtcattcggtttgaccaatgcacctgccttcttcatgaacttaatgaacaaagtgttcatggaatacttggataagtttgttgtggttttcattgatgacattctgatatactcacaatcagaggaagaccatcagcaccatctccgtctggtgttgggaaagctgcgggaacatcaattgtatgccaaacttagcaagtgtgagttctggttgtccgaagtcaaattcttagggcacgtgatatctgctaaaggagttgctgtggaccccgaaatagtgaccgctgtcactgattggaagcaacctaagacagtcactcaagtccgcagtttcttaggtttggcaggatactaccggaggttcatcgagaacttctccaaaatcgctcgacccatgacacagttgttgaagaaagaagagaaatttgtgtggagcccgcaatgcgagaaggcgttccaaactctcaaagaaaagctggtttcctcgccggtgttaatcttgccggatactcgcaaggatttcatggtgtattgtgacgcttcgcgccaaggattggggtgcgtgctcatgcaggacggtcatgtggtggcctacgcctcacgtcagctacggactcacgaaggcaactaccctacccatgacttggagttagccgcggtggtgcatgctctaaaaatctggcggcactatctcattgggaatcgctgtgaaatatatactgaccataagagtttgaaatacatcttcacccagtcggatctgaatcttcggcaaaggagatggttagaactcatcaaggattatgatgtgggaattcactatcatcctggtaaggccaacgtggtcgccgacgctctaagtcgaaaaagccattgcaacactcttaacgtccgtggcatcccgcccgaacttaatcaacagatggaagccctgaacctaagcatagttggtcgcggattcttggctacgttggaagccaagcccaccttgctcgatcaaatccgcgaggctcagaagaatgatccggacatgcatggactcctcaagaatatgaaacagggtaaagccgctggtttcacagaggatgaacacggaaccctatggaacggaaatcgggtatgcgttccagataacagagaacttaaacagctggtacttcaggtagctcacgaaagtccttattccatccaccctggcagtacgaagatgtacttagacttgaaggagaaatactggtgggttagtatgaagcgggaaattgcagagttcgtggccctatgtgatgtgtgccagcgtgtcaaggcagagcaccaacgaccggccggacttctccaacctctccaagtaccagaatggaaatgggatgaaattgggatggatttcatcaccggacttccaaaaacccaaggtggatatgattctatatgggtagttgtggatcgattaaccaaggtagcccgatttattcctgtgaagaccacctatggagggaacaaactagccgaactctacttcgctaggatcgtgagtctccatggcgttcccaagaaaatcgtatctgataggggaagccaattcacctctcacttttggaagaagctccaagaagaactgggtactcgattgaatttcagcaccgcctatcacccgcagacagatggacagaccgagcgtctaaatcagatcctagaagacatgcttcgtgcatgtgtactagatttcgggaagacctgggataagagtctcccctatgccgagttctcctacaataacagctatcaatccagcatacaaatggcaccttatgaagcgttgtacgggcgcaaatgccggacaccactcttgtgggaccaagtaggagaaagccaagtgttcgggactgatatcctgagagaagctgaagctaaagtcagaatcattcgggataatctaaaggtggcacagtcccggcagaaaagttatgcagataaccgccgccgtgacctggaattcgcagtggatgactttgtgtatcttcgggtcacgccattgcgaggtgtacacaggtttcagacgaaagggaagctcgcacctcggtatgtgggtcctttccgtatcgttgctcgacgcggagaagtcgcttaccaattggagctgcccgcttccttgggcaacgtgcatgatgtgttccatgtgtcgcaactcaagaagtgtctccgagtgccatccgagcaggccgactcagagcaaattgaagttcgcgaagatttgacctacgtggagaggccagtgaaaatcctggacaccatggagcgcaggaccaggaaccgggtaatccgtttttgcaaggtccagtggagcaaccacgccgaagaagaagctacttgggagcgtgaagacgagctgaaggcagcccatcccgatctcttcgccagttcttccgaatctcggggtcgagattccgtttaa

SEQ ID NO: 14180 - DNA, 5544 bp, Oryza sativa
  Clone ID: TFbOSC400486j.C1.o8.fg
atggagatggatgaagtcgggggtcgatggacattctccagggcagatgaaggctacacgagctgcggcccggtagtcgagatgtcatggcacagggccggtgtcctgctgctaggggctcagtcctgcctgcctgtcccgggggttccggccgtaggtaggattgggtcggtactcttgtctatggctaggatgggttggaaactatgtcacgtcttctgtctgtataccatggtgatggccggcagcgtcacccgtcgtggtttggacatgactggcttcgtcttggagctgcggggcatgtgcgtggtcctggggtatccgcatggagtggactaccaggccaggccgcttccggagcaggagggtgacgatgcagagccccacgctggttgggaggttactgcagtgatcctctctggctctcccgagcggacttcactggcagtcaccgcgggtggagattccttccccgccgcttgccagagcgccgctctcctcgccatcggcactcttcaccagcgctacccggacgagttgcagcactcgccctatcgctaccaccctcgtcgcggaggagcccgcgactacgccaccttccgggatgctagctcggaggatgacgctaccatcgtgcacctggcgcgcatggtggaggcgtacgacgcggctcgtatcgacttccatcagatggtgcgccgtgggatggtcgagaacaacttgaagatcctggagctgcgtcaggagaacctgcagctccagaaggacctggacgcggtggaggcgcagctgcatcagctcaagatcgcccagggagaggtctgtcgccccaagcgccgccgcgtctgccgcagccagaagatcaccgcccgcaagagcacctccaggcccgagcttgttcgtcagtccctggcgtggacctgcttcatcgagacccctcgtgccgagcccgcgcccgtggttccccaggagggggaaacctccggcgttggtagcacggaggatgcgctgttgctcaccttccgtcctggcccatcgcagcggagaagtgctaacaccggtgatggcaaccaactcgaaggcagcaaccacaaccaccagggcaacccacctccacctcctcctccgcctccaccaccaccaccagataccaacgccattctcacccaaatcctcgcccagcaggccaacatgatgactgctttcctccaccacctccaaaatccgccacaacataatgctccaccaccacctccccaacactctaaactcgctgagttcctccgcatccgcccacctaccttctctagttccaacaaccccgtggatgcgttggattggttgcatgccgtggggaaaaagctagacattgtgcagtgcagcgatgaggagaaagtcatcttcgccgcccaccagctgcaggggcccgcatctctatggtgggaccatttccaggctacgcagccagaggggcaacctatcacttgggctcgcttcaccgccgctttccggagaacccatgtgcccgccggagtcgtggcccttaagaaaagggagttccgagagttgaagcagggcaaccgctccgtgatggagtatttgcatgagttcaacaacctggcccgttacgctccggaggatgtgcgggaagatgaggagaagcaagagaatttcttggcaggaatggaccctgagctgtccgtccgtctagtctccggggactatccggatttccaacgtctggtggacaagagcatctgcttggaagccaagcacaaggaactggagtcgcacaagcgccgcttggcgaatttccgcaatcaacagggtgccaaccaaagggtccgctacaccaatccctatccagggggatcctcctcgcagcagcagcagcagcaacctcgccccgcgcctcgacctcaattcgtggtgcgcgtcccacagccgcagcagcagcagaatcaacaagggactcgtgcgccccgtccacctacgccaactgtgcagcctggtcaaggccgcagggacgctcaaggtccgcagcgtctgtgcttcaactgcttcgagcccgggcactttgcggataaatgcccaaagccgaggcgccagcaaggccaagcgcctccccgctccaacaatggtgggaaggatgtcattcggggtcgtgtgaaccacgtgacggccgaggacgtgctgacaactccagacgtcatcgttggtacgttcctcattcattccatccctgctaccattttgttcgactctggagcttcccactcgtttatatctgtgccattcgtggggagaaatcagttgggggtagaaaggcttaggaaccctctgctcatcaccacccctggaggggttatgacagcaaagtattatagccctgccgtccctatagaaattcaggggattccttttccctcggatctgattctgctagacaccaagaacttggatgtgatccttgggatgaattggttggctcaattccaaggagtagtggattgcgcgagacgcaccgtcactctgtaccgagggccggaacaaccggttgttttctttgcatccccaacctctgtcagaagttcagaactgcatcagattggactgtcagaaatccccatcgtcagagagttcagagatgtgtttccggaagaactacccggtatgctgcccaagcgagagattgagttccggatagatcttgctccaggaaccactcctctgtacaagcgaccctaccgtatggcagcaaatgaactggccgaagtcaagaaacagttggaagagttgaaagaaaaggggtatatacgcccgagtacttccccctggggtgctcctgtgatttttgtggagaagaaagacaagacgaagaggatgtgcgttgactacagagctctcaatgaagtcaccatcaaaaacaagtaccctcttccccgaatcgatgatctgttcgatcagcttaaaggtgccactgtattctccaagatcgatcttcgttccggatatcaccaattacgtattcgtgaagaagatattcctaagaccgcattcaccacgcgatacggactgtatgaattcacggtgatgtcgttcggtttaaccaatgcacctgccttcttcatgaacttaatgaacaaagtgttcatggaatacttggataagtttgtcgtggttttcattgatgacattctgatatactcacaatcagaggaagatcatcagcaccatctccgtctggtgttgggaaagttgcgtgaacatcaattgtatgccaaacttagcaagtgtgagttctggttgtccgaagtcaaattcttagggcacgtgatatctgctaaaggagttgctgtggaccccgaaacagtgaccgctgtcaccgattggaagcaacccaagacagtcactcaagtccgcagtttcttaggtttggcaggatactaccggaggttcatcgagaacttctccaaaatcgctcgacccatgacacagttgttgaagaaagaagagaagtttgtgtggagcccgcaatgtgaaaaggcgttccaaactctcaaagaaaagctggtttcctcaccagtgctaatcttgccagatactcgcaaggatttcgtggtgtattatgatgcttcgcgccaaggattggggtgcgtgctcatgcaggacggtcatgtggtggcctatgcctcacgccagctacggcctcatgaaggcaattaccctacccatgatttggagttagccgctgtggttcatgctctaaaaatctggcggcactatctcattgggaatcgctatgaaatatatactgatcataagagtttgaaatacatcttcacccagtcggatctgaatcttcggcaaaggagatggttagaactcatcaaggattatgatgtgggaagtcactatcatcctggtaaggccaacgtggtcgccgacgccctaagtcgaaaaagccattgcaacactcttaacatccgtggcgttccacccgaacttaatcaacagatggaagccctgaacctaagcatagttggtcgcggatttttggctgcgttggaagccaagcccaccttgctcgatcaaatccgcgaggctcagaagaatgacctggacatgcatggactcctcaggaatatgaaacagggtaaagccgctggtttcacagaggatgaacacggaaccctatggaacggaaatcgggtatgcgttccagataacagagaacttaaacagctgatacttcaggaagctcacgaaagtccttattccatccaccctggcagtacgaagatgtatctagacttgaaggagaaatactggtgggttagtatgaagcgagaaattgcagagttcgtggccctttgtgatgtgtgccagcgtgtcaaggaagagcaccaacgaccggccgggcttctccaacctctccaagtaccggaatggaaatgggatgaaattgggatggatttcatcaccggacttccaaaaacccaaggtggatatgattctatatgggtagttgtggatcgattaaccaaggtagcccgatttattcctgtgaagaccacctatggagggaacaaactagccgagctctacttcgctaggatcgtgagtctccatggcgttcccaagaaaatcgtatctgatcggggaagccaattcacctctcacttttggaagaagctccaagaagagctgggtacccgattaaatttcagcaccgcgtatcacccgcagacagatggacagaccgagcgtctaaatcagattctagaagatatgcttcgcgcatgtgtcctagatttcgggaagacctgggataagagtctcccctatgccgagttctcctacaataacagctatcaagccagcatacaaatggcaccctatgaagcgttgtatgggcgcaagtgccggacaccgctattgtgggaccaagctggcgaaagccaagtgttcgggaccgatatcctgagagaagctgaagcgaaggtcagaaccattcgggataatctaaaggtggcacagtcccggcagaaaagttatgcagataaccgtcgccgtgatctggaattcgcagtggatgactttgtgtatcttcgggtcacgccattgcgaggtgtacacaggtttcagacaaagaggaagctcgcacctcggtatgtgggtcctttccgtatcattgctcggcgcggagaagtcgcatatcggctggagctgcccgcctctttgggcaacgtgcatgatgtgttccatgtgtcgcaactcaagaaatgtcttcgagtgccatccgagcaggccgactcagagcaaattgaagttcgcgaagacttgacctatgtggagaggccagtgaaaatcctggacaccatggaacgcgggaccaggaaccgggtaatccgtttttgcaaggtccagtggagcaaccacgccgaagaagaagctacctgggagcgtgaagacgagctgaaggcagcccatcccgatctcttcgccagttcttccgaatctcggggtcgagattccgtttaa

SEQ ID NO: 14181 - DNA, 6049 bp, Oryza sativa
  Clone ID: TFbOSC400492j.C1.o14.np
atggcggccggatcttccgcggccgattccccctcatccggccgctctctccccctcccaacactatataaacgctccccgtgcctccctccaccgtttccgccactcgccgccctctctccccgtcggaatcgagctcgcgccgtcgttctctctctccgtcgtcgccgccgagctccggtccgccgccgtcgtcgccccggaccttctcccgcctcggcgtcgcctccttcgtctccgccgcgtcctcgccgacctcgtccacccctccgtttcgcccgccgaccgccggaacgccgccgtccccgtcgacccgtgccgcgccgccgccttcctccgctccggtcgccgttcccgtcgtcgccgtcgacccggggtgagccgtggaccgccgttttgtttcccccttccctcccctctctcgggcgccgctccgccgcgctggtggtcgccggcggagaccatcggggcgcgggcgcgtcgcctcccatcggctgtgccggcgaggccgcttcgggcgcgccccgcggctgccatgtggggcccggccgtcagccgcccgcgccctcgggtgcggctgacgcgtgggacccacggcgccggccggcgtaagccgcgtgcacccggtccaccgtggacccaccccggccatataaggaccggtcttcgggcctctgttgcaaagcactaccgtacttccacatgtctagtgggacaaatgaaggctacacgagctgcggcccggtagtcgagatgtcatggcacagggccggtgtcctgctgctaggggctcagtcctgcttgcctgtcccgggggttccggccgtaggtgggattaggtcgatgtacacctctgatcagagtaaaacctattcgaatagccgcgccctcggttatgggcaagccgagcaatgtacccaaatggccggcagcgtcacccgtcgtggtttggacatgactggcttcgtcttggagctgcgcggcatgtgcgttgtcttagggtatccacatggagtggactaccaggccaggccgcttccggagcaggagggtgatgatgcggagccccgcgctggttgggaggtcactgcagtgatcctcgctggctcttctgagcggacttcgctgacagtcaccgcgggtggcgactccttccccgccgcttgccagaacgccgctctcctcgccatcggcactcttcaccagcgctacccggacgagttgcagcactcgtcctaccgctaccaccctcgtcgcggaggagcccgcgactacgccaccttccgggatgctagctcggaggatgacgctaccgtcgtgcatctggcacgcatggtggaggcatacgacgcggctcgtatcgacttccatcagatggtgcgtcgtgggatggtcgagaacaacctgaagatcctggagctgcgtcaagagaatctgcagctcaagaaggacctcgacgcagtggaggcgcagctgcatcagctcaagatcgcccagggagaggtctgccgccccaagcgtcgccgcgtctgccgcagccagaagatcaccgcccgcaagagcacctccaggcccgagcttgtccgtcagtccctggcatggacctgcttcgtcgagaccccttgtgccgagcctgcgcccgtggttccccaggagggggaagcctccggcgttggtagcacggaggatgtgctgttgctcaccttccatggtgacgaccaggagaaacgctgttaccggtgatggcaaccaacctgaaggcagcaaccacaaccaccagggcaacccacctccacctccacctcctcctccaccaccaccaccagacaccaacgccattctcacccaaatcctcgcccagcaagccaacatgatgaatgctttcctccaccacctccaaaatccaccacaacagaatgctccaccaccacctccccaacactctaaactcgccgagttcctccgcatccgcccacctaccttctctagctccaacaaccccgtggatgcgttggattggttgcatgccgtggggaaaaagctagacacggtgcagtgtaccgatgaggagaaagtcatcttcgccgcccaccaactgcaggggcccgcatctctctggtgggaccacttccaggctacgcagccagagggacagccgattacttgggcccgcttcaccgccgctttccggagaacccatgtgcccgctggagtcgtggcccttaagaaaagggaattccgagagttgaagcaaggcaaccgctccgtgctggagtatttgcatgaattcaacaatctggcccgttacgctccggaggatgtgcggggagatgaggagaagcaagagaagttcctggcaggaatggaccctgagctgtccgtccgcctagtctctggggactatccggatttccaacgactggtggacaagagcatccgcttggaagccaagcacaaggaactggagtcgcacaagcgccgcttggcgaatttccgcaatcaacagggtgctaaccagagggtccgctacaccaatccctatccagggggatcctcctcgcagcagcaacaacagcagcagcaacctcgcccagcgcctcgacctcaattcgtggtgcgtgtcccacagccgcagcaacagcagaatcaacaagggactcgtgcgccccgtcctcctacgccaactgtgccgcctggtcaaggccgcagggacgctcaaggtcagcagcgtctgtgcttcaactgcttcgagcccgggcactttgcggataaatgcccaaagccaaggcgtcagcaaggccaagcgcctccccgctccaacaacggcgggaaggatgtcattcggggtcgtgtgaatcacgtgacggccgaggacgtgctgacaactccagacgtcatcgttggtacgttcctcgttcattccatccctgctacaattttgttcgactctggagcttcccactcgtttatatctgtgccattcgtggggagaaatcagttgggggtagaaaggcttaggaaccctctgctcatcaccacccctggaggggttatgacagcaaagtattatagccctgccgtccctatagaaattcaggggattccttttccctcggatctgattctgctagacacaaagaacttggatgtgattcttggaatgaattggttggctcaattccaaggagtagtggattgcgcgagacgcactgtcactctgtaccgagggccagaacaaccggttgttttctttgcacccccaacctctgtcagaagttcagaacttcatcagataggactgtcagaaatccccatcgtcagggagttcggagatgtgtttccggaagaactacctggtatgccgcccaagcgagagattgagttccgaatagatcttgctccaggaaccactcctctgtacaagcgaccctaccgtatggcagcaaatgaactggccgaagtaaagaaacagttggaagagttgaaagaaaaggggtatatacgtccgagtacttccccatggggtgctcctgtgatttttgtagagaagaaagacaagacgaagaggatgtgcgttgactacagagctctcaatgaagtcaccatcaaaaacaagtaccctcttccccggatcgatgatctgttcgatcagcttaaaggtgccactgtattctccaagattgatctccgttccggatatcaccaattacgtattcgtgaagaagatattccgaagaccgcattcaccacgcgatacgggctgtatgaattcacggtgatgtcgttcggtttgaccaatgcacctgccttcttcatgaacttaatgaacaaagtgttcatggaatacttggataagtttgttgtggttttcattgatgacattctgatatactcacaatcagaggaagaccatcagcaccatctccgtctggtgttgggaaagttacgggaacatcaattgtatgccaagcttagcaagtgtgagttctggttgtccgaagtcaaattcttagggcacgtgatatctgctaaaggagttgctgtggaccccgaaacagtgaccgccgtcaccgattggaagcaacccaagacagttacccaagtccgtagtttcttaggtttggcaggatactaccggagattcatcgagaacttctccagaatcgctcgacccatgacacggttgttgaagaaagaagagaaatttgtgtggagcccgcaatgcgagaaggcgttccaaactctcaaggaaaagctagtttcctcgccggtgttaatcttgccggatactcgcaaggacttcatggtgtattgtgatgcttcgcgccaaggattggggtgcgtgctcatgcaggatggtcatgtggtagcctatgcctcccgtcagcttcgaccgtatgaaggcaactaccctacccatgacttggaattagccgcagtggttcatgctctaaaaatctggcggcactatctcattgggaatcgctgtgaaatatataccgaccataagagtctgaaatacatcttcacccagtcggatctgaatcttcggcaaaggagatggttagaactcatcaaagattatgatgtgggaattcactatcatcctggtaaggccaacgtggttgccgacgctctaagtcgaaagagccattgcaacactcttaacgtccgtggcattccacccgcacttaatcaacagatggaagccctgaacctaagcatagttggtcgtggattcttggctgcgttggaagccaagcctaacttgctcgatcaaatccgcgaggcttagaagaatgatccggacatgcatggactcctcaagaagatgaaacagggtaaagccgctggtttcacagaggatgaacacggaaccctatggaacggaaagcggcgtgtcaaggcagagcaccaacgaccggccggacttctccaaccactccaagtacccgaatggaaatgggatgaaattgggatggatttcatcaccggacttccaaaaacccaaggcggatatgattctatatgggtagttgtggatcgattaaccaaggtagcccgatttattcctgtgaagaccacctatggaggaaacaagctagccgagctctacttcgctaggatcgtgagtctccatggcgttcccaagaaaatcgtatctgataggggaagccaattcacctctcacttttggaagaagctccaagaagaactgggtactcgattgaatttcagcaccgcctatcacccgcagacagatggacagaccgagcgtctaaatcagatcctagaagacatgcttcgcgcatgtgtactagatttcgggaagacctgggataagagtctcccctatgccgagttctcctacaataacagctatcaatccagcatacaaatggcaccttatgaagcgttgtacgggcgcaaatgccggacaccactcttgtgggaccaagtaggagaaagccaagtgttcgggactgatatcctgagagaagctgaagctaaagttagaatcattcgggataatctaaaggtggcacagtcccggcagaaaagttatgcagataaccgccgccgtgacctggaattcgcagtggacgactttgtgtatcttcgggtcacgccattgcgaggtgtacacaggtttcagacgaaagggaagctcgcacctcggtatgtgggtcctttccgtatcgttgctcgacgtggagaagtcgcttaccaattggagctgcccgcctccttgggcaacgtgcatgatgtgtttcatgtgtcgcaactcaagaagtgtctccgagtgccatccgagcaggccgactcagagcaaattgaagttcgcgaagatttgacctatgtggaaaggccagtgaaaatcctggacaccatggagcgcaggaccaggaaccgggtaatccgtttttgcaaggtccagtggagcaaccacgccgaagaagaagctacctgggagcgtgaagacgagctgaaggcagcccatcccgatctcttcgccagttcttccgaatctcggggtcgagattccgtt

SEQ ID NO: 14182 - DNA, 2142 bp, Oryza sativa
  Clone ID: TFbOSC400534j.C1.o1.fg
atgtcatggcagagggttggtgccctgctgctaggggctcagtcttgcctgcctgtcccgggggttccggccatggccggcagcgtcacccgtcgtggtttggacatgactggcttcgtcttggagctgcgaggcatgtgcgtggtcttggggtatccacatggagtggactaccaggccaggccgcttccggatcaggagggtgacgacgcggagccccacgctggttgggaggtcactgcagtgatcctctctggctcccccgagcggacttcgctggcagtcaccgcgggtggagattccttccccgccgcttgccagaacgccgctctcctcgccatcggcactcttcaccagcgctacccggacgagttgcagcactcgccctaccgctaccaccctcgtcgcggaggagcccgcgactacgccaccttccgggatgctagctcggaggatgatgctaccgtcgtgcacctggcgcgcatggtggaggcgtacgacgcggctcgtatcgacttccatcagatggtacgccgcgggatggttgagaacaacatgaagatcctggagctgcgtcaggagaacctgcagctcaagaaggacctcgacgcggtggaggcgcagctgcatcagctcaagatcgcccagggagaggactgccgccccaagcgtcgccgcgtttgccgcagccagaagatcaccgcccgcaagagcacctccaggcccgagctggttcgtcagtccctggcgtggacctgctttgtcgagacccctcgtgccgagcccgcgcccgtggttccccaggagggggaagcctccggcgttggtagcacggagggcagcaaccacaaccaccagggcaacccacctccacctcctcctccgcctccgccaccaccaccagacaccaacgccattctcacccaaatcctcgctcagcaagccaacatgatgactgctttcctccaccacctccaaaatccgccacaacagaatgctccaccaccacctccccaacactctaaactcgccgagttcctccgcatccgcccacccaccttctctagctccaacaaccccgtggatgcgttggattggttgcatgccgtggggaaaaagctagacacggtgcagtgtagcgatgaggagaaagtcatcttcgccgcccaccaactgcaggggcccgcatctctatggtgggaccacttccaggctacgcagccagagggacagcctattacttgggcccgcttcaccgccgctttccggagaacccatgtgcccgctggagtcgtggctcttaagaaaagggaattccgagagttgaagcaaggcaaccgctccgtgatggagtatttgcatgagttcaacagtctggcccgttatgccccggaggatgtgcgggaagatgaggagaagcaagagaagttcttggcaggaatggaccctgagctgtccgttcgtctagtctctggggactatccggattttcaacgactggtggacaagagcatccgcttggaagccaagcacaaggagctggagtcgcacaagcgccgcttggcgaatttccgcaatcaacagggtgctaaccaaagggtccgctacaccaatccctatccagggggatcctcctcgcagcagcagcagcagcaacaacctcgctccgcgcctcgacctcaattcgtggtgcgcgtcccacagccgcagcagcagcagaatcagcaagggactcgtgcgccccgtcctcctacgccaactgtgcagcctggtcaaggccgcagggacgctcaaggtcagcagcgtctgtgcttcaactgcttcgagcccgggcactttgcggataaatgcccaaagccaaggcgtcagcaaggccaagcgcctccccgctccaacaacggtggaaaggatgtcattcggggtcgtgtgaatcacgtgacggccgaggacgtgctgacaaccccagacgtcatcgttggtacgttcctcattcattccatccctgctaccattttgttcgactctggagcttcccactcgtttatatctgtgacattcgtggggagaaatcagttgggggtagaaaggcttaggaaccctctgctcatcaccacccctggaggggttatgacagcaaagtaa

SEQ ID NO: 14183 - DNA, 6056 bp, Oryza sativa
  Clone ID: TFbOSC400675j.C1.o46.np
atggcggccggacctcccgcgccggtttccttcccctccggccgctctctgccccttccaaccctatttaaaccctccccgcgcctccctcgcccgtttccgccccttgccgcaccgtctccccgccggaatcgagctcgcgccgtcgccccctctctcctccgtcgccgacgacctccggccggccttctccgctcgccgggaccgtctcccgccctggcgtcgcctcctccggcttcgccgcaccgccgtcgaccacgtccaccccctcgccgagtccgccgaccgccggaacgccgtcgaccccgtcgacctgagccgcgccgccgccttcctccgctccggccgcctttttcgtcgtcgccgtcgacctagggtgagccgtggaccgccgcctcttttgccccttcccttcccctctctcggccgccgctccgccgtgcctgtggccgccgccggcgaccataggggcgcgggggccgcctcccgccggccgcgccgagtggccgccttcgggcgcgccgagtggccgccgcgtggggcccggccgtcagccgcccgcgccctcgggtgcggctaacgcgtggggcccacggcgccggccggtgcgagcccgggtgcgcccggtcaaccgtggaccggtctaatatttgttttcaccggggtcatagctagtaaaataaagaggatatgagaggttaaaataaaatcatcggggtctactgaccccggtaattgactgtaccttcgcccctgcttcaaatggccataacttggccatttgaactcggaattggaccgttcaagtctcttttttttccttaagaagtcaagaacccatttttgtgctttgttcctgcttgttatatggagtttattagagtaaaagcccttttattttccgttggtcgtgtagacttttgtttgtagatggccggcagcatcaaccgtcgtggtctggacctgactggtttcgttttggagctgcggggcatgtgcgttgccttggggtatccgcatggagtggactaccagggcaagcaactcccggagcaagagggtgacgatgcagagccccacgctgcttgggaggtcactgcagtgatcctcactggctcacccgagaggacttcgttggcagtcaccgcgggtggagattccttctccgctgcatgccagaacgccgcactcctcgccatcggcactcttcaccagcgctacccggacgagttgcagcactcgccctaccgctaccaccctcgtcacggaggagcccgcgactacgccaccttccgggatgctagctcggaggatgacgctaccatcatgcacctggcacgcatggtggaggcgtacgacgcggcccgtatcgacttccaccagatggtgcgccgcgggttggtcgagaacaacatgaagatcctggagctgcgtcaggagaatctacagctgaagaaggacctagacgcagtggaggcgcagctgtgtcagctcaagatcacccagggagaggtctgtcgccccaagggccgccgcgtttgccgcagcttgaagatcaccgcccgcaagagtacctccaggcccgagcttgttcgtcagtccttggcatggacctgtttcgtcaagacccctcgtgccgagcccgcgcccgtggttccgcaggaggagggagcctctggcgttggcagcacggaggcttgcgcgtgtgttcttctcatggtgacaaccaggagaagtgctgctaccggtgatggcaaccaacccgaaggtagcaaccccaacatccaaggcggcccacctccacctcctcccccgcctctaccaccaccaccagacatcaactccatcctcacccaaatcctcgcccagcaggccaacatgatggctgctttcctccatcacatccaaaatccgccacagcataatgctccacctccaccaccacccccacaacactctaaactcgccaagttcctccgcatccgtccgcctaccttctctagctccaataaccccgtggatgctttggattggttgcatgccgtggggaaaaagttagacaccgcgcagtgcaacgatgaggagaaagtcatctttgccgctcaccaactgtaggggcccgcatctctatggtgggaccacttccaggctacgcagccagaggggcggcctattacttgggcccacttcaccgccgctttccagaggacccatgtgcccgccggagtcatggcccttaagaaaagggaattccgagagttgaagcaaaggcaaccgctctgtgatggagtatttgcacgagtttaacaacttggcccggtacgccccggaggatgttctgaagatgaggagaagcaagagaagttcttggcaggaatggaccctgagctgtccgtgcgtctggtctccggggactatccggatttccaacgtctggtggacaagagcatccgcttggaagccaagcacaaggaactggagtcgcacaagcgtcgcttggcgaatttccgcaatcaacagggggttaaccaaagggtccgctacaccaatccctatccagggggatcctcctcgcagcagcagcagcagcaacaccacgctccatgccccgacctcaattcgtggtgcgcgtcccacagccgcagcaacagcagagtcagcaagggacccgtgcgccccgtcctccctgcgcccgttgtgcagcctggtcaaggccgcagagacgttcaaggtcagcagcgtctgtgcttcaactgcttcgagcccgggcactttgcggataaatgcccaaagccgaggcgccagcaaggccaagcgcctccccgccccaataacggtggtaaggatgtcattcggggtcgtgtgaaccacgtgactgctgaggatgtgctgacaactccagacgtcatcgttggtacgttcttcattcattccatccctgctaccattttgttcgactctggagcttcccactcatttatatctgtgccattcgtggggagaaatcagttgggggtagaaaggcttaggaaccctctgctcatcaccacccctggaggggttatgacagcaaagtattatagccctgtcgttcctatagaaatccagggaattccttttccctcggatctgattcttctagacaccaagaacttggatgtgatccttgggatgaattggttggctcaattccgagtagtggattgcgcaagacgcactgtcactctgtaccgagggccagaacaaccggttgttttctttgcacccccaaccactgtcggcagttcagaacttcatcagataggactgtcagaaatccccatcgtcagtgagttcggagatgtgtttccggaagaactacccggtatgccgcccaagcgagagattgagttccggatagatcttgctctaggaaccactcctctgtacaagcgaccctaccgtatggcagcaaatgaactggccgaagtcaagaaacagttggaagagttaaaagaaaaggggtacatacggccgagcacttcccccgaggtgctcctgtgatttttgtggagaagaaagacaagataaagaggatgtgcgttgactacagagctctcaatgaagttactatcaaaaacaagtaccctcttccccggatcgatgatctgttcgatcagcttaaaggtgccacggtattctccaagattgatcttcgctccggatatcaccaattgcgtatccatgaagaagatatcccgaagaccgcattcaccacgcgttatggactgtatgaattcacggtgatgtcgttcgggctgaccaatgctcctaccttcttcatgaacttaatgaacaaagtgttcatggaatacttggataagtttgttgtggtcttcatcgacgacatcctggtatactcacaatcagaggaagaccatcaacagcatctccgtctggtgttgggaaagttgtgggaacatcaattgtatgccaagcttagcaagtgtgagttctggttgtccgaagtcaaattcttagggcatgtgatatctgctaaaggagttgctgtggaccccgaaacagtgatcgccgtcactgattggaagcaacccaagacagttactcaggttcgcagctttttgggtttggcaggatactaccggaggttcatcgagaacttctccaaaatcgctcgacccatgacacagttgttgaagaaagaagaaaagtttgtgtggagcccgcaatgcgagaaggcgttccaaactctcaaggaaaagctggtttcctcgccagttttaatcttaccggatactcgcaaggacttcatggtgtactgtgacgcttcgcgccaaggattggggtgcgtgctcatgcaggaaggtcatgtggtagcctatgcctcacgccagctactgcctcatgaaggcaactaccctacccatgatttggagttggccgctgtggttcatgctctaaaaatctggcagcattatctcattgggaatcgctgcgaaatatataccgatcataagagtttgaaatacatcttcacccagtcggatctgaatcttcggcagagaagatggttagagctcatcaaggattatgatgtgggaatccactatcacccaggtaaggccaacgtggtcgcagacgcgctgagtcgaaaaagtcgttgcaactctcttggcgtctgtggcattccaccggaacttcatcaacagatggaagccctgaacctaagcatagttggtcgtggattcttggctacgctggaagcaaagcctaccttgctcgatcaaatccgcgaggctcagaagaatgatccagatatgcatgggatcctcaagaatatgaaacaaggtaaagccgctggtttcacagaagatgaacatggaaccctatggaacggaaatcgtcgtgtcaaggcagagcatcaacggccggccggacttttccaacctctacaagtaccagaatggaaatgggatgaaattgggatggatttcatcaccggacttccaaaaacccaaggcggttatgactctatatgggtagttgtggacggactaaccaaggtagctcggttcattcccgtgaagaccacctatggagggaacaaactagctgaactctacttcgctaggattgtgagtctccatggcgttcctaagaaaattgtatctgatcggggaagccagttcacctctcatttctagaagaagctccaagaagagttgggtacccgcttaaatttcagcaccgcgtatcacccgcagacagatggacagaccgagcgtctaaatcagatcctagaagatatgcttcgcgcatgtgtcctagattttgggaagacaggggataagagtctcccctacgccgagttctcctacaataacagctaccaagccagcatacagatggcaccgtacgaagcgttgtatggccgcaaatgccggacaccgctattgtgggaccaagttggggaaagccaagtgttcgggaccgatatctttagagaagctgaagcgaaggtcaggaccattcgggagaatctaaaggtggcccagtctcggcagaagagttctgcagacaaccgacgccgtgacctggaattcgcagtggatgactttgtgtatctctgggtcacgccgttgcgaggtgtacaccggtttcagacgaaagggaagctcgcacctcggtttgtgggtcatttccgtatcattgctcgacgcggagaagtcgcttaccagttagagctgcccgcctccttgggcaacgtgcatgatgtgttccatgtgtcgcaactcaagaaatgccttcgagtgccgtccgagcaggccgactcagagcagattgaagttcgcgaagacttgacctacgtggagagaccggtgaaaatcctacacgccatggagcgcaggaccaggaaccgggtaatccgtttttgcaaggtccaatggagcaaccacgccgaggaagaagctacttgggagcgtgaagacgagctgaaggcagcccatctcgatctcttcgccagttcttccgaatctcggggtcgagattccgtt

SEQ ID NO: 14184 - DNA, 5376 bp, Oryza sativa
  Clone ID: TFbOSC400677j.C1.o1.fg
atgggttggaaactatgtcacgtcttccgtctgtataccgtggtgatggccggcagcgttacccgtcgtggtttgcacatgactggcttcgtcttggagctgcggggcatgtgcgtggtcttggggtatccacatggagtggattaccaggccaggccgctcccggagcaagagggtgaggatgcagagcctcacgctggttgggaggtcactgcagtgattctctccggctctcccgagcggacttcgctggcagtcaccgcgggtggggattccttccccgccgcttgccagaacgccgctctcctcgccatcggcacccttcaccagcgctacccggacgagttgcagcactcgccctaccgctaccaccctcgtcgcggaggagcccgcgactacgccaccttccgagacgccagctcggaggatgacgctaccgtcgtgcatctggcacgcatggtggaggcgtacgacgcggctcgtatcgacttccatcagatggtgcgccgtggcatggtggagaacaacatgaagatcctggagctgcgccaagagaatctgcagctcaagaaggacctcgacgcgttggaggcgcagctgcatcagctcaagatcgcccagggagaggacagccgtcccaagcgtcgccgcgtctgccgcagccagaagatcaccgcccgcaagagcacctccaggcccgagcttgttcgtcagtccctggcgtggacctgcttcgtcgagacccctcgtgccgagcctgcgcccgtggttccccaggagggggaagcctccggcgttggtagctcggaggttttaatcgtcagctctccttctctgtttgctggttctgtgaggggttttcagatggtgacgaccaggagaaatgttaacaccggtgaaggcaaccaacccgagggcagcaaccccaaccaccaaggcaatccacctccacctccgcctccaccaccaccaccagacaccaacgccattctcacccaaatcctcgcccagcaagctaacctgatgaatgctttcctccaccacctccaaaacccgccacaacacaatgctccaccaccccctccccaacactccaaactcgccgaattcctccgtatccgcccacccaccttctctagctccaacaaccccgtggatgcgttggattggttgcatgccgtggggaagaagttagacactgtgcagtgcagtgacgaagagaaagtcatcttcgccgcccatcagctgcaggggcccgcatctctatggtgggaccatttccaggccacgcagccagaagggcaacctattacttggactcgcttcaccgccgctttccggagaacccatgtgcccgccggagtcgtggctcttaagaaaagggaatttcgggagttgaagcaaggcaaccgctccgtgatggagtatttgcatgagttccacaatctagcccgttatgccccggaggatgtgcgggaagatgaggagaagcaagagaagttcttggcaggaatggaccctgagctgtccgttcgtctagtctcttgggactatcctgattttcaacgactggtggacaagagcatccgcttggaagccaagcacaaggagctggaatcgcacaagcgccgcttggcgaatttccgcaatcagcagggtgctaaccagagggtccgctacaccaatccctacccagggggatcctcctcacagcagcagcagcagcagcaacctcgctccgcgcctcgacctcaattcgtggtgcgcgtcccacagcagcaacagcagcagaatcagcaggggactcgtgcgccccgtcctcctacgccaactgtgcagcccgttcaaggccgcagggacgctcaaggtcagcagcgtctgtgcttcaactgcttcgagcccgggcactttgcggataaatgcccgaagccaaggcgtcagcaaggccaagcgcctccccgctccaacaacggcgggaaggatgtccttcggggccgtgtgaatcacgtgacggccgaggacgtgctgacaactccagacgtcatcgttggtacgttcctcgttcattccatccctgctaccattttgttcgactctggagcttcccactcgtttatatctgtgccattcgtggggaaaagtcagttgggggtagaaaggcttagaaaccctctgctcatcaccacccctggaggggttatgacagcaaagtactatagccctgccgtccctatagaaattcaggggattccttttccctcggatctgattctgctagacaccaagaatttggatgtgattcttgggatgaattggttggcccaattccaaggggtagtggattgcgcgagacgcactgtcactctgtaccgaggaccagagcaaccggttgttttctttgcacctccaacctctgtcagaagttcagaactgcatcagataggtctgtcagaaatccccatagtcagagagttcggagacgtgtttccggaagaactacctggtatgccgcccaagcgagagattgagttccggatagatcttgctccaggaaccactcctctgcacaagcgaccctaccgtatggcagcaaatgaactagccgaagtaaagacacagttggaagaattgaaagaagaggggtacatacgtccgagtacttccccatggggtgctcctgtgatctttgtagagaagaaagacaagacgaagaggatgtgcgttgactacagagctctcaatgaagtcaccatcaaaaacaagtaccctcttccccggatcgatgatctgttcgatcagcttaaaggtgccactgtattctccaagattgatcttcgttccggatatcaccaattacgtattcgtgaagaagatattccgaagaccgcattcactacgcgatacgggctgtatgaattcacggtgatgtcgttcggcttgaccaatgctcctgccttcttcatgaacttaatgaacaaagtgttcatggaatacttggacaagtttgttgtggttttcatcgatgacattctgatatactcacaatcagaggaagaccatcagcaccatctccgtctggtgttgggaaagttgcgggaacatcaattgtatgccaagcttagcaagtgtgagttctggttgtccgaagtcaaattcttaggacacgtgatatctgctaaaggagttgctgtggaccccgaaacagtgaccgccgtcaccgattggaagcaacccaagacagtcactcagattcgcagtttcttgggtttggcaggatactaccggaggttcatcgagaacttctccaaaatcgctcgacccatgacacagttgttgaagaaagaagagaagtttgtgtggagcccgcaatgcgagaaggcgttccaaactctcaaagaaaagctggtttcctcgccagtgttaatcttgccggatactcgcaaggatttcatggtgtactgtgatgcttcgcgccaaggattggggtgcgtgctcatgcaggacggtcatgtggtagcctatgcctcacgccagctacgacctcatgaaggcaactaccctacacatgacttggagttagcagcggtggttcatgctttaaaaatctggcggcactatctcattgggaaccgctgtgaaatatatactgatcataagagtttgaaatacatcttcacccagtcggatctgaatcttcggcaaaggagatggttagaactcatcaaggattatgatgtgggaattcactatcaccctggtaaggctaacgtggttgccgacgctctaagtcggaagagccattgcaatactctcaacgtccgaggcattccacccgagcttaatcaacagatggaagccctgaacctaaacatagttggtcgtggatttttggccgcgctagaagcccagcccaccttgctcgatcaaatccgcgaggctcagaagaatgatccggacatgcatggactcctcaagaatatgaaacagggtaaagccgctggtttcacagaggatgaacacggaaccttatggaacggaaagcgggtatgcgttccagatagcagagaacttaaacagctgatacttcaggaagctcacgaaagtccttattccattcacccgggcagtaccaagatgtacttagatttgaaggagaaatactggtgggtcagcatgaagcgggaaattgcagagtttgtggctctatgtgatgtgtgccagcgtgtcaaggcagaacaccaacgaccggccggacttctccaacctctccaagtgccagaatggaaatgggatgaaattgggatggatttcatcaccggccttccaaaaacccaaggtgggtatgattctatatgggtaatagtggatcgattaaccaaggtagctcgatttattcctgtgaagaccacctatggagggaataaactagcggagctctacttcgctaggatcgtgagtctccatggcgttcccaagaaaatcgtatctgataggggaagccaattcacctctcacttttggaagaagctccaagaagagctgggtactcgattgaatttcagcaccgcatatcacccgcagacagatggacagaccgagcgtctaaatcagatcctagaagatatgctccgcgcatgtgtcctggacttcgggaagacttgggataagagtctcccctatgccgagttctcctacaataacagctaccaagccagcatacaaagggcaccctatgaagcgttgtacgggcgcaaatgccggacaccgctattgtgggaccaagtcggagaaagccaagtgttcgggactgatatcctgagagaagctgaagctaaagtcagaatcattcgggataatctaaaggtggcacagtctcggcagaaaagttatgcagataaccgtcgccgtgatctggaattcgcagtgtatgactttgtgtatcttcgggtcacgccattgcgaggtgtgcacaggtttcagacaaaagggaagctcgcacctcggtatgtgggtcccatccgtatcactgctcgacgcggagaagtcgcctaccagctggagttgcccgcctccttgggcaacgtgcatgatgtgttccatgtgtcgcaactcaagaaatgtcttcgagtgccatccgagcaggccgactcagagcaaattgaagttcgcgaagacttgacctatgtggagaagccagtgaaaatcctggacgccatggagcgcaggaccaggaaccgagtaatccgtttttgcaaggtccagtggagcaaccacgccgaagaagaagctacttgggagcgcgaagacgagctgaaggcagcccatcccgatctcttcgccagttcttccgaatctcggggtcgagattccgtttaa

SEQ ID NO: 14185 - DNA, 5001 bp, Oryza sativa
  Clone ID: TFbOSC400702j.C1.o30.fg
atggacatctctagggcaaatgaaggctacacgagctgcggcccgatggccggcagcatcaaccgtcgtggtctggacctgactggtttcgttttggagctgcggggcatgtgcgttgtcttggggtatccgcatggagtggactaccagggcaagcagctcctggagcaggaagtgatcctcactggctcacccgagaggacttcgttggcagtcaccgcgggtggagattccttctccgccgcttgccagaacgccgcactcctcgccatcggcactcttcaccagcgctacccggacgagttgcagcactcgccctaccgctaccaccctcgtcgcggaggagcccgcgactacgccaccttccaagatgctagctcggaggatgacgctaccatcatgcacctggcgcgcatggtggaggcgtacgacgcggcccgtatcgacttccaccagatggtgcgccgtgggttggtcaagaacaacatgaagatcctggagctgcgtcaggagaatctgcagctgaagaaggacctagacgcggtggaggcgcagctgtgtcagctcaagatcgcccagggagagatggtgacaaccaggagaagtgctgctaccggtgatggcaaccaacccgaaggtagcaaccccaacatccaaggcggcccacctccacctcctcccccgcctccaccaccaccaccagacaccaactccatcctcacccaaatcctcgcccagcaggccaacatgatggctgctttcctccatcacatccaaaatccgccacagcataatgctccacctccaccaccacccccacaacactctaaactcgccgagctcctccgcatccgtccgcctaccttctctagctccaataaccccgtggatgctttggattggttgcatgccgtggggaaaaagttagacaccgtgcagtgcaacgatgaggagaaagtcatctttgccgctcaccaactgcaagggcccgcatctctatggtgggaccacttccaggctacgcagccagaggggcagcctattacttgggcccgcttcaccgccgctttccggaggacccatgtgcccgccggagtcatggcccttaagaaaagggaattccgagagttgaagcaaggcaaccgctctgtgatggagtatttgcatgggtttaacaacctggcccggtacgccccggaggatgttcgtgaagatgaggagaagcaagagaagttcttggcaagaatggaccctgagctgtccgtgcgtctggtctccggggactatccggatttccaacgtctggtggacaagagcatccgcttggaagccaagcacaaggaactggagtcgcagaagcgtcgcttggcgaatctccgcaatcaacagggggctaaccaaagggtccgctacaccaatccatatccagggggatcctcctcacagccgcagcaacagcagagtcagcaagggacccgtgtgccccgtcctcctgcgcccgttgtgcagcctggtcaaggccgcagagaagttcaaggtcagcagcgtctgtgcttcaactgcttcgagcccgggcactttgcggataaatgcccaaagccgaggcgccagcaaggccaagcgcctccccgccccaacaatggtggtaaggatgtcattcggggtcgtgtgaaccacgtgactgccgaggatgtgctgacaactccagacgtcatcgttggtacattcctcattcattccatccctgctaccattttgttcgactctggagcttcccactcgtttatatctgtgccattcgtggggagaaatcagttgggggtcgaaaggcttaggaaccctctgctcatcaccacccctagaggggttatgacagcaaagtattatagccctgccgtcccaatagaaatccagggaattccttttccctcggatctgattcttctagacactaagaacttggatgtgatccttgggatgaattggttggctgaattccaaggagtagtggattgcgcaagacgcactgtcactctgtaccgagggccggaacaaccggttgttttctttgcacccccaacttctatcggcagttcagaacttcatcagataggactgtcagaaatccccatcgtcagtgagttcggagatgtgtttccggaagaactacccggtatgccgcccaagcgagagattgagttccggatagatcttgctccaggaaccactcctctgtacaagcgactctaccgtatggcagcaaatgaactggccgaagtcaagaaacagttggaagagttgaaagaaaaggggtatatacggccgagcacttccccctggggtgctcccgtgatttttgtggaaaagaaggacaagacaaagaggatgtgtgttgactacagagctctcaatgaagttactatcaaaaacaagtaccctcttccccggattgatgatctgttcgatcagcttaaaggtgccactgtcttttctaaaatcgatcttcgttccggatatcaccaattgcgtattcgtgaagaggatatcccgaagaccgcattcaccacgcgatacggactgtatgaattcacggtaatgtcgttcggtctgaccaatgctcctgccttcttcatgaacttaatgaacaaagtgttcatggaatacttggataagtttgttgtggttttcattgatgacattttggtgtactcacaatcagaggaagaccatcagcagcatctccgtctggtgttgggaaagttgcgggaacatcaattgtatgccaagcttagcaagtgtgagttctggttgtccgaagtcaaattcttagggcacgtgatatctgctaaaggagttgctgtggaccccgaaacagtgaccgccgtcactgattggaagcaacccaagacagtcactcaggttcgcagctttttgggtttggcaggatactaccggaggttcatcgagaacttctccaaaatcgctcgacccatgacacagttgttgaagaaagaaaaaaaatttgtgtggagcccgcaatgcgagaaggcgttccaaactctcaaggaaaagctggtttcctcgccagttttaatcttaccggatactcgcaaggacttcatggtgtgctgtgatgcttcgcgccaaggattggggtgcgtgctcatgcaggaaggtcatgtggtagcctatgcctcacgccagctacgacatcatgaaggcaactaccctacccatgatttggagttggccgctgtggttcatgctctaaaaatctggcggcattatctcattgggaatcgctgcgaaatatataccgatcataagagtttgaaatacatcttcacccagtcggatctgaatcttcggcagagaagatggttagaactcatcaaggattatgatgtgggaatcctttatcaccctggtaaggccaacgtggtcgccgacgctctaagtcgaaaaagccgttgcaacactcttggcgtccgtggcattccaccggaacttcatcaacagatggaagccctgaacctaagcatagttggtcgtggattcttggctacactggaagccaagcctaccttgctcgatcaaatccgcgaggctcagaagaatgatccagatatgcatgggatcctcaagaatatgaaacaaggtaaagccgctggtttcacagaagatgaacatggaaccctatggaacggaagtcgtgtatgcgttccggacgacaaggaacttaaacagctgatagttcaggaagctcacgaaagtccttattccatccaccctggcagtacgaagatgtacttagacttgaaagggacatactggtgggttagtatgaagtgggaaattgcagagttcgtggccctttgtgatgtgtgccagcgtgtcaaggcagaaaacggccggccggacttctccaacctctacaagtaccagaatggaaatgggatgaaattgggatggatttcatcaccggacttccaaaaacccaaggcggtagctcggtttattcctgtgaagaccacctatggagggaacaaactagctgaactctacttcgctaggatcgtgagtctccatggcgttcctaagaaaattgtatctgatcggggaagccagttcacctctcatttctggaagaagctccaagaagagttgggtacccgcttaaatttcagcaccgcgtatcacccgcagacagatggacagaccgagcgtctaaatcagatcctagaagatatgctccgcgcatgtgtccaagattttaggaagacatgggataagagtctcccctacgccgagttctcctacaataacagctaccaagccagcatacagatggcactgtacgaagcgttgtatggccgcaaatgccggacaccactattgtgggaccaagttggggaaagccaagtgttcgggaccgatatcttgagagaagctgaagcgaaggtcaggaccattagggagaatttaaaggtggcccagtctcggcagaagagttatgcagacaaccgacgccgtgacctggaattcgcagtggatgactttgtgtatctccgggtcacgccgttgcgaggcgtacaccggtttcagacgaaagggaagctcgcacctcggtttgtgggtcctttccgtatcattgctcgacacggagaagtcgctaaccagctggagctgcctgcctccttgggcaacgtgcatgatgtgttccatgtgtcgcaactcaagaaatgccttcgagtgctgtccgagcaggccgactcagagcagattgaagttcgcgaatacttgacctacgtggagaggccagtgaaaatcctggacgccatggagcgcaggaccaggaaacgggtaatccgtttttgcaaggtccaatggagcaaccacgccgaggaagaagctacttgggagcgtgaagacgagctgaaggcagcccatcccgatctcttcgccagttcttccgaatctcggggtcgagattccgtttaa

SEQ ID NO: 14186 - DNA, 5436 bp, Oryza sativa
  Clone ID: TFbOSC400724j.C1.o17.gm
atgactggctttgtcttggagctgcggggcatgtgcgttgtcctggggtatccacatggagtggactaccaggccaggccgcttccggagcaggagggtgacgatgcagagccccacgctggttgggaggtcaccgcagtgatcctctctggctctcccgagcggacttcgctggcagtcaccgcgggtggagattctttccccgccgcttgccagaacgccgctctcctcgccatcggcactcttcaccagcgctacccggacgagttgcagcactcgccctaccgctaccaccctcgtcgcagaggagcccgcgaccacgccaccttccgggatgctagctcggaggatgacgctaccatcgtgcacctggcgcgcatggtggaggcgtacgacgcggctcgtatcgacttccatcagatggtgcgccgcgggatggtcgagaacaacttgaagatcctggagctgcgtcaggagaacctgcagctcaagaaggacctagacgcggtggaggcgcagctgcatcagctcaagatcgcccagggagaggtctgccgccccaagcgtcgccgcgtctgccgcagccagaagatcaccgcccgcaagagcacctccaggcccgagcttgttcgtcagtccctggagtggacttgcttcgtcgagacccctcgtaccgagcccgcgcccgtggttcctcaggagggggaagcctccggcgttggtagcacggaggatgcgctgttgctcaccttccgtcctggcccgtcgcagcggagaagtgctaacaccggtgatggcaaccaacccgaaggcagcaaccacaaccaccagggcaacccacccccacctcctcctccgcctccaccaccaccaccagataccaacgccattctcacccaaatcctcgcccagcaggccaacatgatgacggctttcctccaccacctccaaaatccgccacaacataatgctccaccaccacctccccaacactctaaactcgccgagttcctccgcatccgtccacccaccttctctagttccaacaaccccgtggatgcgttggattggttgcatgccgtggggaaaaagctagacactgtgcagtgcagcgatgaggagaaagtcatcttcgccgcccaccagctgcaggggcccgcatctctatggtgggaccatttccaggctacgcagccagaggggcagcctattacttgggctcgcttcaccgccgctttccggagaatccatgtacccgccggagtcgtggcccttaagaaaagggaattccgagagttgaagcaaggcaaccgctctgtgatggagtatttgcatgagttcaacaacctggcccgttatgccccggaggatgtgcgggaagatgaggagaagcaagagaagttcttggcaggaatggaccctgaactgtccgtccgtctagtctccggggactatccggatttccaacgtctggtggacaagagcatccgcttggaagccaagcacaaggaactggagtcgcacaagcgccgcttggcgaatttccgcaatcaacagggtgctaaccaaagggtccgctacaccaatccctatccagggggatcctcctcgcagcagcaacaacagcagcagcaacctcgctccgcgcctcgacctcaattcgtggtgcgcgtcccacagccgcagcagcagcagaatcaacaagggactcgtgcgccccgtcctcctacgccaactgtgcagcctggtcaaggccgcagggacactcaaggtcagcagcgtctgtgcttcaactgcttcgagcccgggcactttgcggataaatgcccgaagccgaggcgtcagcaaggccaagcgcctcctcgctccaacaacggtgggaaggatgtcattcggggtcgtgtgaaccatgtgacggccgaggacgtgctgacaactccagacgtcatcgttgggctgtcagaaatccccatagtcagagagttcggagacgtatttccggaagaactacctggtatgccgcccaagcgagagattgagttccggatagatcttgctccaggaaccactcctctgtacaagcgaccctaccgtatggcagcaaatgaactggccgaagtaaagaaacaattggaagagttgaaagaaaaggggtacatacgtccgagtacttccccctggggtgctcctgtgatttttgtggagaagaaagacaagacgaagaggatgtgcgttgactacagagctctcaatgaagtcaccatcaaaaacaagtaccctcttccccggatcgatgatctgttcgatcagcttaaaggtgccactgtattctccaagatcgatcttcgttccggatatcaccaattacgtattcgtgaagaagatattccgaagaccgcattcaccacgcgatacggactgtatgaattcacggtgaagtcgttcggtttaaccaatgcacctgccttcttcatgaacttaatgaacaaagtgttcatggaatacttggataagtttgttgtggttttcattgatgacattttgatatactcacaatccgaggaagaccatcggcaccatctccgtctggtgttgggaaagttgcgggaccatcaattgtatgccaaacttagcaagtgtgagttctggttgtccgaagtcaaattcttagggcacgtgatatctgctaaaggagttgctgtggaccccgaaacagtgaccgccgtcaccgattggaagcaacccaagacagtcactcaagtccgcagtttcttaggtttggcaggatactaccggaggtttatcgagaacttatccaaaatcgctctccccatgacacagttgttgaagaaagaagagaaatttgtgtggaacccgcaatgcgagaaggcgttcaaaactctcaaagaaaagctgggttcctcgccagtgttaatcttgccagatactcgcaaggattttatggtgtattgtgacgcttcgcgccaaggattggggtgcgtgctcatgcaggacggtcatgtggtggcctatgcctcacgccagctacggcctcatgaaggcaactaccctacccatgacttggaattagccgcggtggtgcatgctctaaaaatctggcggcactatctcattgggaatcgctgtgaaatatatactgatcataagagtttgaaatacatcttcacccagtcggatctgaatcttcggcaaaggagatggctagaactcatcaaggattatgatgtgggaattcactatcatcctggtaaggccaacgtggtcgccgacgctctaagtcgaaaaagccattgcaacactcttaacgtccgtggcatcccacccgaacttaatcaacagatggaagccctgaacctaagcatagttggtcgcagattcttggctacgctggaagccaagcccaccttgctcgatcaaatccgcgaggctcagaagaacgacccggacatgcatggactcctcaagaatatgaaacagggtaaagccgctggtttcacagaggatgaacacggaaccctatggaacggaaatcgggtatgcgttccagataacagagaacttaaacagctgatacttcaggaagctcacgagagcccttattccattcacccgggcagtacaaagatcgtgtcaaggcagagcaccaacgaccggccggacttctccaacctctccaagtaccagaatggaaatgggatgaaattgggatggatttcatcaccggacttccaaaaacccaaggcggatatgattctatatggcaccgcgtatcacccgcagacagatggacagaccgagcgtctaaatcagatcctaaaagatatgcttcgcgcatgtgtcttagatttcgggaagacctgggataagagtctcccctatgccgagttctcctacaataacagttatcaagccagcatacaaatggcaccttatgaagcgttgtacgggcgcaaatgccggacaccactattgtgggaccaagttggagaaagccaagtgttcgggactgatatcctgagagaagctgaagctaaagtcagaaccattcgggataatctaaaggtggcccagtctcggcagaaaagttatgcggataaccgacgccgtgatctggaattcgcagtggatgactttgtgtatcttcgggtcacgccattgcgaggtgtacacaggtttcagacaaaggggaagctcgcacctcggtatgtgggtcctttccgtatcattgctcggcgcggaggagtcgcttaccagctggagctgcccgcctccttgggcaacgtgcatgatgtgttccatgtgtcgcaactcaagaaatgtcttcgagtgccatccgagcaggccgactcagagcaaattgaagttcgcgaagatttgacctatgtggagaggccagtgaaaatcctggacaccatggagcgcaggaccaggaaccgggtaatccgtttttgcaaggtccagtggaacaaccacgccgaagaagaagctacctggaagcgtgaagacgagctgaaggcagcccaccccgatctcttcgccacacctcggccatataaggaccggtcttcgggcctctgttgcaaagcactaccgtacttccacatgtctagtggggcaaatgaaggctacacgagctgcggcccggtagtcgagatgtcatggcacagggccggtgtcctgctgctaggggctcagtcctgcctgcctgtcccgggggttccggccgtaggtgggattgggtcgcgtgactccggcccctgcaccttgaaggttgagggagccatcgaagtgcataacccagtgcccggcgcgaatgtcggcgtttgggtttcctccgtctccggggaggaagggaacattggacggaacatggtcgaactcagcgagctcgatggcccactttacgacccgaccggtaccctcttgattgtgcaagatttggccgagaggggttcacggtggacctggtgcacggcggcagctcacggaaacgaacggccgagatcgatcctatccacaacgaacggccaagatctaacggtctacgaccggtctacgacggacgacaacgatgacgtcggcgatgacgtcatcaccggcggcggctcgggcggcaagctcgccggcgaacgacggtgcgacgacgcgaacggaggacaccaactcgtagatggcaatgcggcgaacttaccggtgaccaaaacaacggcggaagatcaacggcgtcgaggaagaagcggcggcaaccttcggcttaacgacgacggcggtgctccggcgacctacggcgacggcggaggggtggacgagatcggtgacggcttggtgaccacgaaggcgacctccccgagcagcgacgacgactggagcgacggcggcgcacggatggagctgcggcggcgacggcggcgctag

SEQ ID NO: 14187 - DNA, 6053 bp, Oryza sativa
  Clone ID: TFbOSC400738j.C1.o8.np
atggcggccggacctcccgcgccggtttccttcccctccggccgctctctcccccttccaaccctatttaaaccctccccgcacctcctccgtccgtttccgcctctcgccgcccttcctcctcgccggattcgagctcgcgacgtcgctctctctctctctccaccgtcgccgccaagctccggtccgccgccgtcgtcgccccggaccgcctcccacctcggcgccgcctccttcaggttcgccgcatcctcgccaacctcgtccacctctccgtttcggtcgccgaccgccggaacgccgttgaccccgtcgacccgagccgcgccgccacctccctctgctccggccgcctcctccgtcgccaccgtcgccccggggtgagccgtggaccatcgcctcctttcccccttccctcccctctctcggctgccgctccgccgcgccggtggtcgccggcggcgaccatcggggcgtgggcgcgccgcctcccgccgaccgcgccggcgtggccgccctcgggcgcgccgagtggctgccgcgtggggcccggccgtcagccgcccgcgccctcgggtgcggctgacgtgtggggcctacggcgccggccggtgcgagcccgggtgcatccggtccaccgtggacccacctcggccatataaggaccggtcttcgggcctctgttgcaaagcactaccgtacttccacatgtctagtgggacaaatgaaggctacacgagctgcggcccggtagtcgagatgtcatggcacagggccggtgtcctgctactaggggctcagtcctgcctacctgtcccgggggttccggccgtaggtggggttgggtcgatgtacacctctgatcagagtataatctattcgaatagccgcgccctcggttatgggcaagccaagcaatgtacccaaatggccggcagcatcaaccgtcgtggtctggacctgactggcttcgttttggagctgcggggcatgtgcgttgtcctggggtatccgcatggagtagactaccagggcaagcagctcccggagcaggagggtgacgatgcagagccccacgctgcttgggaggttactgcagtgatcctcactggctcacccgagaggacttcgttggcagtcaccgcgggtggagattccttctccgccgcttgccagaacgccgcactcctcgccatcggcactcttcaccagcgctacccggacgagttgcagcactcgccctaccgctaccaccctcgccgcggaggagcccgcgactacgccaccttccgggatgctagctcggaggatgacgctaccatcatgcacctggcgcgcatggtggaggcgtacgacgcggcccgtatcgacttccatcagatggtgcgtcgcgggttggtcgagaacaacatgaagatcctggagctgcgtcaggagaatctgcagctggagaaggacctatacgcagtggaggcgcagctgcgtcagctcaagatcgcccagggagaggtctgtcgcctcaagcgccttcgggtctaccgcagcttgaagctccccgcccagcaagagtacctccaggcccgagcttgttcgtcagtccctggcgtggacctgcttcgtcgagacccctcgtgccgagctcgcgcccgtggttcctcaggaggatggagcctccggcgttggcagcacggaggatgcgctgttgctcaccttccatggtgacgaccaggagacgtgctaataccggtgatggcaatcaacccgaaggtagcaaccacaacaaccatggcagcccacctccacctcctcctccgcctccaccaccaccaccagacaccaacgccatcctcacccaaatcctcgcccagcaggccaacatgatgcctgctttcctccaccacatccaaaatccgccacaacataatgctccaccaccgcccccacaacactctaaactcgtcgagttcctccgcatccgtccgcctaccttctctagctccaataaccccgtggatgcattggattggttgcatgccgtggggaaaaagttagacaccgtgcagtgcagcgatgaggagaaagtcatcttcgccgcccaccaattgcaggggcccgcatctctatggtgggaccatttccaggctacgcagccagaagggcagccttttacttgggcccgcttcaccgccgctttccggagaacccatgtgcccgctgaagtcatggcccttaagaaaagggaattccgagagttgaaacaaggcaaccgctctgtgatggagtatttgcatgagtttaacaacctggcccgatacgccccggaggatgttcgtgaagataaggagaagcaagagaagttcttggcaggaatggaccctgagctgtccatgcgtctggtctccggggactatccggatttccagcgtttggttgacaagagcatccgcttggaagccaagcacaagaaactggagtcgcacaagcgttgcttggcgaatttccgcaatcaacagggggctaaccaaagggtccgctacaccaatccctatctagggggatcgtcctcgcagcagcaacagcagcagcaacctcgctccgcgccccgacctcatttcgtggtgcgcgtcccacagccgcagcaacagcagagtcagcaagggactcgtgcgccccgtcctcctacgccagccgtgcagcctggtcaaggccgcagggacgttcaaggtcagcagcgtctgtgcttcaactgcttcgagcctgggcactttgcggataaatgcccaaagccgaggcgccagcaaggccaaccgcctccccgccccaacaacgatggtaaggatgtcatttggggtcgggtgaaccacgtgacggccgaggatgtgctgacaactccaaacgtcatcgttggtacgttcctcattcattccatccctactaccattttgttcgactctggagcttcccactcgtttatatctgtgccattcgtggggagaaatcagttgggggtagaaaggcttaggaactctctgctcatcaccacccctagaggggttatgacagcaaagtattatagccctgccgttcctatagaaattcagggaattccttttccctcggatctgattcttctagacaccaagaacttggatgtgatccttgggatgaattggttggctcaattccaaggagtagtggattgtgcaagacgcactgtcactctgtaccgagggccggaacaaccggttgttttctttgctcccccaacctctgtcggtagttccgaacttcatcagataggactgtcagaaatccccatcgtcagagagttcggagacgtgtttccggaagaactacccggtatgccgccgaagcgagagattgagttccggatagatcttgctccaggaaccactcccctgtacaagcgaccctaccgtatggcatcaaatgaactggccgaagtcaagaaacagttggaagagttgaaagaaaaggggtatatacggccgagtacttccccctagggtgctcctgtgatttttgtttagaaggaagacaagacaaagaggatgtgcattgactacagagctctcaatgaagttaccatcaaaaacaagtaccctcttccccggatcgatgatctgttcgattagcttaaaggtgccactgtattctccaagattgatcttcgttccggatatcaccaattgcgtattcgtgaagaagatatccctaagaccgcattcaccacgcgatacggactgtatgaattcacggtgatgtcgttcggtttaaccaatgctcctaccttcttcatgaacttaatgaacaaagtgttcatggaatatttggataagtttgttgtggttttcattgacgacattctggtgtactcacaatcagaggaagaccatcagcaccatctccgtctggtgttgggaaagttgcgggaacatcaattgtatgccaagcttagcaagtgtgagttctggttgtccgaagtcaaattcttagggcacgtgatatctgctaaaggagttgctgtggaccccgaaacagtgaccgccgtcactggttggaagcaatccaagacagtcactcaaattcgcagcttcttgggtttggcaggatactatcggaggttcatcgagaacttctccaaaatcgctcgacccatgacacagttgttgaagaaagaagagaaatttgtgtggagcccgcaatgcgagaaggcgttccaaactctcaaggaaaagctggtttcctcgccagttttaatcttaccggatactcgcaaggacttcatggtgtattgtgacgctttgcgccaaggattggggtgcgtgctcatgcaggaaggtcatgtggtagcctatgcctcacgccagctacggccccatgaaggcaactaccctacccatgatttggagttagccgctgtggttcatgctctaaagatctggcggcactatctcattgggaatcgctgtgaaatatatactgatcataagagtttgaaatacatcttcactcagtcggatctgaatcttcggcagaggagatggttagaactcatcaaggattatgatgtgggaattcactatcatcctggtaaggccaacgtggtcgctaacgctctaagtcgaaaaagccattgcaacactcttgacgtccgtggcattccacccgaacttaatcaacagatggaagccctgaacctaagcatagttggtcgtggattcttggctacgctggaagccaagcctaccttgctcgatcaaatccgcgaggctcagaagaatgatccggatatgcgtggactcctcaagaatatgaaacagggtaaagccgctggtttcacagaggatgaacacggaaccctatggaacggaaatcggcgtgtcaaggcagagcaccaacgaccggccggacttctccaacctctccaagtaccagaatggaaatgggatgaaattgggatggatttcatcaccggacttccaaaaacccaaggcggatataattctatatgggtagttgtggaccgactaaccaaggtagctcggtttattcctgtgaagaccacctatggagggaacaaactagccgagctctacttcgctaggatcgtgagtctccatggcgttcctaagaaaattgtatctgataggggaagccaattcacctctcacttttggaagaagctccaagaagagctgcgtacccgattaaatttcagcaccgcgtatcacccgcagacagatggacagaccgagcgtctaaatcagatcctagaagatatgcttcgcgcatgtgtcctagattttgggaagacctgggataagagtctcccctatgccgagttctcctacaataacagctatcaagccagcatacaaatggcaccctatgaagcgttgtatggacgcaaatgccggacaccactattgtgggaccaagttggggaaagccaagtgttcgggactgatatcctgagagaagctgaagctaaagtcagaaccattcgggataatctaaaggtggcacagtcccggcagaagagttatgcagataaccgacgctgtaatctggaattcgcagtggacgattttgtgtaccttcgggtcacgccattgcgaggtgtacacaggtttcagacgaaagggaagctcgcacctcggtttgtgggtcctttccgtatcattgctcgacgcggggaagtcgcttaccagttggagctgcccgcctccttgggcaacgtgcatgatgtgttccatgtgtcgcaactcaagaaatgtcttcgagtgccatccgagcaggccgattcagagcaaattgaagttcgcgaagacttgacctacgtggagaggccagtgaaaatcctggacaccatggagcgcaggaccaggaaccgggtaatccgtttttgcaaggtccaatggagcaaccacgctgaggaagaagctacttggtagcgtgaagacgagatgaaagcagcccatcccgatctcttcgccagttcttccgaatctcggggtcgagattccgtt

SEQ ID NO: 14188 - DNA, 5388 bp, Oryza sativa
  Clone ID: TFbOSC400773j.C1.o37.fg
atggatgaagtcgggggtcgatggacattctccagggcaaatgaaggctacacgagctgcggcccgatggccggcagcgttacccgtcgtggtttggacatgactggcttcgtcttggagctgcgaggcatgtgcgtggtcttggggtatccacatggagtggattaccaggccaggccgctcccggagcaggagggtgaggatgcagagcctcacgctggttgggaggtcactgcagtgatcctctccggctctcccgagcggacttcgctggcagtcaccgcgggtggggattccttccccgccgcttgccagaacgccgctctcctcgccatcggcacccttcaccagcgctacccggacgagttgcagcactcgccctaccgctaccaccctcgtcgcggaggagcccgcgactacgccaccttccgagacgccagctcggaggatgacgctaccgtcgtgcatctggcacgcatggtggaggcgtacgacgcggctcgtatcgacttccaccagatggtgcgtcgtggcatggtggagaacaacatgaagatcctggagctgcgtcaggagaacctgcagctcaagaaggacctcgacgcgttggaggcgcagctgcatcagctcaagatcgcccagggagaggacagccgtcccaagcgtcgccgcgtctgccgcagccagaagatcaccgcccgcaagagcacctccaggcccgagcttgttcgtcagtccctggcgtggacctgcttcgtcgagacccctcgtgccgagcctgcgcccgtgattccccaggagggggaagcctccggcgttggtagcacggaggttttaatcgtcagctctccttctctgtttgctggttctgtgtggggttttcagatggtgacgaccaggagaaatgttaacaccggtgaaggcaaccaacccgagggcagcaaccccaaccaccaaggcaatccacctccaccaccaccaccagacaccaacgccattctcacccaaatcctcgcccagcaagccaacatgatgaatgctttcctccaccaccttcaaaacccgccacaacagaatgctcccccaccacccccacaacactctaaactcgccgagttcctccgcatccgcccacccaccttctctagctccaacaaccctgtggatgcgttggattggttgcatgccgtggggaagaagctggacacggtgcagtgcagtgacgaagagaaagtcgtcttcgccgcccatcagctgcagggacccgcatctctctggtgggaccacttccaggctacgcagccagagggacagccgatcacttggactcgcttcaccgccgctttccggagaacccatgtgcccgctggagtcgtggctcttaagaaaagggaatttcgggagttgaagcaaggcaaccgctccgtgatggagtatttgcatgagttcaacaatctagcccgttatgccccggaggatgtgcgggaagatgaggagaagcaagagaagttcttggcaggaatggaccctgagctgtctgttcgtctagtctctggagactacccggacttccaacgtctggtggacaagagcatccgcttggaagccaagcacaaggagctggaatcgcacaagcgccgcttggcgaatttccgcaatcagcagggtgctaaccagagggtccgctacaccaatccctacccagggggatcctcctcgcagcagcagcagcagcaacagcaacctcgctccgcgcctcgacctcaattcgtggtgcgcgtcccacagcagcaacagcagcagaatcagcaagggactcgtgcgccacgtcctcctacgccaactgtgcagcctgttcaaggtcgcagggacgcttcaggtccgcagcgtctgtgcttcaactgcttcgagcccgggcactttgcggataaatgcccaaagccaaggcgtcagcaaggccaagcgcctccccgctccaaaaacggcgggaaggatgtcattcggggtcgtgtgaatcacgtgacggccgaggacgtgctgacaactccagacgtcatcgttggtacgttcctcgttcattccatccctgctactattttgttcgactctggagcttcccactcgtttatatctgtgccattcgtggggagaaatcagttgggggtagaaaggcttagaaaccctctgctcatcaccacccctggaggggttatgacagcaaagtactatagccctgccgtccctatagaaattcaggggattccttttccctcggatctgattctgctagacaccaagaatttggatgtgatccttgggatgaattggttggcccaattccaaggggtagtggattgcgcgagacgcactgtcactctgtaccgaggaccagagcaaccggttgttttctttgcacccccaacctctgtcagaagttcagaacttcatcagataggtctgtcagaaatccccatagtcagagagttcggagacgtgtttccggaagaactacctggtatgccgcccaagcgagagattgagttccggatagatcttgctccaggaaccgctcctctgtacaagcgaccctaccgtatggcagcaaatgaactggccgaagtaaagaaacagttggaagagttgaaagaaaaggggtacatacgtccgagtacttccccatggggtgctcttgtgatttttgtagagaagaaagacaagacgaagaggatgtgcgttgactacagagctctcaatgaagttaccatcaagaacaagtaccctcttcctcggatcgatgatctgttcgatcagcttaaaggtgccactgtattctccaagattgatcttcgttccggatatcaccaattacgtattcgggaagaagatattccgaagaccgcattcactacgcgatatggactgtatgaattcacggtgatgtcgttcggcttaaccaatgctcctgccttcttcatgaacttgatgaacaaagtgttcatggaatacttggataagttcgttgtggttttcatcgatgacattctgatatactcacaatcagaggaagaccatcagcaccatctccgtctggtgttgggaaagttgcgggaacatcaattgtatgccaagcttagcaagtgtgagttctggttgtccgaagtcaaattcttaggacacgtgatatctgctaaaggagttgctgtggaccccgaaacagtgaccgccgtcaccgattggaagcaacccaagacagtcactcagattcgcagtttcttgggtttggcaggatactaccggagattcatcgagaacttctccaaaatcgctcgacccatgacacagttgttgaagaaagaagagaaatttgtgtggagcccgcaatgcgagaaggcgttccaaactctcaaagaaaagctggtttcctcgccagtgttaatcttgccggatactcgcaaggatttcatggtgtactgtgatgcttcgcgccaaggattggggtgcgtgctcatgcaagacggtcacgtggtagcctatgcctcacgccagctacgacctcatgaaggcaactaccctacacatgacttggagttagcagcggtggttcatgctctaaaaatctggcggcactatctcattgggaaccgctgtgaaatatatactgatcacaagagcttgaaatacatcttcacccagtcggatctgaatcttcggcaaaggagatggttagaactcatcaaggattatgatgtgggaattcactatcaccctggtaaggctaacgtggttgccgacgctctaagtcggaagagccattgcaatactctcaacgtccgtagcattccgcccgagcttaatcaacagatggaagccctgaacctaagcatagttggtcgcggattcttggctgcgttggaagccaagcctaccttgttcgatcaaatccgcgaggctcagaagaatgatccggacatgcatggactcctcaagaatatgaaacagggtaaagccgcaggtttcacagaggatgaacacggaaccttatggaacggaaagcgggtatgcgttcccgataacagagaacttaaacagctgatacttcaggaagctcacgaaagtccttattccattcacccgggcagtaccaagatgtacttagacttgaaggagaaatactggtgggtcagcatgaagcgggaaattgcagagtttgtggctctatgtgatgtgtgccagcgtgtcaaggcagaacaccaacgaccggccggacttctccaacctctccaagtgccagaatggaagtgggatgaaattgggatggatttcatcaccggacttccaaaaacccaaggtggatatgattctatatgggtaattgtggatcgactaacaaaggtagctcgattcattcctgtgaagaccacttatggagggaacaaactagcggagctctacttcgctaggatcgtgagtctccatggcgttcccaagaaaatcgtatctgataggggaagccaattcacctctcacttttggaagaagctccaagaagagcttggtacccgactaaatttcagcaccgcatatcacccgcagacagatggacagaccgagcgtctaaatcagatcctagaagatatgctccgcgcatgtgtcctagatttcgggaagacctgggataagagtctcccctatgccgagttctcctacaataacagctatcaagccagcatacaaatggcaccatatgaagcgttgtacgggcgcaaatgccggacaccgctcctgtgggaccaagttggggaaagccaagtgttcgggactgatatcctgagagaagctgaagctaaagtcagaatcattcgggataacttaaaggtggcacagtctcggcagaaaagttatgccgataaccgtcgccgtgatctggaatttgcagtggatgactttgtgtatcttcgggtcacgccattgcgaggtgtgcacaggtttcagacaaaagggaagcttgcacctcggtatgtgggtcccttccgtatcatcgctcgacgcggagaagtcgcttaccagctggagttgcccgcctccttgggcaacgtgcatgatgtgttccatgtgtcgcaactcaagaaatgtctccgagtgccatccgagcaggccaactcagagcaaattgaagttcgcgaagacctgacgtatgtggagaagccagtgaaaatcctggacaccatggagcgcaggaccaggaaccgggtaatccgtttttgcaaggtccagtggagcaactacgccgaagaagaagctacttgggagcgcgaagacgagctgaaggcagcccatcccgatctcttcgccagttcttccgaatctcggggtcgagattccgtttaa

SEQ ID NO: 14189 - DNA, 6050 bp, Oryza sativa
  Clone ID: TFbOSC400834j.C1.o6.np
aatggagccgagatctccgcggccgtttcctccctctccggccgcgctctccccctctcggcgctatatatttgctccccgtgcctctctcctccgtttccgccgctcgccgctcgctctcgccgtcggattcgtgctagcgccgtcctcctctctctccgccgtcgccgccaaccttcggttcgccgccgtcgtcgctccggacttcctcccgactcggcgccacctccatcggcttcgccgcgtcgtcgtcgaccccgtccgctcctccgtttcgcccgccgaccgccggagcaccgtcgccctcgtcatcccgaaccgcgccgccgcctctcgccgcttcggtcgtcgtttccgccgccctcgtcgtcccggggtgagccgaggaccgccgttcgctttccctcttctctccgctctctcgggcgccgctccgccgcgccggtggtcgccggcggtgaccatcggggagcgggtgcgccgcctcccgtcggccgtgccggcgaggccgccttcggccgcctcccgcggctgccaggtggggcccggccgtcagccgcccgcgcccgcgggtgcggctgacgcgtgggacccacggcgccgaccgccgccagccgcgtgctcccggtccaccgtggacccacctcggccatataaggaccggtcttcgggcctctgttgcaaagcactaccgtacttccacatgtctagtggggcaaatgaaggctacacgagctgcggcccggtagtcgagatgtcatggcagagggttggtgccctgctgctaggggctcagtcctgcctgcctgtcccggaggttccggccgtaggcgggattgggtcgatgtacacctctgatcagagtttaatctattcgaatagccgcgccctcggttatgggcaagccgagcaatgtacccaaatggccggcagcgtcacccgtcgtggtttgcacatgactggcttcgtcttggagctgcggggcatgtgcgtggtcttggggtatccacatggagtggattaccaggccaggccgctcccggagcaggagggtgaggatgcagagccccacgctggttgggaggtcactgcagtgatcctctctggctctcccgagcggacttcgctggcagtcaccgcgggtggagattccttccccgccgcttgccagaacgccgccctcctcgccatcggcacccttcaccagcgctacccggacgagttgcagcactcgccctaccgctaccaccctcgtcgcggaggagcccgcgacttcgccaccttccgggatgctagctcggaggatgacgctaccatcgtgcacctggcacgcatggtggaggcgtacgacgcggctcgtatcgacttccatcagatggtgcgccgcggtatggtcgagaacaacatgaagatcctggagctgcggcaggagaacctgcagctcaagaaggacctcgacgcggtggaggcgcagctgcatcagctcaagatcgcccagggagaggtctgccgccccaagcgtcgccgcgtctgccgcagccagaagatcaccgcccgcaagagcacctccaggcctgagcttgttcgtcagtccctggcgtggacctgcttcgtcgagacccctcgtgccgagcccgcgcccgtggttccccaggagggggaagcctccggcgttggtagcacggaggatgcgctgttgctcaccttccatggtgacgaccaggagaaatgctgttaccggtgatggcaatcaacctgaaggcagcaaccacaaccaccagggcaacccacctccacctcctcctccgcctccgccaccaccaccagacaccaacgccattctcacccaaatcctcgcccagcaagccaacatgatgactactttcctccaccacctccaaaatccgccacaacagaatgctccacctccacctccccaacactctaaactcgccgagttcctccgcatccgcccacctaccttctctagctccaacaaccccgtggatgcgttggattggttgcatgccgtggggaagaagctggacactgtgcagtgcagtgatgaagagaaagtcatcttcgccgcccaccagctgcagggacccgcatctctatggtgggaccacttccaagctacgcagccagagggacagcctattacatgggctcgcttcaccgccgctttccggagaacccatgtgctcgccggagtcgtggccctcaagaaaagggaattccgagagttgaagcaaggcaaccgctccgtgatggagtatttgcatgagttcaacaacctggcccgttacgctccggaggatgtgcgggaagatgaggagaagcaagagaagttcctggcaggaatggaccccgagctgtccgtccgtctagtctctggggactatccggatttccaacgtctggtggacaagagcatccgcttggaagccaagcacaaggaactggagtcgcacaagcgccgcttggcgaatttccgcaatcaacagggtgctaaccaaagggtccgctacaccaatccctatccagggggatcctcctcgcagcagcaacaacagcagcagcaacctcgctccgcgcctcgacctcaattcgtggtgcgcgtcccacagccgcagcagcagcagaatcaacaagggactcgtgcgccccgtcctcctacgccagccgtgcagcctggtcaaggccacagggacgctcaaggtcagcagcgtctgtgcttcaactgctttgagcccgggcactttgcggataaatgcccgaagccaaggcgtcagcaaggccaagcgcctccccgctccaacaacggtggcaaggacgtcattcggggtcgtgtgaatcacgtgacggccgaggacgtgctgacaactccagacgtcatcgttggtacgttcctcgttcattccatccctgctaccattttgttcgactctggagcttcccactcgtttatatctgtgccattcgtggggagaaatcagttgggggtagaaaggcttaggaaccctctgctcatcaccacccctggaggggttatgacagcaaagtattatagccctgccgtccctatagaaattcaggggattccttttccctcggatctgattctgctagacaccaagaagttggatgtgatccttgggatgaattggttggctcaattccaaggagtagtggtttgcgcgagacgcactgtcactctgtaccgagggccggaacaaccggttgttttctttgcacccccagcctctgtcagaagttcagaacttcatcagataggactgtcagaaatccccatagtcagggagttcggagacgtgtttccggaagaactacctggtatgccgcccaagcgagagattgagttccggatagatcttgctccaggaaccactcctctgtacaagcgaccctatcgtatggcagcgaatgaactggccgaagtcaagaaacagttggaagagttgaaagaaaaggggtatatacgtccgagtacttccccatggggtgctcctgtgatttttgtagagaagaaagacaagacgaagaggatgtgcgtcgactacagagctctcaatgaagtcaccatcaaaaacaagtaccctcttccccggatcgatgacctgttcgatcaacttaaaggtgccactgtattctccaagattgatcttcgttccggatatcaccaattacgtatccgtgaggaagatattccgaagactgcattcaccacgcgatacgggctgtatgaattcacggtgatgtcgttcggcttgaccaatgctcctgccttcttcatgaacttaatgaacaaagtgttcatggaatacttggataagtttgttgtggttttcattgatgacattctgatatactcacaatcagaagaagaccatcagcaccatctccgtctggtgttgggaaagttgcgggaacatcaattgtatgccaagcttagcaagtgtgagttctggttgtccgaagtcaaattcttagggcacgtgatatctgctaaaggagttgctgtggatcccgaaacagtgaccgccgtcaccgattggaagcaacccaagacagtcactcaaattcgcagtttcttaggtttggcaggatactaccggaggttcatcgagaacttctccaaaatcgctcgacccatgacacagttgttgaagaaagaagagaaatttgtgtggagcccgcaatgcgagaaggcgtttcaaactctcaaggaaaagctggtttcctcgccggtgttaatcttgccggatactcgcaaggacttcatggtgtattgtgacgcttcgcgccaaggattggggtgcgtgctcatgcaggacggtcatgtggtagcctatgcctctcgccagcttcggcctcatgaaggcaattaccctacccatgatttggagttagccgctgtggttcatgctctaaaaatctggcggcactatctcattgggaatcgctgtgaaatatataccgatcataagagcttgaaatacatcttcacccagtcggatctgaatcttcggcaaaggagatggttagaactcatcaaggattatgatgtgggaattcactatcatcctggtaaggccaacgtggttgccgacgctctaagtcgaaagagtcattgcaacactcttaacgtccgtggcattccacccgaacttagtcaacaaatggaagccctgaacctaagcatagttggtcgtggattcttggctgcgttggaagccaagcctaccttgctcgatcaaatccgtgaggctcagaagaatgatccggacatgcatggactcctcaagaatatgaaacagggtaaagccgctggtttcacagaggatgaacacggaaccctatggaacggaaatcggcgtgtcaaggcagagcaccagcgaccggccggactcctccaacctctccaagtgccagaatggaaatgggatgaaattgggatggatttcatcaccggacttccaaaaacccaaggcggatatgattctatatgggtagttgtggatcggttaaccaaggtggctcgattcattcctgtgaagaccacctatggagggaacaaactagcggagctctacttcgctaggatcgtgagtctccatggtattcccaagaaaatcgtatctgataggggaagccaattcacctctcacttttggaagaagctccaagaagagcttggtacccgattaaatttcagcaccgcgtaccacccgcagacagatggatagaccgagcgtctaaatcagatcctagaagatatgcttcgcgcatgtgtcctagatttcgggaagacctgggataagagtctcccctatgccgagttctcctacaataacagttatcaagccagcatacaaatggcaccttatgaagcgttgtacgggcgcaaatgccggacaccgctattgtgggaccaagttggagaaagccaagtgttcgggactgatatcctgagagaagctgaagctaaagttagaaccattcgggataatctaaaggtggcccagtcccggcagaaaagttatgcagataaccgtcgccgtgacctggaattcgcagtggatgattttgtgtaccttcgggtcacgccattgcgaggagtacataggttccagacaaaagggaagctcgcacctcggtatgtgggtcctttccgtatcattgctcggcgcggagaagtcgcttaccagttggagctgcccgcctccttgggcaacgtgcatgatgtgttccatgtgtcacaactcaagaaatgtcttcgagtgccatccgagcaggccgactcagagcaaattgaagttcgcgaagatttgacctacgtggagaggccagtgaaaatcctggacaccatggagcgcaggaccaggaaccgggtaatccgtttttgcaaggtccagtggagcaaccacgccgaagaagaagctacttgggagcgtgaagacgagctgaaggcagcccatcccgatctcttcgccagttcttccgaatctcggggtcgagattccgtt

SEQ ID NO: 14190 - DNA, 5418 bp, Oryza sativa
  Clone ID: TFbOSC400948j.C1.o3.fg
atggatgaagtcgggcgtcgatggacattctccagggcaaatgaaggctacacgagctgcggcccgatggccggcagcgttacccgtcgtggtttggacatgactggcttcgtcttggagctgcggggcatgtgcgtggtcttggggtatccacatggagtggattaccaggccaggccgctcccggagcaggagggtgaggatgcagagcctcacgctggttgggaggtcactgcagtgatcctctccggctctcccgagcggacttcgctggcagtcaccgcgggtggggattccttccccgccgcttgccagaacgccgctctcctcgccatcggcacccttcaccagcgctacccggacgagttgcagcactcgccctaccgctaccaccctcgtcgcggaggagcccgcgactacgccaccttccgagacgccagctcggagcatgacgctaccgtcgtgcatctggcacgcatggtggaggcatacgacgcagctcgtattgacttccatcagatggtgcgccgtggcatggtggagaacaacatgaagatcctggagctgcgccaagagaatttgcagctcaagaaggacctcgacgcgttggaggcgcagctgcatcagctcaagatcgcccagggagaggacagccgtcccaagcgtcgccgcgtctgccgcagccagaagatcaccgcccgcaagagcacctccaggcccgagcttgttcgtcagtccctggcgtggacctgcttcgtcgagacccctcgtgccgagcctgcgcccgtggttcctcaggagggggaagcctccggcgttggtagctcggagggtgcgctgttgctcaccttccgtcctggcccgtcgcagcgctctccttctctgtttgctggttctgtgtggggttttcagatggtgacgaccaggagaaatgttaacaccggtgaaggcaaccaacccgagggcagcaaccccaacccccaaggcaacccacctccaccaccaccaccagacaccaacgccattctcacccaaatcctcgcccagcaagccaacatgatgaatgctttcctccaccacctccaaaatccgccacaacagaatgctccaccaccccctccccaacactccaaactcgccgaattcctccgcatccgcccacccaccttctctagctccaacaatcccgtagatgcgttggattggttgcatgccgtggggaaaaagctagacacggtgcagtgcagcgatgaggagaaagtcgtcttcgccgcccatcagctgcaggggcccgcatctctctggtgggaccacttccaggctacgcagccagaagggcaacctattacttggactcgcttcaccgccgctttccggaaaacccatgtgcccgccggagtcgtggctcttaagaaaagggaattccgagagttgaagcaaggcagccgctccgtgatggagtatttgcatgagttcaacaatctagcccgttatgccccggaggatgtgcgggaagatgaggagaagcaagagaagttcttggcaggaatggaccctgagctgtccgttcgtctagtctctggggactatcctgattttcaacgactggtggacaagagcatccgcttggaagccaagcacaaggagctggaatcgcacaagcgccgcttggcgaatttccgcaatcagcagggtgctaaccagagggtccgctacaccaatccctacccagggggatcctcctcgcagcagcagcagcagcagcagcagcaacctcgctccgcgcctcgacctcaattcgtggtgcgcattccacagccgcagcagcagcagaatcagcaagggactcgtgcaccccgtcctcctacgccaactgtgcagcctgttcaaggtcgcagggacgctcaaggtccgcagcggctgtgcttcaactgcttcgagcccgggcactttgcggataaatgcccgaagccaaggcgtcagcaaggccaagtgcctccccgctccaacaacggcgggaaggatgtcattcggggccgtgtgaatcatgtgacggccgaggacgtgctgacaactccagacgtcatcgttggtacgttcctcgttcattccatccctgctaccattttgttcgactctggagcttcccactcgtttatatctgtgccattcgtggggaaaaatcagttgggggtagaaaggcttagaaaccctctgctcatcaccacccctggaggggttatgacagcaaagtattatagccctgccgtccctatagaaattcaggggattccttttccctcggatctgattctgttagacacaaagaacttggatgtgattcttgggatgaattggttggctcaattccaaggagtagtggattgcgcgaggcgcactgtcactctgtaccgaggaccggaacagccggttgttttctttgcacctccaacctctgtcagaagttcagaacttcatcagataggtctgtcagaaatccccatagtcagagagttcggagacgtgtttccggaagaactacctggtatgccgcccaagcgagagattgagttccggatatatcttgctccaggaaccactcctctgtacaagcgaccctaccgtatggcagcaaatgaactggccgaagttaagaaacagttggaagagttgaaagaaaaggggtatatacgtccgagtacttccccttggggtgctcctgtgatttttgtggagaagaaagacaaaacgaagaggatgtgcgttgactacagagctctcaatgaagtcaccatcaaaaacaagtaccctcttccccggatcgatgatctgttcgatcagcttaaaggtgccactgtattctccaagattgatcttcgttccggatatcaccaattacgtattcgggaagaagatattccgaagaccgcattcaccacgcgatatggactgtatgaattcacggtgatgtcgttcggcttaaccaatgctcctgccttcttcatgaacttaatgaataaagtgttcatggaatacttggacaagtttgttgtggttttcattgatgacattctgatatactcacaatcagaggaagaccatcagcaccatctccgtctggtactgggaaagttgcgggaacatcaattgtatgccaagctcagcaagtgtgagttctggttgtccgaagtcaaattcttagggcacgtgatatctgctaaaggagttgctgtggaccccgaaacagtgaccgccgtcaccgattggaagcaacccaagacagtcactcagattcgcagtttcttaggtttggcaggatactaccggagattcatcgagaacttctccaaaatcgctcgacccatgacacagttgttgaagaaagaagagaaatttgtgtggagcccgcaatgcgagaaggcgttccaaactctcaaagaaaagctggtttcctcgccagtgttaatcttgccggatactcgcaaggacttcatggtgtattgtgatgcttcgcgccaaggattggggtgcgtgctcatgcaggacggtcatgtggtagcctatgcttcacgtcagctacgacctcatgaaggcaactaccctacacatgacttggagttagcagcggtggttcatgctctaaaaatctggcggcactatctcattgggaaccgctgtgaaatatatactgatcataagagtttgaaatacatcttcacccagtcggatctgaatcttcggcaaaggagatggttagaactcatcaaggattatgatgtgggaatacactatcatcctggtaaggccaacgtggttgccgacgctctaagccgaaagagccactgcaacactctcaacgtccgaggcattccacccgaacttaaccaacagatggaagccctgaacctaagcctagttggtcgcggattcttggctgcgttggaagccaagcctaccttgctcgatcaaatccgcgaggctcagaagaatgatccggacatgcatggactcctcaagaatatgaaacagggtaaagccgcaggtttcacagaggatgaacacggaaccctatggaacggaaagcgggtatgcgttccagataaccgagaacttaaacagctgatacttcaggaagctcacgagagtccttattccattcacccaggcagtaccaagatgtacttagacttgaaggagaaatactggtgggtcagcatgaagcgggaaattgcagagtttgtggctctatgtgatgtgtgccagcgtgtcaaggcagaacaccaacgaccggccggacttctccaacctctccaagtgccggaatggaaatgggatgaaattgggatggatttcatcaccggccttccaaaaacccaaggtggatatgattctatatgggtaatagtggatcgattaaccaaggtagctcgattcattcctgtgaagaccacctatggagggaataaactagcggagctctacttcgctaggatcgtgagtctccatggcgttcccaagaaaatcgtatctgataggggaagccaattcacctctcacttttggaagaagctccaagaagagctgggtactcgattgaatttcagcaccgcctatcacccgcagaccgatggacagaccgagcgtctaaatcagatcctagaagatatgctccgcgcatgtgtcctagatttcgggaagacttgggataagagtctcccctatgccgagttctcctacaataacagctatcaagccagcatacaaatggcaccctatgaagcgttgtacgggcgcaaatgccggacaccgctattgtgggaccaagttggagaaagccaagtgttcgggactgatatcctgagagaagctgaagctaaagtcagaatcattcgggataatctaaaggtggcacagtctcggcagaaaagttatgcagataaccgtcgccgtgatctggaattcgcagtggatgactttgtgtatcttcgggtcacgccattgcgaggtgtgcacaggtttcaaacgaaagggaagcttgcacctcggtatgtgggtcccttccgtatcgttgctcgacgcggagaagtcgcctaccagctggagttgcccgcctccttgggcaacgtgcatgatgtgttccatgtgtcgcaactcaagaaatgtcttcgagtgccatccgagcaggccgactcagagcaaatcgaagttcgcgaagacttgacgtatgtggagaagccagtgaaaatcctggacaccatggagcgcaggaccaggaaccgggtaatccgtttttgcaaggtccagtggagcaaccacgccgaagaagaagctacttgggagcgcgaagacgaactgaaggcagcccatcccgatctcttcgccagttcttccgaatctcggggtcgagattccgtttaa

SEQ ID NO: 14191 - DNA, 5325 bp, Oryza sativa
  Clone ID: TFbOSC400979j.C1.o1.fg
atggccggcagcgtcacccgtcgtggtttggacatgactggtttcgtcttggagctgcgaggcatgtgcgtggccttggggtatccacatggagtggactaccaggccaggccgcttccggagcaggagggtgacgatgcagagccccacgctggttgggaggtcactgcagtgatcctcgctggctctcccgagcggacttcgctgacagtcaccgcgggtggagattccttccccgccgcttgccagagcgccgctctcctcgccatcggcactcttcaccagcgctacccagacgagttgcagcactcgccctaccgctaccaccctcgccacggaggagcccgcgactacgccaccttccgggatgctagctcggaggatgacgctaccatcgtgcacctggcgcgcatggtggaggcgtacgacgcggctcgtatcgacttccatcagatggtgcgtcgcgggatggttgagaacaacatgaagatcctggagctgcgtcaggagaacctgcagctcaagaaggacctagatgcggtggaggcgcagctgcatcagcttaagatcgcccagggagaggtctgccgccccaagcgtcgccgcgtctgccgcagccagaagatcaccgcccgcaagagcacctccaggcccgagcttgttcgtcagtccctggcgtggacctgcttcgtggagacccctcgtgccgagcccgcgcccgtggttccccaggagggggaagcctccggcgttggtagcacggaggctctttctctgtttgctggttctgtgtggggttttcagatggtgacgaccaggagaaatgctaacaccggtgatggcaaccaacccgaaagcagcaaccacaaccaccagggcaacccacctccacctcctcctccgcctccgccaccaccaccagacaccaacgccattctcacccaaatcctcgcccagcaagccaacatgatgactgctttcctccaccacctccaaaatccgccacaacataatgctccaccaccacccccacaacactctaaactcgccgagttcctccgcatccgcccacctaccttctcaagctccaacaaccccgtggatgcgttggattggttgcatgccgtggggaaaaagctagacacggtgcagtgcagcgatgaggagaaagtcatcttcgccgcccaccaactgcaggggcccgcatctctctggtgggaccacttccaggctacgcagccagagggacagccgattacttgggcccgcttcaccgccgctttccgaagaacccatgtgcccgccggagtcgtggcccttaagaaaagggaattccgagagttgaagcaaggcaaccgctccgtgatggagtatttgcatgagttcaacaacctggcccgttacgctccggaggatgtgcgggaagatgaggagaagcaagagaagttcttggcaggaatggaccctgagctgtccgtccgtctagtctctggggactatccggattttcaacgattggtggacaagagcatccgcttggaagccaagcacaaggagctggagtcgcacaagcgccgcttggcgaatttccgcaatcaacagggtgctaaccaaagggtccgctacaccaatccctatccagggggatcctcctcgcagcagcaacaacagcagcagcaacctcgctccgcgcctcgacctcaattcgtggtgcgcgtcccacagccgcagcaacagcagaatcagcaggggactcgtgcaccccatcctcctacgccaactgtgcagtctggtcaaggccgcagggacgctcaaggtcagcagcgtctgtgcttcaactgcttcgagcccgggcactttgcggataaatgcccgaaaccaaggcgtcagcaaggccaagcgcctccccgctccaagaacggcgggaaggatgtcattcggggtcgtgtgaatcacgtgacggccgaggacgtgctgacaactccagacgtcatcgttggtacgttcctcgttcattccatccctgctacaattttgttcgactctggagcttcccactcgtttatatttgtgccattcgtggggagaaatcagttgggggtagaaaggcttaggaaccctctgctcatcaccacccctggaggggttatgacagcaaagtattatagccctgccgtccctatagaaattcaggggattccttttccctcggatctgattttgctagacaccaagaatttggatgtgatccttgggatgaattggttggctcaattccaaggagtagtggattgcgcgagacgcactgttactctgtaccgagggccggcacaaccagttgttttctttgcaccctcaacctctatcagaagttcagaacttcatcagataggactgtcagaaatccccatcgtcagggagttcggagatgtgtttccggaagaactacccggtatgccgcccaaacgagagattgagttccggatagatcttgctccaggaaccactcctctgcacaagcgaccctaccgtatggcagcaaatgaactggccgaagtaaagaaacagttggaagagttgaaagaaaagggatacatacgtccgagtacttccccatggggtgctcctgtgatttttgtagagaagaaagacaagacgaagaggatgtgcgtcgactacagagctctcaatgaagtcaccatcaaaaacaagtaccctcttccccggatcgatgatctgttcgatcagcttaaaggtgccactgtattctccaagattgatcttcgttccggatatcaccaattacgtattcgtgaagaagatattccgaagaccgcattcaccacgcgatacgggctgtatgaattcacggtgatgtcattcggtctaaccaatgcacctgccttcttcatgaacttaatgaacaaagtgttcatggaatacttggataagtttgttgtggttttcattgatgacattctgatatactcacactcagaggaagaccatcagcaccatctccgtctggtgttgggaaagttgcgggaacatcaattgtatgccaagcttagcaagtgtgagttctggttgtccgaagtcaaattcttggggcacgtgatatctgctaaaggagttgctgtggaccccgaaacagtgaccgccgtcaccgattggaagcaacccaagacagttactcaagtccgcagtttcttaggtttggcaggatactaccggagattcatcgagaacttctccaaaatcgctcgacccatgacacagttgttgaagaaagaagagaaatttgtgtggagcccgcaatgcgagaaggcgtttcaaactctcaaggaaaagctggtttcctcgccggtgttaatcttgccggatactcgcaaggacttcatggtgtattgtgacgcttcgcgccaaggattggggtgcgtgctcatgcaggacggtcatgtagtagcctatgcctcacgtcagctacgacctcatgaaggcaactaccctacacatgacttggagttagccgcggtggttcatgctctaaaaatctggcggcactatctcattggaaatcgctgtgaaatatataccgaccataagagtttgaaatacatcttcacccagtcggatctgaatcttcggcaaaggagatggttagaacttatcaaagactatgatgtgggaattcactatcatcctggtaaggccaacgtggttgccgacgctctaagtcgaaagagccattgcaacactcttaacgtccgtggcattccacccgaacttagtcaacagatggaagccctgaatctaagcatagttagtcgtggattcttggctgcgttggaagccaagcctaccttgctcgatcaaatccgcgaggctcagaagaatgatccggacatgcatggactcctcaagaatatgaaacagggtaaagccgctggtttcacagaggatgaacacggaaccctatggaacggaaagcgggtatgcgttccagataacagagaacttaaacagttgatacttcaggaagctcacgagagcccttattccattcacccgggcagtacaaagatgtacttagacttgaaggagaaatactggtgggttagcatgaagcgggaaattgcagagtttgtggccctatgtgatgtgtgccaacgtgtcaaggcagagcaccaacgaccggccggacttctccaacctctccaagtaccagaatggaaatgggatgaaattgggatggatttcatcaccggacttccaaaaacccaaggtggatatgattctatatgggtagttgtggatcgattaaccaaggtagctcgatttattcctgtgaagaccacctatggagggaacaagctagccgagctctacttcgctaggatcgtgagtctccatggcgttcccaagaaattcgtatctgataggggaagccaattcacctctcacttttggaagaagctccaagaagacctgggtactcgattgaatttcagcaccgcctatcacccgcagacagatggacagaccgagtgtctaaatcagatcctagaagatatgctccgcgcatgtgtactagatttcgggaagacctgggataagagtctcccctatgccgagttctcctacaataacagctatcaagccagcatacaaatggcaccttatgaagcgttgtacgggcgcaaatgccggacaccgctattgtgggaccaagttggagaaagccaagtgttcgggactgatatcctgagagaagctgaagctaaagtcagaaccattcgggataacctaaaggtggcacagtcccggcagaaaagttatgcagataaccgtcgctgtgacctggaattcgcagtggatgattttgtgtaccttcgggtcacgccattgcgaggtgtacacaggtttcagacaaaagggaagctcgcacctcggtatgtgggtcctttccgtatcgttgctcgacgcggagaagtcgcttaccagttggagctgcccgcctccttgggcaacgtgcatgatgtgttccatgtgtcgcaactcaagaaatgccttcgagtgccatccgagcaggccgactcagagcagattgaagttcgcgaagatttgacctacgtggagaggccagtgaaaatcctggacaccatggagcgcaggaccaggaaccgggtaatccgtttttgcaaggtccagtggagcaaccatgccgaagaagaagctacctgggagcgtgaagacgagctgaaggcagcccatcccgatctcttcgccagttcttccgaatctcggggtcgagattccgtttaa

SEQ ID NO: 14192 - DNA, 8562 bp, Oryza sativa
  Clone ID: TFbOSC400979j.C1.o10.gm
gcgtttcaaactctcaaggaaaagctggtttcctcgccggtgttaatcttgccggatactcgcaaggacttcatggtgtattgtgacgcttcgcgccaaggattggggtgcgtgctcatgcaggacggtcatgtagtagcctatgcctcacgtcagctacgacctcatgagggcaactaccctacacatgacttggagttagcagcggtggttcatgctctaaaaatctggcggcactatctcattggaaatcgctgtgaaatatataccgaccataagagtttgaaatacatcttcacccagtcggatctgaatcttcggcaaaggagatggttagaacttatcaaagactatgatgtgggaattcactatcatcctggtaaggccaacgtggttgccgacgctctaagtcgaaagagccattgcaacactcttaacgtccgtggcattccacccgaacttagtcaacagatggaagccctgaatctaagcatagttagtcgtggattcttggctgcgttggaagccaagcctaccttgctcgatcaaatccgcgaggctcagaagaatgatccggacatgcatggactcctcaagaatatgaaacagggtaaagccgctggtttcacagaggatgaacacggaaccctatggaacggaaatcgggagaaatactggtgggttagcatgaagcgggaaattgcagagtttgtggccctatgtgatgtgtgccaacgtgtcaaggcagagcaccaacgaccggccggacttctccaacctctccaagtaccagaatggaaatgggatgaaattgggatggatttcatcaccggacttccaaaaacccaaggtggatatgattctatatgggtagttgtggatcgattaaccaaggtagctcgatttattcctgtgaagaccacctatggagggaacaagctagccgagctctacttcgctaggatcgtgagtctccatggcgttcccaagaaattcgtatctgataggggaagccaattcacctctcacttttggaagaagctccaagaagagctgggtacccgattaaatttcagcaccgcgtatcacccgcagacagatggacagaccgagtgtctaaatcagatcctagaagatatgctccgcgcatgtgtactagatttcgggaagacctgggataagagtctcccctatgccgagttctcctacaataacagctatcaagccagcatacaaatggcaccttatgaagcgttgtatgggcgcaaatgccggacaccactattgtgggaccaagttggagaaagccaagtgttcgggactgatatcctgagagaagctgaagctaaagtcagaatcattcgggataatctaaaggtggcacagtcccggcagaaaagttatgcagataaccgtcgctgtgacctggaattcgcagtgggtgactttgtgtatcttcgagtcacgccattgcgaggtgtacacaggtttcagacaaagggaaagctcgcacctcggtatgtgggtcctttccgtatcattgcccggcgcggagaagtcgcttaccagctggagctgcccgcctccttgggcaacgtgcacgatgtgtttcatgcgtcgcaactcaagaaatgtcttcgagtgccatccgagcaggccgactcagagcaaattgaagttcgcgaagacttgacctacgtggagaggccagtgaaaatcctggacaccatggagcgcaggaccaggaaccggcccatcccgatctcttcgccagtccctccgaatctcggggtcgagattccgtttaaggggggtaggcgggcccgcccgccaccctcgctgacgggtggggcccacccgtcatcccctttctcgcgccgcgcccgccgccgcgcccgtgccctagcgccgccgccgccgccgaatccgccgcatcccgccgtccccgcgcgcattaaagagggggaaatcactccccgtgattccctcccttttttccccctctttcccctctctctctccctcggattcgtccgaaatcgcgcccgcgatcttcgccggcgtcatcaatggcggccgagatttccgcggccgattccttcccctccgggcgctctctccctctcccggcgctatttaatcgcttcccgagctccgctcctccgtttccgccgctcgccgctcactcttcccgtcggaatcgagcccgcgccgtcgttctctctctccgccatcgccgccgagctccggtcagtcgccgtcgtcgctccggacctcctcccgtttcggcgtcacccccttcggcttcgccgcgtcctcgccgaccccgtccgcccctccgcttcgctcgccgaccgccggaacgccgccgtcctcgtcgacccgagcccgcgccgccgtcgtcctccgctccggtcgccatttccgccgccctcgtcgtcccggggtgagccgtggaccgccgttcgctttccctcttccctcctctctctcgggtgccgctccgccgcgccgttggtcgccggcggcgaccatcggggcgcgggtgcgccgcctcccgtcggccgtgccggcgaggccgccttcgggcgcgcccgcggctgccaggtgggcccggccgtcagccgcccgcgcccgtgggtgcggctaacgcgtgggacccacggcgccggccgacgccagccgcgtgcgcccggtccaccgtgggccgtgaggctgccgcgtgggccccactcccgtggacccgcacctctgccatataaggaccggtcttcgggcctctgttgcaaagcactaccgtacttccacatgtctagtggggcaaatgaaggctacacgggctgcggttcggtagtcgagatgtcatggcacagggccggtgtcctgctgctaggggctcagtcctgcctgcctgtcccgggggttccggccgtaggtgggattgggtcgatggccggcagcgtcacccgtcgtggtttggacatgactggcttcgtcttggagctgcggggtatgtgcgtggtcttggggtatccacatggagtggactaccaggccaggccgcttccagagcaggagggtgaggatgcagagccccacgctggttgggaggttactgcagtgatcctctctggctctcccgagcggacttcgctggcagtcaccgcgggcggagattccttccccgccgcttgccaaaacgccgctcttctcgccatcggcactcttcaccagcgctacccggacgagttgcagcactcgccctaccgctaccaccctcgtagcggaggagcccgcgactacgccaccttccgagatgctggctcggaggatgacgctcccatcgtgcacctggcgcgcatggtgaaggcgtacgacgcggctcgtatcgatttccatcagatggtgcgtcgtgggatggtcgagaacaacatgaagatcctggagctgcgtcaggagaacctgcagctcaagaaggacctagacgcagtggaggcgcagctgcatcagctcaagatcgcccagggagaggactgccgccccaagcgtcgccgcgtctgccgcagccagaagatcaccgcccgcaagagcacctccaggcccgagcttgttcgtcagtccctggcgtggacctgcttcgtggagacccctcgtgccgagcccgcgcccgtggttccccaggagggggaagcctccggcgttggtagcacggaggctctttctctgtttgctggttctgtgtggggttttcagatggtgacgaccaggagaaatgctaacaccggtgatggcaaccaacccgaaagcagcaaccacaaccaccagggcaacccacctccacctcctcctccgccttcgccaccaccaccagacaccaacgccattctcacccaaatcctcgcccagcaagccaacatgatgactgctttcctccaccacctccaaaatccgccacaacataatgctccaccaccacccccacaacactctaaactcgccgagttcctccgcatccgcccacctaccttctcaagctccaacaaccccgtggatgcgttggattggttgcatgccgtggggaaaaagctagacacggtgcagtgcagcgatgaggagaaagtcatcttcgccgcccaccaactgcaggggcccgcatctctctggtgggaccacttccaggctacgcagccagagggacaacctatcacttgggctcgcttcaccgccgctttccgaagaacccatgtgcccgctggagtcgtggctcttaagaaaagggagttccgagagttgaagcaaggcaaccgctccgtgatggagtatttgcatgagttcaacaatctggcccgttatgccccagaggatgtgcgggaagatgaggagaagcaagagaagttcttggcaggaatggaccctgagctgtccgtccgtctagtctccggggactatccggatttccaacgtctggtggacaagagcatccgcttggaagccaagcacaaggaactggagtcgcacaagcgccgcttggcgaacttccgcaatcaacagggtgctaaccaaagggtccgctacaccaatccctacccagggggatcctcctcgcagccgcagcaacagcatcaacaacctcgctccgcgcctcgacctcaattcgtgcctggacaaggccgcagggacgcttcaggtccgcagcgtctgtgcttcaactgcttcgagcccgggcactttgcggataaatgcccaaagccgaggcgtcagcaaggccaagcgcctccccgctccaacaatggtgggaaggatgtcattcggggtcgtgtgaaccacgtgacggccgaggacgtgctgacaactccagacgtcatcgttggtacgttcctcattcactccatccctgctaccattttgttcgactctggagcttcccactcttttatatctgtgccattcgtggggagaaatcagttgggggtagaaaggcttaggaaccctctgctcatcaccacccctggaggggttatgacagcaaaagagttcggagacgtgtttccggaagaactacctggtatgccgcccaagcgagagattgagttccggatagatcttgctccaggaaccactcctctgtacaagcgaccctaccgtatggcagcaaatgaactggccgaagttaagaaacagttggaagagttgaaagaaaaggggtatatacgtccgagtacttctccatggggtgctcctgtgatttttgtagagaagaaagacaagacgaagaggatgtgcgttgactacagagctctcaatgaagtcaccatcaaaaacaagtaccctcttccccggatcgatgatctgttcgatcagcttaaaggtgccactgtattctccaagattgatcttcgttccggatatcaccaattacgtattcgtgaagaagatattccgaagaccgcattcaccacgcgatacggactgtatgaattcacggtgatgtcattcggtctaaccaatgcacctgccttcttcatgaacttaatgaacaaagtgttcatggaatacttggataagtttgttgtggttttcattgatgacattctgatatactcacactcagaggaagaccatcagcaccatctccgcctggtgttgggaaagttgcgggaacatcaattgtatgccaagcttagcaagtgtgagttctggttgaccgaagtcaaattcttagggcatgtgatatctgctaaaggagttgctgtggaccccgaagcagtgaccgccgtcaccgattggaagcaacccaagacagtcacccaaattcgcagtttcttaggtttggcaggatactaccagaggttcatcgagaacttctccaaaatcgctcgacccatgacacaattgttgaagaaagaagagaaatttgtgtggagcccgcaatgcgagaaggcattccaaactctcaaggaaaagctggtttcctcgccggtgttaatcttgccggatacccgcaaggatttcatggtgtactgtgatgcttcgcgccaaggattggggtgcgtgctcatgcaggatggtcatgtagtggcctatgccttccgccagctacggcctcatgagggcaactaccctacccatgatttggagttagcagcggtggttcatgctctaaaaatctggcggcactatctcattgggaatcgctgtgaaatatatactgatcataagagtttgaaatacattttcacccagtcagatctgaatcttctgcaaaggagatggttagaactcatcaaggattatgatgtgggaattcactatcatcctggtaaggccaacgtggttgccgacgctctaagtcgaaaaagccattgccacgctcttaacgtccgtggcattccacccgaacttaatcaacagatggaagccctgaacctaagcatagttagtcgcggatttttggctgcgttggaagccaagcccaccttgctcgatcaaatccgcgaggctcagaagaatgatccggacatgcatggactcctcaagaatatgaaacagggtaaagccgctggtttcacagaggatgaacacggaaccttatggaacggaaatcgggagaaatactggtgggttagcatgaagcgggaaattgcagagttcgtggccctatgtgatgtgtgccagcgtgtcaaggcagagcaccaacgaccggccggacttctccaacctctccaagtaccagaatggaaatgggatgaaattgggatggatttcatcaccggacttccaaaaacccaaggtggatatgattctatatgggtagttgtggatcgattaaccaaggtagctcgatttattcctgtgaagaccacctatggagggaacaaactagccgagctctacttcgctaggatcgtgagtctccatggcgttcccaagaaaatcgtatctgataggggaagccaattcacctctcacttttggaagaagctccaagaagagctgggtacccgattaaatttcagcaccgcgtatcacccgcagacagatggacagaccgagcgtctaaatcagatcctagaagatatgcttcgcgcatgtgttctagatttcgggaagacctgggataagagtctcccctatgccgagttctcctacaacaacagctaccaagccagcatacaaatggcaccttatgaagcgttgtatgggcgcaagtgccggacaccactattgtgggaccaagttggagaaagccaagtgttcgggactgatatcctgagagaagctgaagctaaagtcagaatcattcgggataatctaaaggtggcacagtcccggcagaaaagttatgcagataaccgtcgctgtgacctggaattcgcagtgggtgactttgtgtatcttcgagtcacgccattgcgaggtgtacacaggtttcagacaaagggaaagctcgcacctcggtatgtgggtcctttccgtatcattgcccggcgcggagaagtcgcttaccagctggagctgcccgcctccttgggcaacgtgcacgatgtgtttcatgcgtcgcaactcaagaaatgtctccgagtgccatccgagcaggccgactcagagcaaattgaagttcgcgaagacttgacctacgtggagaggccagtgaaaatcctggacaccatggagcgcaggaccaggaaccggcccatcccgatctcttcgccagtccctccgaatctcggggtcgagattccgtttaaggggggtaggcgggcccgcccgccaccctcgctgacgggtggggcccacccgtcatccccttcctcgcgccgcgcccgccgccgcgcccgtgccctagcgccgccgccgccgccgaatccgccgcatcccgccgtccccgcgcgcattaaagagggggaaatcactccccgtgattccctcccttttttccccctctttcccctctctctctccctcggattcgtccgaaatcgcgcccgcgatcttcgccggcgtcatcaatggcggccgagatttccgcggccgattccttcccctccggccgctctctccctctcccggcgctatttaatcgcttcccgagctccgctcctccgtttccgccgctcgccgctcactctccccgtcggaatcgagcccgcgccgtcgtcctctcactccaccgtcgccgccgagctccggtcagtcgccgtcgtcgctccggacctcctcccgtttcggcgtcgcccccttcggcttcgccgcgtcctcgccgaccccgtccgcccctccgcttcgctcgccgaccgccggaacgccgccgtcctcctccgctccggtcgccgtttccgccaccctcgtcgtcccggggtgagccgtggaccgccgttcgctttccctcttccctcctctctctcgggtgccgctccgccgcgccgttggtcgccggcggcgaccatcggggcgcgggtgcgccgcctcccgttggccgtgccggcgaggccgccttcgggcgcgcccgcggctgccaggtgggcccggccgtcagccgcccgcgcccgtgggtgcggctaa

SEQ ID NO: 14193 - DNA, 5400 bp, Oryza sativa
  Clone ID: TFbOSC401000j.C1.o56.fg
atgtcatggcacagggccggtgtcctgctgctaggggctcagtcctgcctgcctgtcctgggggttccggccgtaggtgggattgggtcggtactcttgtctatggctaggatgggttggaaactatgtcacgtcttccgtctgtataccgtggtgatggccggcagcgtcacccgtcgtggtttggacatgactggtttcgtcttggagctgcggggcatgtgcgtggccctggggtatccacacggagtggactaccaggccaggccgcttccggagcaggagggtgacgatgcagagccccacgctgcttgggaggtcactgcagtgatcctcgctggctctcccgagcggacttcgctgacagtcaccgcgggtggagactctttccccgccgcttgccagagcgccgctctcctcgccatcggcactcttcaccagcgctacccggacgagttgcagcactcgccctaccgctaccaccctcgtcgcggaggagcccgcgaccacaccaccttccgggatgctagctcggaggatgacgctaccatcgtgcacctggcgcgcatggtggaggcgtacgacgcggctcgtatcgacttccatcagatggtgcgccgtgggatggtcgaggacaacctgaagatcctggagctgcgtcaagagaacctgcagctcaagaaggacctggacgcagtggaggcgcagctgcatcagctcaagatcgcccagggagagatctgccgccccaagcgtcgccgcgtctgccgcagcctgaagatcaccgcccgcaagagcacctccaggcccgagcttgttcgtcagtccctggcgtggacttgcttcgtcgagacccctcgtgccgagcccgcgcccgtgatggtgatgaccaggagaagtgctaacaccggtgatggcaaccaacctgaaggcagcaaccacaaccatcagggcaacccacctccacctcctcctctgcctccaccaccaccaccagacaccaacgccattctcacccaaatcctcgcccagcaggccaacatgatgactgctttcctccaccacctccaaaatccgccacaacttaatgctccaccaccacccccacaacactctaaactcgccgagtttctccgcatccgcccacctaccttctctagctccaacaaccccgtggatgcgttggattggttgcatgccgtggggaaaaagctagacactgtgcagtgcagcgatgaggagaaagtcatcttcgccgcccaccagctgcagggacccgcatctctatggtgggaccatttccaggctacgcagccagagggacagcctattacatgggctcgcttcaccgccgctttccgaagaacccatgtgcccgccggagtcgtggcccttaagaaaagggaattccgagagtggaagcaaggcaaccgctccgtgatggagtatttgcacgagttcaacaacctggcccgttacgctccggaggatgtgcgggaagatgaggagaagcaagagaagttcctggcaggaatggaccctgagctgtccgtccgtctagtctccggggattatccggatttccaacgtctggtggacaagagcatccgcttggaagccaagcacaaggaactggagtcgcacaagcgccgcttggcgaatttccgcaaccaacagggtgctaaccaaagggtccgctacaccaatccctatccagggggatcctcctcgcagcagcaacaacagcagcagcaacctcgctccgcgcctcgacctcaattcgtggtgcgcgtcccacagccgcagcagcagcagaatcaacaagggactcgtgcgccccgtcctcctccaccgactgtgcagcctggtcaaggccgcagggacgctcaaggtccgcagcgtctgtgcttcaactgcttcgagcccgggcactttgcggataaatgcccgaagccaaggcgtcagcaaggccaagcgcctccccgccccaacaacggtgttaaggacgtcattcggggtcgtgtgaaccatgtgacggccgaggacgtgctgacaactccagacgtcatcgttggtacgttcctcattcattccatccctgctaccattttgttcgactctggagcttcccactcgtttatatctgtgccattcgtggggagaaatcagttgggggtagaaaggcttagaaaccctctgctcatcaccacccctggaggggttatgacagcaaagtattatatccctgccgtccctatagaaattcaggggattccttttccctcggatctgattctgctagacaccaagaacttggatgtgatccttgggatgaattggttggctcaattccaaggagtagtggattgcgcgagacgcactgtcactctgtaccgagggccggaacaaccggttgttttctttgcacccccaacctcagtcagaagttcagaacttcatcagatagaactgtcagaaattcccatcgtcagagagttcggagacgtgtttccggaagaactacctggtatgccgcctaagcgagagattgagttccggatagatcttgctccaggaaccgctcctctgtacgagcgaccctaccgtatggcagcaaatgaactggccgaagttaagaaacagttggaagagctgaaagaaaaggggtatatacgtccgagtacttccccctggggtgctcctgtgatttttgtggagaagaaagacaagacgaagaggatgtgcgttgactacagagctctcaatgaagtcaccatcaaaaacaagtaccctcttccccggatcgatgatctgttcgatcagcttaaaggtgccactgtattctccaagattgatcttcgttccggatatcaccaattacgtattcgcgaagaagatattccgaagaccgcattcaccacgcgatacggactgtatgaattcacggtgatgtcgttcggtttaaccaatgctcctgccttcttcatgaacttaatgaacaaagtgttcatggaatacttggataagtttgtggtggttttcattgatgacattctgatatactcacaatcagaggaagaccatcagcaccatctccgtctggtattgggaaagttgcgggaacatcaattgtatgccaaacttagcaagtgtgagttctggttgtccgaagtcaaattcttagggcacgtgatatctgctaaaggagttgctgtggaccccgaaacagtgaccgccgtcaccgattggaagcaacccaagacagtcactcaagttcgcagtttcttaggtttggcaggatactaccggagattcatcgagaacttctccaaaatcgctcgacccatgacacagttgttgaagaaagaagagaaatttgtgtggagcccgcaatgcgagaaggcgttccaaactctcaaagaaaagctggtttcctcgccggtgttaatcttgccggatactcacaaggacttcatggtgtattgtgatgcttcgcgccaaggattggggtgcgtgctcatgcaggatggtcatgtggtggcctatgcctcacgccagctacggcctcatgaaggcaactaccctacccatgatttggagttagccgcggtggttcatgctctaaaaatctggcggcactatctcattgggaatcgctgtgaaatatatactgatcataagagtttgaaatacatcttcactcagtcggacctgaatcttcggcaaaggagatggttagaactcatcaaggattatgatgtgggaattcactatcatcctggtaaggccaacgtggttgccgacgctctaagtcgaaaaagccattgcaacactcttaacgtccgtggcattccacccgaacttaatcaacagatggaagccctgaacctaagcatagttagtcgcggattcttggctgcgctggaagccaagcccaccttgctcgatcaaatccgcgaggctcagaagaatgatccagacatgcatggactcctcaagaatatgaaacagggtaaagccgctggtttcacagaggatgaacacggaaccctatggaacggaaatcgagtatgcgttccagataacagagaacttaaacagttgatacttcaggaagctcacgaaagtccttattccatccaccctggcagcacgaagatctacttagacttgaaggagaaatactggtgggttagtatgaagcgggaaattgcagagttcgtggccctttgtgatgtgtgccagcgcgtcaaggcagagcaccaacgaccggccggacttctccaacctctccaagtacttgaatggaaatgggatgaaattgggatggatttcatcaccggacttccaaaaacccaaggtggatatgattctatatgggtagttgtggatcgattaaccaaggtagctcgattcattcctgtgaagaccacctatggagggaacaaactagccgaactctacttcgctaggatcgtaagtctccatggcgttcctaagaaaatcgtatctgataggggaagccaattcacctctcacttttggaagaagctccaagaagagctgggtacccgattaaacttcagcaccgcgtatcacccgcagacagatgggcagaccgagcgtctaaatcagatcctagaagatatgcttcgcgcatgtgtcctggatttcgggaagacctgggataagagtctcccctatgccgagttctcctacaacaacagctatcaagccagcatacaaatggcaccttatgaagcgttgtatgggcgcaaatgccggacaccgctaatgtgggatcaagttggggaaagccaagtgttcgggactgatatcctgagagaagctgaagctaaagtcagaaccattcgggataatccaaaggtggcacagtcccggcagaaaagttatgcagataaccgtcgccgtgacctggaattcgcagtggacgattttgtatatcttcgggtcacgccattgcgaggtgtacacaggtttcggacaaaagggaagctcgcacctcggtatgtgggtcctttccgtatcgttgctcgacgcggagaagtcgcttaccaattggagctgcccgcctccttgggcaacgtgcatgatgtgttccatgggtcgcaactcaagaaatgccttcgagtgccatccgagcaggccgactcagagcaaattgaagttcgcgaagacttgacctacgtggagaggccagtgaagatcctggacaccatggagcgcaggaccaggaaccgggtaatccgtttttgcaaggtccagtggagcaaccacgccgaagaagaagctacctgggagcgcgaagacgagctgaaggcagcccatccagatctcttcgccagttcttccgaatctcggggtcgagattccgtttaa

SEQ ID NO: 14194 - DNA, 6051 bp, Oryza sativa
  Clone ID: TFbOSC401018j.C1.o26.np
atggcggccggatcttccgcggccgattccccctcatccggccgctctctcctcctcccaacactacataaacactccccgtgcctccctccttcgtttccgccactcgccgctctctctccccgtcggaatcgagctcgcgccgtcgtcctctctctccgccgtcgccgccgagctccggtccgccgccgtcgtcgccccgggcctcctcccgtttcggcgtcgccttcttcgggttcgccgcgtcctcgccgatctcgtccaccccttcgtttcgcccgccgaccgccggaacgccgccgtcctcgtcgacccgagccgcgccgccgccttcctccgcttcggtcgccgttcccgtcgtcgccgtcgacccggggtgagccatggaccgcccatttcgtttcccccttccctctcctctctcgggcgccgctccgtcgcgccggaggtcgccgccggcgaccatcggggcgcgggtgcgccgcctcccgtcggctgtgccggcgaggccgccttcgggcgcgccccgcggctgccatgtggggcccggccgtcagccgcccgtgtcctcgggtgcggctgacgcgtgggacccacggcgccggccggcgtaagccgcgtgcacccggtccaccgtggacccacctcggccatataaggaccggtcttcgggcctctgttgcaaagcactaccgtacttccacatgtctagtggggcaaatgaaggctacacgagctgcggcccggtagtcgagatgtcatggcacagggccggtgtcctggtgctaggggctcagtcctgcctgcctgtcccgggtgttccggccgtaggtgggattgggtcgatgtacacctctgatcagagtaaaatctattcgaatagccgcgccctcggttatgggcaagccgagcaatgtacccaaatggccggcagcgtcagccgtcgtggtttggacatgactggcttcgtcttggagctgcggggcatgtgcgtggtcctggggtatccacatggagtggactaccaggccaggccgcttccggagcaggagggtgacgatgcggagccccacgctgcttgggaggtcactgcagtgatcctcgctggctctcccgagcggatttcgctgacagtcaccgcgggtggggattccttccccgccgcttgccagagcgccgctctcctcgccatcggcactcttcaccagcgctacccggacgagttgcagcactcgccctaccgctaccaccctcgtcgcggaggagcccgcgactacgccaccttccgggacgctagctcggaggatgacgctaccatcgtgcacctggcgcgcatggtgaaggcgtacgacgcggctcgtatcgacttccatcagatggtgcgtcgtgggatggtcgagaacaacatgaagatcctggagctgcgtcaggagaacctgcagctcaaaaaggacctagacgcggtggaggcgcagctgcatcaactcaagatcgcccagggagaggtctgccgccccaagcgtcgccgcgtctgccgcagccagaagatcaccgcccgcaagagcacctccaggcccgagcttgttcgtcagtccctggcgtggacttgcttcgtggagacccctcgtgccgagcccacgcccgtggttccccagaagggggaagcctccggcgttggtagcacggaggatgcgctgttgctcaccttccatggtgatgaccaggagaaatgctgccaccagtgatggcaaccaacccgaaggcagcaaccacaacaaccatggcagcccacctccacctcctcctccacctccaccaccaccaccagataccaacgccattcttacccaaatcctcgcccagcaggccaacatgatgactgcttttctccaccacctccaaaatccgccacaacataatgctccaccaccacctccccaacactctaaactcgccgagttcctccgcatccgtccacctaccttctctagctccaacaaccccgtggatgcgttggattggttgcatgccgtggggaaaaagatagacactgtgcagtgcagcgatgaggagaaagtcatcttcgccgcccatcagctgcaggggcccgcatctctatggtgggaccatttccaggctacgcagccagagggacagcctattacttgggcccgtttcaccgccgctttccggagaacccatgtgcccgctggagtcgtggcccttaagaaaagggaattccgagagttgaagcaaggcaaccgctccgtgatggagtatttgcatgagttcaacaacctggcccgttacgccccggaggatgtgcgggaagatgaggagaagcaaaagaagttcttggcaggaatggaccctgagctgtccgtccgtctagtctccggcgactatccggatttccaacgtctggtggacaagagcatccgcttggaagtcaagcacaaggaactggagtcgcacaagcgccgcttggcgaatttccgcaatcaacagggagctaaccaaagggtccgctacaccaatccctatccagggggatcctcctcgcagcagcgacaacagcagcaacaacctcgctccgcgccccgccctcaattcgtggtgcgcgtcccacagccgcagcaacagcagagtcagcaagggacccgtgcgcctcgtcctcctacgccaactgtgcagcctggccaaggccgcagggacgcttcaggtccgcagcgtctgtgcttcaactgcttcgagcccgggcactttgcggataaatgcccgaagccaaggcgacagcaaggccaagcgcctccccgctccaacaacggtggtaaggacgtcattcggggtcgtgtgaaccacgtgacggccgaggacgtgctgacaactccagacgtcatcgttggtacgttcctcattcattccatccctgctaccattttgttcgactctggagcttcccactcgtttatatctgtgccattcgtggggagaaatcagttgggggtagaaaggcttagaaaccctctgctcatcaccacccctggaggggttatgacagcaaagtattatagccctgcggttcctatagaaattcaggggattccttttccctcggatctgattctgctagacaccaagaacttggatgtggtccttgggatgaattggttggctcaattccaaggagtagtggattgtgcgagacgcaccgtcactctgtaccgagggccgggacaaccggttgttttctttgcacccccaacctctgtcagtagttcagaactgcatcagatagggctgtcagaaatccccatagtcagagagttcggagacgtgtttccggaagaactacctggtatgccgcccaagcgagagattgagttccggatagatcttgctctaggaaccactcctctgtgcaagcgaccctaccgtatggcagcaaatgaactggccgaagtcaagaaacagctggaagagttgaaagaaaaggggtacatacgtccgagcacttccccctggggtgctcctgtgatttttgtggagaagaaagacaagacgaagaggatgtgcgttgactacagagctctcaatgaagtcaccatcaaaaacaagtaccctcttccccggatcgatgatctgttcgatcagcttaaaggtgccactgtattctccaagatcgatcttcgttccggatatcaccaattgcgtattcgggaagaagattttccgaagaccgcattcaccacgcgatacggactgtatgaattcacggtgatgtcattcggtttaaccaatgcacctgccttcttcatgaacttaatgaacaaagtgttcatggaatacttggataagtttgttgtggttttcattgatgacattctgatatactcacaatccgaggaagaccatcagcaccatctcctcctggtgttgggaaagttgcgggaacatcaattgtatgccaaacttagcaagtgtgagttctggttgtccgaagtcaaattcttagggcacgtgatatctgctaaaggagttgctgtggaccccgaaacagtgaccgccgtcactgattggaagcaacccaagacagtcactcaagtccgcagtttcttaggtttggcaggatactaccggaggttcatcgagaacttctccaaaatcgctcgacccatgacacagttgttgaagaaagaagagaaatttgtgtggagcccgcaatgtgagaaggcgttcagaactctcaaagaaaagctggttgcctcgccagtgttaatcttgccggatactcgcaaggacttcatagtgtattgtgacgcttcgcgccaaggattggggtgcgtgctcatgcaggacggtcatgtggtggcctatgcctcacgccagcttcgacctcatgaaggcaactaccctacccatgacttggaattagccgcggtggttcatgctctaaaaatctggcggcactatctcattgggaatcgctgtgaaatatatactgatcataggagtttgaaatacatcttcacccagtcggatctgaatcttcggcaaaggagatggttagaactcatcaaggattatgatgtgggaattcactatcatcctggtaaggccaacgtggtcgccgacgctctaagtcgaaagagccattgcaacactcttaacgtccgtggcattccaccggaacttaatcaacagatggaagccctgaacctaagcatagttagtcgtggattcttggctacgctggaagccaagcctaccttgctcgatcaaattcgcgaggctcagaagaatgacccggatatgcatgggctcctcaagaatatgaaacagggtaaagccgctggtttcacagaggatgaacacggaaccctatggaacggaaatcggcgtgtcaaggcagagcaccaacgaccggccggacttctccaacctctccaagtcccagaatggaaatgggatgaaattgggatggattttatcaccggacttccaaaaacccaaggcggatatgattctatatgggtagtcgtggatcgactaaccaaggtagcacggttcattcccgtaaagaccacctatggagggaacaaactagctgaactctacttcgctaggattgtaagtctgcatggcgtccccaagaaaattgtatctgataggggaagccagttcacctctcacttttggaagaagctccaagaagagctgggtacccgattaaatttcagcaccgcgtatcacccgcagatagatggacagaccgagcgtctaaatcagatcctagaggatatgcttcgcgcatgtgtcctagatttcgggaagacctgggataagagtctcccctatgccgagttctcctacaataacagttatcaagccagcatacaaatggcaccttatgaagcgttgtatgggcgcaaataccggacaccgctattgtgggaccaagttggagaaagccaagtgttcgggactgatatcctgagagaagctgaagctaaagtcagaaccattcgggataatctaaaggtggcacagtcccggcagaaaagttatgcagataaccgtcgccgtgatctggaattcgcagtggatgactttgtgtatcttcgggtcacgccattgcgaggtgtacacaggtttcggacaaaggggaagctcgcacctcggtatgtgggtcctttccgtatcactgctcggcgcggagaagtcgcctaccagttggagctgcccgcctccttgggcaacgtgcatgatgtgttccatgtgtcacaactcaagaaatgtctccgagtgccatccgagcaggccgactcagagcaaattgtagttcgcgaagacttgacctacgtggagaggccagtaaaaatcctggacaccatggagcgcaggaccaggaaccgggtaatccgtttttgcaaggtcgagtggagcaaccacgccgaagaagaagctacctgggagcgcgaagacgagctgaaggcagcccatcccgatctcttcgccagttcttccgaatctcggggtcgagattccgtt

SEQ ID NO: 14195 - DNA, 5463 bp, Oryza sativa
  Clone ID: TFbOSC401018j.C1.o35.gm
atgatgactgcttttctccaccacctccaaaatccgccacaacataatgctccaccaccacctccccaacactctaaactcgccgagttcctccgcatccgtccacctaccttctctagctccaacaaccccgtggatgcgttggattggttgcatgccgtggggaaaaagctagacactgtggagtgcagcgatgaggagaaagtcatcttcgccgcccatcagctgcaggggcccgcatctctatggtgggaccatttccaggctacgcagccagagggacagcctattacttgggcccgtttcaccgccgctttccggagaacccatgtgcccgccggagtcgtggcccttaagaaaagggaattccgagagttgaagcaaggcaaccgctccgtgatggagtatttgcatgagttcaacaacctggcccgttacgccccggaggatgtgcgggaagatgaggagaagcaagagaagttcttggcaggaatggaccctgagctgtccgtccgtctagtctccggggactatctggatttccaacgtctggtggacaagagcatccgcttggaagccaagcacaaggaactggagtcgcacaagcgccgcttggcgaatttccgcaatcaacagggagctaaccaaagggtccgctacaccaatccctatccagggggatcctcctcgcagcagcaacaacagcagcagcaacctcgctccgcgccccgccctcaattcgtggtgcgcgtcccacagccgcagcaacagcagagtcagcaagggacccgtgcgcctcgtcctcctacgccaactgtgcagcctggccaaggccgcagggacgcttcaggtccgcagcgtctgtgcttcaattgcttcgagcccgggcactttgcggataaatgcccaaagccgaggcatcagcaaggccaagcgcctccctgctccaacaacggtggtaaggatgtcattcggggtcgtgtgaaccatgtgacggccgaggacgtgctgacaactccagacgtcatcgttgaactgcatcagataggtctgtcagaaatccccatagtcagagagttcggagacgtgtttccggaagaactacctggtatgccgcccaagcgagagattgagttccagatagatcttgctccaggaaccactcctctgtgcaagcgaccctaccgtatggcagcaaatgaactggccgaagtcaagaaacagctggaagagttgaaagaaaaggggtacatacgtccgagcacttccccctggggtgctcctgtgatttttgtggagaagaaagacaagacgaagaggatgtgcgttgactatagagctctcaatgaagtcaccataaaaaacaagtaccctcttccccggatcgatgatctgttcgatcagcttaaaggtgccactgtattttccaagattgatcttcgttccggatatcaccaactgcgtattcgtgatgaagatattccgaagaccgcattcaccacgcgatacggactgtatgaattcacggtgatgtcattcggtttaaccaatgcacccgccttcttcatgaacttaatgaacaaagtgttcatggaatacttggataaatttgttgtggttttcattgatgacattctgatatactcacaatccgaggaagaccatcagcaccatctcggtctggtattgggaaagttgcgggaacatcaattgtatgccaaacttagcaagtgtgagttctggttgtccgaagtcaaattcttagggcacgtgatatctgctaaaggagttgctgtggaccccgaaacagtgaccgccgtcactgattggaagcaacccaagacagtcactcaagtccgcagtttcttaggtttggcaggatactaccggaggttcatcgagaacttctccaaaatcgctcgacccatgacacagttgttgaagaaagaagagaaatttgtgtggagcccgcaatgcgagaaggcgttcaaaaccctcaaagaaaagctggttgcctcgccagtgttaatcttgccggatactcgcaaggatttcatggtgtattgtgacgcttcgcgccaaggattggggtgcgtgctcatgcaggatggtcatgtggtggcctatgcctcacgccagctacggcctcatgaaggcaactaccctacccatgatttggagttagccgcggtggttcatgctctaaaaatctggcggcactatctcattgggaatcgctgtgaaatatatactgatcataagagtttgaaatacatcttcactcagtcggacctgaatcttcggcagaggagatggttagaactcatcaaggattatgatgtgggaattcactatcatcctggtaaggccaacgtggttgccgacgctctaagtcgaaaaagccattgcaacactcttaacatccgtggcattccaccggaacttaatcaacagatggcagccctgaacctaaacatagttagtcgcggattcttggctgcgttggaagccaagcctaccttgctcgatcaaatccgcgaggctcagaagaacgatccggacatgcatggactcctcaagaatatgaaacagggtaaagccgctggtttcacagaggatgaacacggaaccctatggaatggaaatcggtacgaagatgtacttagacttgaaggagaaatactgagcaccaacgaccggccggacttctccaacctctccaagtaccagaatggaaaagggatgaaattgggatggatttcatcaccggacttccaaaaacccaaggtggatatgattctatatgggatcgtaagtctgcatggcgtccccaagaaaatcgtatctgataggggaagccaattcacctctcacttttggaagaagctccaagaagagctgggtacccgattaaacttcagcaccgcataccacccgcagacagatgggcagaccgagcgtctaaatcagatcctagaagatatgcttcgcgcatgtgtcctggatttcgggaagacctgggataagagtctcccctatgccgagttctcctacaataacagctaccaagccagtatacaaatggcaccttatgaagcgttgtatggacgcaagtgccggacaccgctattgtgggaccaagttggggaaagccaagtgttcgggactgatatcctgagacaagctgaagcgaaggtcagaaccattcgggataatctaaaggtggcacagtcccggcagaaaagttatgcagataaccatcgccgtgacctggaattcgcagtggatgactttgtgtaccttcgggtcacaccattgcgagctgtacacagctttcggacaaaagggaagctcgcacctcggttcgtgggtcctttccgtatcattgctcggcgcggagaagtcgcttaccagctggaactgcccgcctccttgggcaacgtgcatgatgtgttccatgtgtcgcaactcaagaaatgccttcgagtgccatccgagcaggccgactcagagcaaattgaagttcgcgaagacttgacctacgtggagaggccagttaaaatcctggacgccatggagcgcaggaccaggagccggcctttcccgtcgtcgccgtcgacccggggtgagccgtggaccgccgtttcgcttcccccttccctcccctctctcgggcgccgctccgccgcgccggtggtcgccggcggcgaccatcggggcgcgggcgtgccgcctcccgtcggctgtgctggcgaggccgccttcgggcgcgccccgcggctgccatgtggggcccggccgtcagccgcccgcgccctcggggcaaatgaaggctacacgagctgcggcccggtagtcgagatgtcatggcacagggccggtgtcctgctgctaggggctcagtcctgcctgcctgtcccgggtgttccggccgtaggtgggattgggtcgaggttcatggagaacttctccaaaatcgctcgacccatgacacagttgttgaagaaagaagagaaatttgtgtggagcccgcaatgtgagaaggcgttcagaactctcaaagaaaagctggttgcctcgccagtgttaatcttgccggatactcgcaaggacttcatagtgtattgtgacgcttcgcgccaaggattggggtgcgtgctcatgcaggacggtcatgtggtggcctatgcctcacgccagcttcgacctcatgaaggcaactaccctacccatgacttggaattagccgcggtggttcatgctctaaaaatctggcggcactatctcattgggaatcgctgtgaaatatatactgatcataagagtttgaaatacatcttcacccagtcggatctgaatcttcggcaaaggagatggttagaactcatcaaggattatgatgtgggaattcactatcatcctggtaaggccaacgtggtcgccgacgctctaagtcgaaagagccattgcaacactcttaacgtccgtggcattccaccggaacttaatcaacagatggaagccctgaacctaagcatagttagtcgtggattcttggctacgctggaagccaagcctaccttgctcgatcaaatctgcaaggctcagaagaatgacccggatatgcatgggctcctcaagaatatgaaacagggtaaagccgctggtttcacagaggatgaacatggaaccctatggaacggaaatcgggaagctcacgaaagtccttattccatccaccctggcagtacgaagatgtacctagacttgaaggagaaatactggtgggttagtatgaagcgggaaattgcagagttcgtggccctctgtgatgtgtgccagcgtgtcaaggcagagcaccaacgaccggccggacttctccaacctctccaagtaccagaatggaaatgggatgaaattgggatggattttatcaccggacttccaaaaacccaaggcggatatgattctatatgggtagtcgtggatcgactaaccaaggtagcacggttcattcccgtaaagaccacctatggagggaacaaactagctgaactctacttcgctaggatcgtcagtctgcatggcgtccccaagaaaattgtatctgatcggggaagccagttcacctctcacttttggaagaagctccaagaagagctgggtacccgattaaatttcagcaccgcgtatcacccgcagacagatggacagaccgagcgtctaaatcagatcctagaggatatgcttcgcgcatgtgtcctagatttcgggaagacctgggataagagtctcccctatgccgagttctcctacaataacagttatcaagccagcatacaaatggcaccttatgaagcgttgtatgggcgcaaatgccggacaccgctattgtgggaccaagttggagaaagccaagtgttcgggactgatatcctgagagaagctgaagcgaaggactga

SEQ ID NO: 14196 - DNA, 6050 bp, Oryza sativa
  Clone ID: TFbOSC401018j.C1.o37.np
gatggagccgagatcgccgcgccggtttccttcccctccggccgccctctctcactcccaacactatttaagcactccccgtgcctccctcctccgtttccgacccttgccgctttctctccccgtcggaatcgagctcgcgccgtcgtcctctctctccgccgttgccgccgagcttcggttcgccgccgtcgtcgccccggacctcctcccgcttcggcatcgcctccttcggcttcgccgcgtcctcgtcgacctcgtccaccccttcgtttcgcccgccgaccgccggaacgccgccgtcctcgtcgacccgagccgcgccgccgcctctctccgcttcggtcgccgttcccgtcatcgccgtcgacccggggtgagccgaggactgccatctcgcttcccccttccctcccctctctcgggcgccgctccgtcgcgccggaggtcgccgccggtgaccatcggggcgcgggcgcgccgcctcccgtcggccgtgccggcgaggccgccatcgggcgcgccccgcggctgccatgtggggcccggctgtcagccgcccgcgccctcgggtgcggctgacgcgtgggacccacggcgccggccggcgcaagccgtgtgcacccggtccaccgtggacccacctcggccatataaggaccggtgttcgggcctctgttgcaaagcactaccgtacttccacatgtctagtggggcaaatgaaggctacacgagctgcggcccggtagtcgagatgtcatggcacagggccggtgtcctgctgctaggggctcagtcctgcctgcctgtcccgggggttccggccgtagatgggattgggtcgatgtacacctctgatcagagtaaaatctattcgaatagccgcgccctcggttatgggcaagccgagcaatgtacccaaatggccggcagcgtcagccgtcgtggtttggacatgactggcttcgtcttggagctgcggggcatgtgcgtggtcctggggtatccacatggagtggactaccaggccaggccatttccggagcaggagggtgacgatgcagagccccacgctgcttgggaggtcactgcagtgatcctcgctggctctcccgagcggacttcgctgacagtcaccgcgggtggggactccttccccgccgcttgccagagcgccgctctcctcgccatcggcactcttcaccagcgctacccggacgagttgcagcactcgccctaccgctaccaccctcgtcgcggaggagcccgcgactacgccaccttccgggacgctagctcggaggatgacgctaccatcgtgcacctggcgcgcatggtggaggcgtacgacgcggctcgtatcgacttccatcagatggtgcgccgtgggatggtcgagaacaacatgaagatcctggagctgcgtcaggagaacctgcagctcaagaaggacctagatgcggtggaggcgcagctgcatcagctcaagatcgcccagggagagatctgccgccccaagcatcgccgcgtctaccgcagccagaagatcaccgcccgcaagagcacctccaggcccgagcttgttcgtcagtccctggcgtggacttgcttcgtggagacccctcgtgccgagcccgcgcccgtggttccccaggagggggaagcctccggcgttggtagcacggaggatgcgctgttgctcaccttccatggtgatgaccaggagaaatgctgccaccagtgatggcaaccaacccgaagacagcaaccacaacaaccatggcagcccacctccacctcctcctccgcctccaccaccaccaccagataccaacgccattctcacccaaatcctcgcccagcaggccaacatgatgactgcttttctccaccacctccaaaatccgccacaacataatgctccaccaccacctccccaacactctaaactcgccgagttcctccgcatctgtccacctaccttctctagctccaacaaccccgtggatgcgttggattggttgcatgccgtggggaaaaagctagacactgtgcagtgcagcgatgaggagaaagtcatcttcgccgcccaccagctgcagggacccgcatctctatggtgggaccatttccaggctacgcagccagagggacagcctattacatgggctcgcttcaccgccgctttccgaagaacccatgtgcccgccggagtcgtggcccttaagaaaagggaattccgagagttgaagcaaggcaaccgctccgtgatggagtatttgcacgagttcaacaacctggcccgttacgctccggaggatgtgcgggaagatgaggagaagcaagagaagttcctggcaggaatggaccctgagctgtccgtctgtctagtctccggggattatccggatttccaacgtctggtggacaagagcatccgcttggaagccaagcacaaggaactggagtcgcacaagcgccgcttggcgaatttccacaaccaacagggtgctaaccaaagggtccgctacaccaatccctatccagggggatcctcctcgcagcagcaacagcagcagcagcaacctcgctccgcgcctcgacctcaattcgtggtgcgcgtcccacagccgcagcaggagcagaatcaacaagggactcgtgcgccccgtcctcctccaccgactgtgcagcctggtcaaggccgcagggacgctcaaggtccgcagcgtctgtgcttcaactgcttcgagcccgggcactttgcggataaatgcccgaagccaaggcgtcagcaaggccaagcgcctccccgccccaacaacggtggtaaggacgtcattcggggtcgtgtgaaccatgtgacggccgaggacgtgctgacaactccagacgtcatcgttggtacgttcctcattcattccatccctgctaccattttgttcgactctggagcttcccactcatttatatctgtgccattcgtggggagaaatcagttgggggtagaaaggcttagaaaccctctgctcatcaccacccctggaggggttatgacagcaaagtattatagccctgccgtccctatagaaattcaggggattccttttccctcggatctgattctgctaggcaccaagaacttggatgtgatccttgggatgaattggttggctcaattccaaggagtagtggattgcgcgagacgcactgtcactctgtaccgagggccggaacaaccggttgttttctttgcacccccaacctcagtcagaagttcagaacttcatcagatagaactgtcagaaattcccatcgtcagagagttcggagacgtgtttccggaagaactacctggtatgccgcctaagcgagagattgagttccggatagatcttgctccaggaaccgctcctctgtacaagcgaccctaccgtatggcagcaaatgaattggccgaagttaagaaacagttggaagagctgaaagaaaaggggtatatacgtccaagtacttccccctggggtgctcctgtgatttttgtggagaagaaagacaagacgaagaggatgtgcgttgactacagagctctcaatgaagtcaccatcaaaaacaagtaccctcttccccggatcgatgatctgttcaatcagcttaaaggtgccactgtattctccaagattgatcttcgttccggatatcaccaattacgtattcgcgaagaagatattccgaagaccgcattcaccacgcgatacggactgtatgaattcacggtgatgtcgttcggtttaaccaatgctcctgccttcttcatgaacttaatgaacaaagtgttcatggaatacttggataagtttgtggtggttttcattgatgacattctgatatactcacaatcagaggaagaccatcagcaccatctccgtctggtattgggaaagctgcgggaacatcaattgtatgccaaacttagcaagtgtgagttctggttgtccgaagtcaaattcttagggcacgtgatatctgctaaaggagttgctgtggaccccgaaacagtgatcgccgtcaccgattggaagcaacccaagacagtcactcaagttcgcagtttcttaggtttggcaggatactaccgaaggttcatcgagaacttctccaaaatcgctcgacccatgacacagttgttgaagaaagaagagaaatttgtgtggagcccgcaatgcgagaaggcgtttcaaactctcaaagaaaagctggtttcctcgccggtgttaatcttgccagatactcacaaggacttcatggtgtattgtgacgcttcgcgccaaggataggggtgcgtgctcatgcaggatggttatgtggtggcctatgcctcacgccagcttcggcctcatgaaggcaactaccctactcatgatttggagttagccgcggtggttcatgccctaaaaatctggtggcactatctcattgggaatcgctgtgaaatatatactgatcataagagtttgaaatacatcttcactcagtcggatctgaatcttcggcaaaggagatggttagaactcatcaaggattatgatgtgggaattcactatcatcctggtaaggccaacgtggttgccgacgctctaagtcgaaaaggccattgcaacactcttaacgtccgtggcattccacccgaacttaatcaacagatggaagccctgaacctaagcatagttagtcgcggattcttggctgcgctggaagccaagcccaccttgctcgatcaaatccgcgaggctcagaagaatgctccagacatgcatggactcctcaagaatatgaaacagggtaaagccgctggtttcacagaggatgaacacggaaccctatggaacggaaatcgacgtgtcaaggcagagcaccaacgaccggccggacttctccaacctctccaagtacctgaatggaaatgggatgaaattgggatggatttcatcaccggacttccaaaaacccaaggtggatatgattctatatgggtagttgtggatcgattaaccaaggtagctcgattcattcctgtgaagaccacctatagagggaacaaactagccgaactctacttcgctaggatcgtaagtctccatggcgttcctaagaaaatcgtatctgataggggaagccaattcacctctcacttttggaagaagctccaagaagagctgggtacccgattaaacttcagcacagcgtatcacctgcagacagatgggcagaccgagcgtctaaatcagatcctagaagatatgcttcgcgcatgtgtcctggatttcgagaagacctgggataagagtctcccctatgccgagttctcctacaacaacagctatcaagccagcatacaaatggcaccttatgaagcgttgtatgggcgcaaatgccggacaccgctaatgtgggatcaagttggggaaagccaagtgttcgggactgatatcctgagagaagctgaagctaaagtcagaaccattcgggataatctaaaggtggcacggtcccggcagaaaagttatgcagataaccgtcgccgtgacctggaattcgcagtggacgattttgtatatcttcgggtcacgccattgcgaggtgtacacaggtttcggacaaaagggaagctcgcacctcggtatgtgggtcctttccgtatcgttgctcgacgcggagaagtcgcttaccaattggagctgcccgcctccttgggcaacgtgcataatgtgttccatgtgtcgcaactcaagaaatgccttcgagtgccatccgagcaggccgactcagagcaaattgaagttcgcgaagacttgacctacgtggagaggccagtgaagatcctggacaccatggagcgcaggaccaggaaccgggtaatccgtttttgcaaggaccagtggagcaaccacgccgaagaagaagctacctgggagcgcgaagacgagctgaaggcagcccatccagatctcttcgccagttcttccgaatctcggggtcgagattccgtt

SEQ ID NO: 14197 - DNA, 3143 bp, Oryza sativa
  Clone ID: TFbOSC401054j.C1.o1.fg
atgggttggaaactatgtcacgtcttccgcccgtataccgtggtgatggccggcagcgtcacccgtcgtggtttgagcatgactggcttcgtcttggagctgcggggcatgtgcgtggtcttggggtatccacatggagtggattaccaggccaggccgctcccggagcaggagggtgaggatgcagagcctcacgctggttgggaggtcactgcagtgatcctctccggctctcccgagcggacttcgctggcagtcaccgcgggtggagattccttccccgccgcttgccagaacgccgctctcctcgccatcggcacccttcaccagcgctacccggacgagttgcagcactcgccctaccgctaccaccctcgtcgcggaggagcccgcgactacgccaccttccgagacgccagctcggaggatgacgccaccgtcgtgcacctggcacgcatggtggaggcgtacgacgcggctcgtatcgacttccatcagatggtgcgccgtggcatggtggagaacaacctgaagatcctggagctgcgtcaggagaatctgcagctcaagaaggacctcgacgcgttggaggcgcagctgcatcagctcaagatcgcccagggagaggacagccgccccaagcgtcgccgcgtctgccgcagccagaagatcaccgcccgcaagagcacctccaggcccgagcttgttcgtcagtccctggcgtggacctgcttcgtcgagacccctcgtgccgagcctgcgcccgtggttccccaggagggggaagcctccggcgttggtagctcggagggtgcgctgttgctcaccttccgtcctggcccgtcgcagcgctctctttctctgtttgctggttctgtgtggggttttcagatggtgacgaccaggagaaatgttaacaccggtgaaggcaaccaacccgaaggcagcaaccacaaccaccaaggcaatccacctccacctccacctccgcctccaccaccaccgccagacaccaacgccattctcacccaaatcctcgcccagcaagccaacatgatgaccgctttcctccaccacctccaaaacccgccacaacagaatgctccaccaccacctccccaacactctaaactcgccgagttcctccgcatccgcccacctaccttctccagctccaacaaccccgtggatgctttggattggttgcatgccgtggggaagaagctagacacggtgcagtgcagtgatgaggagaaagtcgtcttcgccgcccatcagctgcagggacccgcatctctctggtgggaccacttccaggctacgcagccagagggacagccgattacttgggctcgcttcaccgccgctttccggagaacccatgtgcccgctggagtcgtggctcttaagaaaagggaattccgagagttgaagcaaggcaaccgctccgtgatggagtatttgcatgagttcaacaatctggcccggtacgctccgcaggatgtgcgggaagacgaggagaagcaggagaagttcttggcaggaatggaccctgagctgtccgttcgtctagtctctggggactatcctgattttcaacgactggtggacaagagcatccgcttggaagccaagcacaaggagctggaatcgcacaagcgccgcttggcgaatttccgcaatcaacagggtgctaaccagagggtccgctacaccaatccctacccagggggatcctcctcgcagcagcagcagcagcagcagcaacctcgctccgcgcctcgacctcaattcgtggtgcgcatcccacagccgcagcagcagcagaatcagcaagggactcgtgcaccccgtcctcctacgccaactgtgcagcccgttcaaggccgcagggacgctcaaggtcagcagcgtctgtgcttcaactgcttcgagcccgggcactttgcggataaatgcccaaagccaaggcgtcagcaaggccaagcgcctccccgctccaacaacggcgggaaggatgtcattcggggccgtgtgaatcatgtgacggccgaggacgtgctgacaactccagacgtcatcgttggtacgttcctcgttcattccatccctgctactattttgttcgactctggagcttcccactcgtttatatctgtgtcattcgtggggagaaatcagttgggggtagaaaggcttagaaaccctctgctcatcaccacccctggcggggttatgacagcaaagtattatagccctgccgttcctatagaaattcaggggattccttttccctcggatctgattctgctagacaccaagaacttggatgtgattcttgggatgaattggttggcacaattccaaggagtagtggattgcgcgagacgcactgttactctgtaccgagggccagaacaaccggttgttttctttgcacctccaacctctgtcagaagttcagaactgcatcagataggtctgtcagaaatccccatagtcagagagttcggagacgtgtttccggaagaactacctggtatgccgcccaagcgagagattgagttccggatagatcttgctccaggaaccactcctctgcacaagcgaccctaccgtatggcagcaaatgaactggccgaagtaaagaaacagttggaagagttgaaagaaaaggggtacatccgtccgagtacttccccatggggtgctcctatgatttttgtagagaagaaagacaagacgaagaggatgtgcgtcgactacagagctctcaatgaagtcaccatcaaaaacaagtaccctcttccccggatcgatgatctgttcgatcagcttaaaggtgccactgtattctccaagattgatcttcgttccggatatcaccaattacgtattcgggaagaagatattccgaagaccgcattcaccacgcgatacgggctgtatgaattcacggtgatgtcgttcggcttgaccaatgctcctgccttcttcatgaacttaatgaacaaagtgttcatggaatacttggacaagtttgttgtggttttcatcgatgacattctgatatactcacaatcagaggaagaccatcagcaccatctccgtctggtgttgggaaagttgcgggaacatcaatt

SEQ ID NO: 14198 - DNA, 5418 bp, Oryza sativa
  Clone ID: TFbOSC401054j.C1.o116.gm
atggttatgccgatggtgacgaccaggagaaatgttaacaccggtgaaggcaaccaacccgaaggcagcaaccccaaccaccaaggcaacccacctccacctccacctccacctccaccaccaccaccagataccaacgccattctcactcaaatcctcgcccaacaggcaaacatgatgactgctttcctccaccacctccaaaacccgccacaacagaatgctccaccaccacctccccaacactctaaactcgccgagttcctccgcatccgcccacctaccttctctagctccaacaaccccgtggatgcgttggactggttgcatgccgtggggaaaaagctagacacggtgcagtgcagcgatgaggagaaagtcgtcttcgccgcccatcagctgcagggacccgcatctctatggtgggaccacttccaggctacgcagccagaggggcaacctattacttggactcgcttcaccgccgctttccggagaacccatgtgcccgctggagtcgtggctcttaagaaaagggaattccgggagttgaagcaaggcaaccgctccgtgatggagtatttgcatgagttcaacaatctagcccgttacgctccggaggatgtacgggaagatgaggagaagcaagagaagttcttggcaggaatggaccctgagctgtccgtccgtctagtctctggggactatcctgattttcaacgactggtggacaagagcatccgcttggaggccaagcacaaggagctggaatcgcacaagcgccgtttggcgaatttccgcaatcaacagggtgctaaccagagggtccgctacaccaatccctacccagggggatcctcctcgcagcagcagcaacagcagcagcaacctcgctccgcgcctcgacctcaattcgtggtgcgcgtcccacagccgcagcagcagcagaatcaacaagggactcgtgcaccccgtcctcctacgccaactgtgcagcccgttcaaggccgcagggacgctcaaggtcagcagcgtctgtgcttcaactgcttcgagcccgggcactttgcggataaatgcccgaagccaaggcgtcagcaaggccaagcgcctccccgctccaacaacggcgggaaggatgtcattcggggccgtgtgaatcatgtgacggccgaggacgtgctgacaactccagacgtcatcgttgaacttcatcagatagaactgtcagaaattcccatcgtcagagagttcggagacgtgtttccggaagaactacccggtatgccgcccaagcgagagattgagttccgaatagatcttgctccaggaaccactcctctgcacaagcgaccctaccgtatggcagcaaatgaactggccgaagttaagaaacagttggaagagttgaaagaaaaggggtacatacgtccgagtacttccccatggggtgctcctgtgatttttgtagagaagaaagacaagacgaagaggatgtgcgttgactacagagctctcaatgaagtcaccatcaaaaacaagtaccctcttccccggatcgatgatctgttcgatcagctcaaaggtgccactgtattctccaagattgatctccgttccggatatcaccaattacgtattcgtgaagaagatattccgaagaccgcattcaccacgcgatacgggctgtatgaattcacggtgatgtcgttcggtttgaccaatgcacctgccttcttcatgaacttaatgaataaagtgttcatggaatacttggataagtttgttgtggttttcattgatgacattctgatatactcacaatcagaggaagaccatcagcaccatctccgtctggtgttgggaaagttgcgggaacatcaattgtatgccaagcttagcaagtgtgagttctggttgtccgaagtcaaattcttagggcacgtgatatctgcaaaaggagttgctgtggatcccgaaacagtgaccgccgtcaccgactggaagcaacccaagacagttacccaagtccgcagtttcttaggtttggcaggatactaccggagattcatcgagaacttctccaagatcgctcgacccatgacgcagttgttgaagaaagaagagaaatttgtgtggagcccgcaatgcgagaaggcgtttcaaactctcaaggaaaagctggtttcctcgccagtgttaatcttgccggatactcgcaaggacttcatggtgtattgtgatgcttcgcgccaaggattggggtgcgtgctcatgcaggacggtcatgtggtagcctatgcctcacgccagctacgtcctcatgaaggcaactaccctacacatgatttggagttagccgcagtagttcatgctctaaaaatctggcggcactatctcattgggaatcgctgtgaaatctataccgaccataagagtttgaaatacatcttcactcagtcggacctgaatcttcggcaaaggagatggttagaactcatcaaggactatgatgtgggaattcactatcatcctggtaaggccaacgtggttgccgacgctctaagtcgaaagagccattgcaacaatcttaacgtccgtggcattccacccgaacttagtcaacagatggaagccctgaacctaaacatagttggtcgtggattcttggctgcgttagaagccaagcctaccttgctcgatcaaatccgcgaggctcagaagaatgatccggacatgcatggactcctcaagaatatgaaacagggtaaagccgctggtttcacagaggatgaacacggaaccctatggaacggaaatcggcgtgtcaaggcagagcaccaacgaccggccggacttctccaaccactccaagtacccgaatggaaatgggatgaaattgggatggatttcatcactggacttccaaagacccaaggcggatatgattccatatgggtagttgtggatcgattaaccaaggtggctcgatttattcctgtgaagaccacctatggagggaacaaactagcggagctctacttcgctaggatcgtgagtctccacggcgttcccaagaaaatcgtatctgataggggaagccaattcacctctcacttttggaagaagctccaagaagagctgggcactcgattgaatttcagcaccgcctatcacccgcagacagatggacagaccgagcgtctaaatcagatcctagaagatatgctccgcgcatgtgtactagatttcgggaagacctgggataagagtctcccctatgccgagttctcctacaataacagctatcaagccagcatacaaatggcaccatatgaagcgttgtacgggcgcaaatgccggacaccgctcctgtgggaccaagttggggaaagccaagtgttcgggactgatatcctgagagaagctgaagctaaagtcagaatcattcgggataatctaaaggtggcacagtcacggcagaaaagttatgcagataaccgtcgccgtgatctggaattcgcagtggatgactttgtgtatcttcgggtcacgccattgcgaggtgtacacaggtttcagacgaaagggaagcttgcacctcggtatgtgggtcctttccgtatcgttgctcgacgcggagaagtcgcttaccagttggagctgcccgcctccttgggcaatgtgcatgatgtgttccatgtgtcgcaactcaagaaatgtcttcgagtgccgtccgagcaggccgactcagagcaaattgaagttcgcgaagacttgacctatgtggaaaggccagtgaaaatcctggacaccatggagcgcaggaccaggaaccgggtaatccgtttttgcaaggtccagtggagcaaccacgccgaagaagaagctacttgggagcgtgaagacgagctgaaggcagcccatcccgatctcttcgccacggcaaagggaggtcctgtcaaaaaggtggctaagaagaaaggactcgtcgatgtcgctcgcgtttttagcgacgatgagtcctccgacgggactccgacctcgcccgctggtcgcagcctggatctttcggccgcccccattccttcactcggcgtcgctggagtgggcggtagtaccgccgctggggcttcggcttctgcggaaaggattgtgacggccgcggcgaaagtattcggcagtcctccgcatcagccggttgcgtcgccgctgattgaggcgaagggaaagagagcggtcgctgagacgtccacttcggaatattcgctctcggtaccccgcttcgcccctggcgatttcgagacgcgggcggacctccttccttttgtggagggggtaagcaatcttgtactgcccgccagtgccccgagcttgttcaccgaactgaatgagttcgatgaggggtgtactgctataaaaagcctggctgttcggatcctcgcggctcactgctcaatggagcgaaccgtgcgagcccgacttgatgggttcaaaagccatcttcgggccaaggatgatgaactaggccgtaaaaatttggagatggacgcccttgccaactcccttaaggaggcgaaggctgaaaacaagcggctccaatcggaactggagaaagggaaagaagccagggccgaagtcgatcgcttaaaggccgaactggagaaagagaaggcccacaccgccgtgctcatagattattacagcctcaccgagccgaagatggaggctcttcggcaggaggttcgcaaggccgaagcaagcgctgcagaggagtcgtggcggttttcgcgggagatagtgaaaaccaccgagtccgcgcggacagcgtgccaaacgcttcgcctcgcccgtattgacatgggcgcgaaagtgtggggtgtcccctccgaagatgcatcagccttcgacttctccgaatggacccaacaggctggtggttcggtttccgactgcgccaccgcatacggcgactgctgtgcgcgcgtgtcagcgacctttaccatgggcctcctgcagcagttcggctgcgagcacatcgccgagttccccaagtacgcgaagggggattgggaaatcagtgcgcaagacatttcgcccacacttcgtgcgtggcgaaaacaattttggcagaaggacggccgctccgccgctaaggcgcgccttttggagcagctggcgaaagctgaggcggcggacctttgtgaagatgaaggcgcggcggccagagggggtggaggcgatgcccgggaccatgcagagatcatactggggcgcggcttggcttcggccatgacgctggcaactttcgcacttcttgatttgctcaacacagactttcaacacagtgggccaataaactccttgtctaaatactttggaggccactgttcttgcagcctggtgcgcgccacatag

SEQ ID NO: 14199 - DNA, 5466 bp, Oryza sativa
  Clone ID: TFbOSC401054j.C1.o41.fg
atgtcatggcacagggccggtgtcctgctgctaggggctcagttctgcctgcctgtcccgggtgttccggccgtaggcaggattgggtcggtactcttgtctatggctaggatgggttggaaactatgtcacgtcttccgtctatataccgtggtgatggccggcagcgtcacccgtcgtggtttggacatgactggcttcgtcttggagttgcggggcatgtgcgtggccctggggtatccacacggagtggactaccaggccaggccgctcccggagcaggagggtgacgatgcggagccccgcgctggttgggaggtcactgcagtgatcctcgctggctcttctgagcggacttcgctgacagtcaccgcgggtggcgattccttccccgccgcttgccagagcgccgctctcctcgccatcggcactcttcaccagcgctacccggacgagttgcagcactcgccctaccgctaccaccctcgtcgcggaggagcccgcgactacgccaccttccgggatgctagctcggaggatgacgctaccatcgtgcacctggcgcgcatggtggaggcgtacgacgcggctcgtatcgacttccatcagatggtgcgccgtgggatggtcgagaacaacatgaagatcctggagctgcgtcaggagaacctgcagctcaagaaggacctcgacgcggtggaggcgcagctgcatcagctcaagatcgcccagggagagatctgccgccccaagcgtcgccgcgtctgccgcagccagaagatcaccgcccgcaagagcacctccaggcccgagcttgttcgtcagtccctggcgtggacttgcttcgtcgagacccctcgtgccgagcccgcgcccgtggttccccaggagggggaagcctccggcgttggtagcacggaggttgtgtggggcatggttatgccgatggtgacgaccaggagaaatgctaacaccggtgatggcaaccaacccgaatgcagcaaccacaaccaccagggcaacccacctccacctcctcctcctcctccaccaccaccaccagacaccaacgccattctcacccaaatcctcgcccagcaagccaacatgatgaccgctttcctccaccacctccaaaacccgccacaacaaaatgctccaccaccacccccacaacactctaaactcgccgaattcctccgcatccgcccacctaccttctctagctccaacaaccccgtggatgctttggattggttgcatgccgtggggaaaaagttaggcactgtgcagtgcagcgatgaggagaaagtcatcttcgccgcccaccagctgcaaggacccgcatctctatggtgggaccacttccaggctacgcagccagagggacagcctattacttgggctcgcttcaccgccgctttccggagaacccatgtgcccgccggagtcgtggcccttaagaaaagggaattccgagagttgaagcaaggcaaccgctccgtgatggagtatttgcatgagttcaacaatctggcccgttacgctccggaggatgtgcgggaagatgaggagaagcaagaaaagttcttggcaggaatggaccccgagctgtccgtccgtctagtctctggggattatccggattttcaacgactggtggacaagagcatccgcttggaagctaagcacaaggagctggagtcgcacaagcgtcgcttggcgaatttccgcaatcaacagggtgctaaccaaagggtccgctacaccaatccctatccagggggatcctcctcgcagcagcaacaacagcagcagcaacctcgctccgcgccccgacctcaattcgtggtgcgcgtcccacagccgcagcagcagcagaatcagcaagggactcgtgcgccccgtcctcctacgccaactgtgcagcctggccaaggccgcagggacgctcaaggtcagcagcgtctatgcttcaactgcttcgagcccgggcactttgcggataaatgcccaaagccaaggcgtcagcaaggccaagcgcctccccgctccaacaacggcgggagggatgtcattcggggtcgtgtgaatcacgtgacggccgaggacgtgctgacaactccggacgtcatcgttggtacgttcctcgttcattccatccctgctacaattttgttcgactctggagcttcccactcgtttatatctgtgccatttgtggggagaaatcagttgggggtagaaaggcttaggaaccctctgctcatcaccacccctggaggggttatgacagcaaagtattatagccctaccgtccctatagaaattcaggggattccttttccctcggatctgattctgctagacaccaagaacttggatgtgatccttgggatgaattggttggctcaattccaaggagtagtggattgcgcgagacgcacggtcactctgtaccgagggccggaacaaccggttgttttctttgcacccccaacctctgtcagaagttcagaacttcatcagatagaactgtcagagattcccatcgtcagagagttcggagacgtgtttccggaagaactacctggtatgccgcccaagcgagagattgagttccggatagatcttgctccaggaaccactcctctgtacaagcgaccctaccgtatggcagcaaatgaactggccgaagtcaagaaacagttggaagagttgaaagaaaaggggtatatacgtccgagtacttccccatgggatgctcctgtgatttttgtagagaagaaagacaagacgaagaggatgtgcgtcgactacagagctctcaatgaagtcaccatcaaaaacaagtaccctcttccccggatagatgatctgttcgatcagcttaaaggtgccactgtattctccaagattgatcttcgttccggatatcaccaattacgtattcgtgaagaagatattccgaagaccgcattcaccacgcgatacgggctgtatgaattcacggtgatgtcgttcggtttgaccaatgcacctgccttcttcatgaacttgatgaacaaagtgttcatggaatacttggataagtttgttgtggttttcattgatgacattctgatatactcacaatcagaggaagaccatcagcaccatctccgtctggtattgggaaagctgcgggaacatcaattgtatgccaaacttagcaagtgtgagttctggttgtccgaagtcaaattcttagggcacgtgatatctgctaaaggagttgctgtggatcccgaaacagtgatcgccgtcaccgattggaagcaacccaagacagtcactcaaattcgcagtttcttaggtttggcagggtactatcggagattcatcgagaacttctccaaaatcgctcgacccatgacacagttgttgaagaaagaagagaaatttgtgtggagcccgcaatgcgagaaggcgtttcaaactctcaaggaaaagctggtttcctcgccagtgttaatcttgccggatactcgcaaggacttcatggtgtattgtgacgcttcgcgccaaggattggggtgcgtgctcatgcaggacggtcatgtggtagcctatgcctcacgtcagctacgacctcatgaaggcaactaccctacccatgatttggagttagccgcggtggttcatgctctaaaaatctggaggcactatctcattgggaatcgctgtgaaatatataccgaccataagagtttgaaatacattttcacccagtcggatctgaatcttcggcaaaggagatggttagaactcatcaaggactatgatgtgggaattcactatcatcctggtaaggccaacgtggttgccgacgctctaagtcgaaagagccattgcaacactcttaacgtccgtggcattccacccgaacttagtcaacagatggaagccctgaacctaagcatagttggtcatggagtcttggctgcgttggaagccaagcctaccttgctcgatcaaatccgcgaggctcagaagaatgatccggacatgcatggactcctcaagaatatgaaacagggtaaagccgctggtttcacagaggacgaacacggaaccctatggaacggaaatcgggtatgcgttccagatgacagagaacttaaacagctgatactacaggaagctcacgaaagtccttattccattcacccgggcagtacaaagatgtacctagacttgaaggagaaatactggtgggttagcatgaagcgggagattgcagagttcgtggccctgtgtgatgtgtgccagcgtgtcaaggcagagcaccagcgaccggccggacttctccaacctctccaagtaccagaatggaaatgggatgaaattgggatggatttcatcaccggacttccaaaaacccaaggcggatatgattctatatgggtagttgtggatcgattaaccaaggtagctcgatttattcctgtgaagaccacctatggagggaacaaactagcggagctctacttcgctaggatcgtgagtctccatggcgttcccaagagaatcgtatctgataggggaagccaattcacctctcacttttggaagaagctccaagaagagctgggtactcgattgaatttcagcaccgcctatcacccgcagacagatggacagaccgagcgtctaaatcagatcctagaagatatgcttcgcgcatgtgtcctagatttcgggaagacctgggataagagtctcccctatgccgagttctcctacaacaacagttatcaagccagcatacaaatggcaccttatgaagcgttgtatgggcgcaaatgccggacaccgctcttgtgggaccaagttggagaaagccaagtgttcgggactgatatcctgagagaagctgaagctaaagtcagaatcattcgggataatctaaaggtggcacagtcccggcagaaaagttatgcagataaccgtcgccgtgacctggaattcgcagtggatgattttgtgtaccttcgggtcacgccattgcgaggtgtacacaggtttcagacaaaagggaagctcgcacctcggtatgtgggtcctttccgtatcgttgctcggcgcggagaagtcgcttaccagttggagctgcccgcctccttgggcaacgtgcatgatgtgtttcatgtgtcgcaactcaagaaatgccttcgagtgccatccgagcaggccgactcagagcaaattgaagttcgcgaagatttgacctacgtggagaggccagtgaaaatcctggataccatggagcgcaggaccaggaaccgggtaatccgtttttgcaaggtccagtggagcaaccacgccgaagaagaagctacctgggagcgtgaagacgagctgaaggcagcccatccagatctcttcgccagttcttccaaatctcggggtcgagattccgtttaa

SEQ ID NO: 14200 - DNA, 5466 bp, Oryza sativa
  Clone ID: TFbOSC401054j.C1.o71.fg
atgtcatggcagagggttggtgccctgctgctaggggctcagtcttgcctgcctgtcccgggggttccggccgtaggcaggattgggtcggtactcttgtctatggctaggatgggttggaaactatgtcacgtcttccgtctgtataccgtggtgatggccggcagcgtcacccgtcgtggtttggacatgactggcttcgtcttggagttgcggggcatgtgcgtggccctggggtatccacacggagtggactaccaggccaggccgctcccggagcaggagggtgacgatgcggagccccgcgctggttgggaggtcactgcagtgatcctcgctggctcttctgagcggacttcgctgacagtcaccgcgggtggcgattccttccccgccgcttgccagagcgccgctctcctcgccatcggcactcttcaccagcgctacccggacgagttgcagcactcgccctaccgctaccaccctcgtcgcggaggagcccgcgactacgccaccttccgggatgctagctcggaggatgacgctaccatcgtgcacctggcgcgcatggtggaggcgtacgacgcggctcgtatcgacttccatcagatggtgcgccgtgggatggtcgagaacaacatgaagatcctggagctgcgtcaggagaacctgcagctcaagaaggacctcgacgcggtggaggcgcagctgcatcagctcaagatcgcccagggagagatctgccgccccaagcgccgccgtgtctgccgcagccagaagatcaccgcccgcaagagcacctccaggcccgagcttgttcgtcagtccctggcgtggacttgcttcgtcgagacccctcgtgccgagcccgcgcccgtggttccccaggagggggaagcctccggcgttggtagcacggaggttgtgtggggcatggttatgccgatggtgacgaccaggagaaatgctaacaccggtgatggcaaccaacccgaatgcagcaaccacaaccaccagggcaacccacctccacctcctcctcctcctccaccaccaccaccagacaccaacgccattctcacccaaatcctcgcccagcaagccaacatgatgaccgctttcctccaccacctccaaaacccgccacaacaaaatgctccaccaccacccccacaacactctaaactcgccgaattcctccgcatccgcccacctaccttctctagctccaacaaccccgtggatgctttggattggttgcatgccgtggggaaaaagttaggcactgtgcagtgcagcgatgaggagaaagtcatcttcgccgcccaccagctgcaaggacccgcatctctatggtgggaccacttccaggctacgcagccagagggacagcctattacttgggctcgcttcaccgccgctttccggagaacccatgtgcccgccggagtcgtggcccttaagaaaagggaattccgagagttgaagcaaggcaaccgctccgtgatggagtatttgcatgagttcaacaatctggcccgttacgctccggaggatgtgcgggaagatgaggagaagcaagaaaagttcttggcaggaatggaccccgagctgtccgtccgtctaatctctggggattatccggattttcaacgactggtggacaagagcatccgcttggaagctaagcacaaggagctggagtcgcacaagcgtcgcttggcgaatttccgcaatcaacagggtgctaaccaaagggtccgctacacccatccctacccagggggatcctcctcgcagcagcaacaacagcagcagcaacctcgctccgcgcctcgacctcaattcgtggtgcgcgtcccacagccgcagcaacagcagaatcaacaagggactcgtgcgccccgtcctcctacgccaactgtgcagcctggccaaggccgcagggacgctcaaggtcagcagcgtctatgcttcaactgcttcgagcccgggcactttgcggataaatgcccaaagccaaggcgtcagcaaggccaagcgcctccccgctccaacaacggcgggagggatgtcattcggggtcgtgtgaatcacgtgacggccgaggacgtgctgacaactccggacgtcatcgttggtacgttcctcgttcattccatccctgctacaattttgttcgactctggagcttcccactcgtttatatctgtgccatttgtggggagaaatcagttgggggtagaaaggcttaggaaccctctgctcatcaccacccctggaggggttatgacagcaaagtattatagtcctgccgtccctatagaaattcaggggattccttttccctcggatctgattcttctagacacaaagaacttggatgtgatccttgggatgaattggttggctcaattccaaggagtagtggattgcgcgagacgcactgtcactctgtaccgagggccagaacaaccggttgttttctttgcacccccaacctctgtcagaagttcagaacttcatcagatagaactgtcagagattcccatcgtcagagagttcggagacgtgtttccggaagaactacctggtatgccgcccaagcgagagattgagttccggatagatcttgctccaggaaccactcctctgtacaagcgaccctaccgtatggcagcaaatgaactggccgaagtcaagaaacagttggaagagttgaaagaaaaggggtatatacgtccgagtacttctccctggggtgctcctgtgatttttgtggagaagaaagacaagacgaagaggatgtgcgttgactacagagctctcaatgaagtcaccatcaaaaacaagtaccctcttccccggatagatgatctgttcgatcagcttaaaggtgccactgtattctccaagattgatcttcgttccggatatcaccaattacgtattcgtgaagaagatattccgaagaccgcattcaccacgcgatacgggctgtatgaattcacggtgatgtcgttcggtttgaccaatgcacctgccttcttcatgaacttgatgaacaaagtgttcatggaatacttggataagtttgttgtggttttcattgatgacattctgatatactcacaatcagaggaagaccatcagcaccatctccgtctggtattggaaaagctgcgggaacatcaattgtatgccaaacttagcaagtgtgagttctggttgtccgaagtcaaattcttagggcacgtgatatctgctaaaggagttgctgtggatcccgaaacagtgatcgccgtcaccgattggaagcaacccaagacagtcactcaaattcgcagtttcttaggtttggcagggtactatcggagattcatcgagaacttctccaaaatcgctcgacccatgacacagttgttgaagaaagaagagaaatttgtgtggagcccgcaatgcgagaaggcgtttcaaactctcaaggaaaagctggtttcctcgccagtgttaatcttgccggatactcgcaaggacttcatggtgtattgtgacgcttcgcgccaaggattggggtgcgtgctcatgcaggacggtcatgtggtagcctatgccttacgtcagctacgaccttatgaaggcaactaccctacccatgattgggagttagccgcggtggttcatgctctaaaaatctggaggcactatctcattgggaatcgctgtgaaatatataccgaccataagagtttgaaatacattttcacccagtcggatctgaatcttcggcaaaggagatggttagaactcatcaaggactatgatgtgggaattcactatcatcctagtaaggccaacgtggttgccgacgctctaagtcgaaagagccattgcaacactcttaacgtccgtggcattccacccgaacttagtcaacagatggaagccctgaacctaagcatagttggtcatggagtcttggctgcgttggaagccaagcctaccttgctcgatcaaatccgcgaggctcagaagaatgatccggacatgcatggactcctcaagaatatgaaacagggtaaagccgctggtttcacagaggacgaacacggaaccctatggaacggaaatcgggtatgcgttccagatgacagagaacttaaacagctgatactacaggaagctcacgaaagtccttattccattcacccgggcagtacaaagatgtacctagacttgaaggagaaatactggtgggttagcatgaagcgggagattgcagagttcgtggccctgtgtgatgtgtgccagcgtgtcaaggcagagcaccagcgaccggccggacttctccaacctctccaagtaccagaatggaaatgggatgaaattgggatggatttcatcaccggacttccaaaaacccaaggcggatatgattctatatgggtagttgtggatcgattaaccaaggtagctcgatttattcctgtgaagaccacctatggagggaacaaactagcggagctctacttcgctaggatcgtgagtctccatggcgttcccaagagaatcgtatctgataggggaagccaattcacctctcacttttggaagaagctccaagaagagctgggtactcgattgaatttcagcaccgcctatcacccgcagacagatggacagaccgagcgtctaaatcagatcctagaagatatgcttcacgcatgtgtcctagatttcgggaagacctgggataagagtctcccctatgccgagttctcctacaacaacagttatcaagccagcatacaaatggcaccttatgaagcgttgtatgggcgcaaatgccggacaccgctcttgtgggaccaagttggagaaagccaagtgttcgggactgatatcctgagagaagctgaagctaaagtcagaatcattcgggataatctaaaggtggcacagtcccggcagaaaagttatgcagataaccgtcgccgtgacctggaattcgcagtggatgattttgtgtactttcgggtcacgccattgcgaggtgtacacaggtttcagacaaaagggaagctcgcacctcggtatgtgggtcctttccgtatcgttgctcggcgcggagaagtcgcttaccagttggagctgcccgcctccttgggcaacgtgcatgatgtgtttcatgtgtcgcaactcaagaaatgccttcgagtgccatccgagcaggccgactcagagcaaattgaagttcgcgaagatttgacctacgtggagaggccagtgaaaatcctggataccatggagcgcaggaccaggaaccgggtaatccgtttttgcaaggtccagtggagcaaccacgccgaagaagaagctacctgggagcgtgaagacgagctgaaggcagcccatccagatctcttcgccagttcttccgaatctcggggtcgagattccgtttaa

SEQ ID NO: 14201 - DNA, 5304 bp, Oryza sativa
  Clone ID: TFbOSC401058j.C1.o35.fg
atggatgaagtcgggggtcgatggacattctccagggcaaatgaaggctacacgagctgcggcccgatggccggcagcgtcacccgtcgtggtttggacatgactggcttcgttttggagctgcgaggcatgtgcgtggtcctggggtatccacacggagaggactaccaggccaggccgcttccggatcaggagggagacgacgcggagccccacgctgggtgggaggtcaccgcagtgatcctctctggctcccccgagcggacttcgctggcagtcaccgcgggtggagactccttccccgccgcttgccagaacgccgctctcctcgccatcggcacccttcaccagcgctacccggacgagttgcagcactcgccctaccgctaccaccctcgtcgcggaggagcccgcgactacgccaccttccgggatgctagctcggaggatgacgctaccatcgtgcacctggcacgcatggtggaggcgtacgacgcggctcgtatcgacttccatcagatggtacgccgcgggatggtcgagaacaacatgaagatcctggagctgcgtcaggagaacctgcagctcaagaaggacctcgacgcagtggaggcgcagctgcaccagctcaaggtcgcccagggagagatctgccgccccaagcgtcgccgtgtctgccgcagccagaagatcaccgcccgcaagagcacctccaggcccgagcttgttcgtcagtccctggcgtggacctgcttcgtcgagacccctcgtgccgagcctgcgcccgtgatggtgacgaccaggagaaatgctgctaccggtgatggcaaccaacccgaaagcagcaaccacaaccaccagggcaacccacctccacctcctcctccgcctccaccaccaccaccagacaccaacgccattctcacccaaatcctcgcccagcaagccaacatgatgaatgctttcctccaccacctccaaaacccgccacaacagaatgctccaccaccacctccccaacactctaaactcgccgagttcctccgcatccgcccacctaccttctccagctccaacaaccccgtggatgctttggattggttgcatgccgtggggaaaaagctagacacggtgcagtgcagcgatgaggagaaagtcgtcttcgccgcccatcagctgcagggacctgcatctctatggtgggaccacttccaggctacgcagccagagggacagccgattacttgggctcgcttcaccgccgctttccggagaacccatgtgcccgctggagtcgtggctcttaagaaaagggaattccgagagttgaagcaaggcaaccgctccgtgatggagtatttgcatgagttcaacaacctggcccgttacgctccggaggatgtgcgggaagatgaggagaagcaagagaagttcttggcaggaatggaccctgagctgtccgtccgtctagtctctggggactatccggattttcaacgactggtggacaagagcatccgcttggaagccaagcacaaggagttggaatcgcacaagcgccgcttggcgaatttccgcaatcaacagggtgctaaccaaagggttcgctacaccaatccctatccagggggatcctcctcgcagcagcagcagcagcaacctcgcccagcgcctcgacctcaattcgtggtgcgcgtcccacagccgcagcagcagcagaatcagcaagggactcgtgcgccccgtcctcctacgccagctgtgcagcccgttcaaggccgcagggacgctcaaggtcagcagcgtctgtgcttcaactgcttcgagcccgggcactttgcggataaatgcccaaagccaaggcgtcagcaaggccaagcgcctccccgctccaacaacggcgggaaggatgtcattcggggtcgtgtgaatcacgtgacggccgaggacgtgctgacaactccagacgtcatcgttggtacgttcctcgttcattccatccctgctacaattttgtttgactctggagcttcccactcgtttatatctgtgccattcgtggggagaaatcagttgggggtagaaaggcttagaaaccctctgctcatcaccacccctggaggggttatgacagcaaagttttatagccctgccgtccctatagaaattcaggggattccttttccctcggatctgattctgctagacaccaagaacttggatgtgattcttgggatgaattggttggcacaattccaaggagtagtggattgcgcgagacgcactgttactctgtaccgagggccggaacaaccggttgttttctttgcacccccaacctctgttagaagttcagaacttcatcagatagaactgtcagaaattcccatcgtcagagagttcggagacgtgtttccggaagaactacctggtatgccgcccaagcgagagattgagttccgaatagatcttgctccaggaactactcctctgcacaagcgaccctaccgtatggcagcaaatgaactagccgaagtaaagaaacagttggaagagttgaaagaaaaggggtacatacgtccgagtacttccccatggggtgctcctgtgatttttgtagagaagaaagacaagacgaagaggatgtgcgttgactacagagctctcaatgaagtcaccatcaaaaacaagtaccctcttccccggatcgatgatctgttcgatcaactcaaaggtgccactgtattctccaagattgatctccgttccggatatcaccaattacgtattcgtgaagaagatattccgaagaccgcattcaccacgcgatacgggctgtatgaattcacggtgatgtcgttcggtttgaccaatgcacctgccttcttcatgaacttaatgaataaagtgttcatggaatacttggataagtttgttgtggttttcattgatgacattctgatatactcacaatcagaggaagaccatcagcaccatctccgtctggtgttgggaaagttgcgggaacatcaattgtatgccaagcttagcaagtgtgagttctggttgtccgaagtcaaattcttagggcacgtgatatctgctaaaggagttgctgtggatcccgaaacagtgaccgccgtcaccgattggaagcaacccaagacagttacccaagtccgcagtttcttaggtttggcaggatactatcggagattcatcgagaacttctccaaaatcgctcgacccatgacacagttgttgaagaaagaagagaaatttgtgtggagcccgcaatgcgagaaggcgttccaaactctcaaggaaaagctggtttcctcgccggtgttaatcttgccggatactcgcaaggacttcatggtgtattgtgatgcttcgcgccaaggattggggtgcgtgctcatgcaggacggtcatgtggtagcctatgcctcacgccagctacgtcctcatgaaggcaactaccctacacatgatttggagttagccgcagtagttcatgctctaaaaatctggcggcactatctcattgggaatcgctgtgaaatctataccgaccataagagtctgaaatacatcttcactcagtcggacctgaatcttcggcaaaggagatggttagaactcatcaaggactatgatgtgggaattcactatcatcctggtaaggccaacgtggttgccgacgctctaagtcgaaagggccattgcaacactcttaacgtccgtggcattccacccgaacttagtcaacagatggaagccctgaacctaaacatagttggtcgtggatttttggccgcgttggaagccaagcccaccttgctcgatcaaatccgcgaggctcagaagaatgatccggacatgcatggactcctcaagaatatgaaacagggtaaagccgctggtttcacagaggatgaacacggaaccctatggaacggaaatcgggtatgcgttccagataaccgagaacttaaacagctgatacttcaggaagctcacgaaagtccttattccatccaccctggcagtacaaagatgtacttagatttgaaggagaaatactggtgggttagcatgaagcgggaaattgcagagtttgtggccctgtgtgatgtgtgccagcgtgtcaaggcagagcaccaacgaccggccggacttctccaaccactccaagtacctgaatggaaatgggatgaaattgggatggatttcatcaccggacttccaaaaacccaaggcggatatgattctatatgggtagttgtggatcgattaaccaaggtggctcgatttattcttgtgaagaccacctatggagggaacaaactagcggagctctacttcgctaggatcgtgagtctccacggcgttcccaagaaaatcgtatctgataggggaagccaattcacctctcacttttggaagaagctccaagaagagctgggtactcgattgaatttcagcaccgcctatcacccgcagacagatggacagaccgagcgtctaaatcaaattctagaagatatgctccgcgcatgtgtactagatttcgggaagacctgggataagagtctcccctatgccgagttctcctacaataacagctatcaatccagcatacaaatggcaccatatgaagcgttgtacgggcgcaaatgccggacaccgctcctgtgggaccaagttggggaaagccaagtgttcgggactgatatcctgagagaagctgaagctaaagtcagaatcattcgggataatctaaaggtggcacagtcacggcagaaaagttatgcagataaccgtcgccgtgacctggaattcgcagtggatgattttgtgtatcttcgagtcacgccattgcgaggtgtacacaggtttcagacgaaagggaagcttgcacctcggtatgtgggtcctttccgtatcgttgctcgacgcggagaagtcgcttaccagttggagctgcccgcctccttgggcaacgtgcatgatgtgttccatgtgtcgcaactcaagaaatgccttcgagtgccatccgagcagaccgactcagagcaaattgaagttcgcgaagatttgacctacgtggagaggccagtgaaaatcctggacaccatggagcgcaggaccaggaaccgggtaatccgtttttgcaaggtccagtggagcaaccacgccgaagaagaagctacttgggagcgtgaagacgagctgaaggcagcccatcccgatctcttcgccagttcttccgaatctcggggtcgagattccgtttaa

SEQ ID NO: 14202 - DNA, 5391 bp, Oryza sativa
  Clone ID: TFbOSC401058j.C1.o48.fg
atggatgaagtcgggggtcgatggacattctccagggcaaatgaaggctacacgagctgcggcccgatggccggcagcgtcacccgtcgtggtttggacatgactggcttcgtcttggagctgcgaggcatgtgcgtggtcttggggtatccacatggagtggactaccaggccaggccgcttccagagcaggagggtgatgacacggagccccgcgctggttgggaggtcactgcagtgatcctcgctggctcttctgagcggacttcgctgacagtcaccgcgggtggcgactccttccccgccgcttgccagaacgccgctctcctcgccatcggcactcttcaccagcgctacccggacgagttgcagcactcgccctaccgctaccaccctcgtcgcggaggagcccgcgactacgccaccttctgggatgctagctcggaggatgacgctaccatcgtgcacctggcacgcatggtggaggcgtacgacgcggctcgtatcgacttccatcagatggtgcgccgcgggatggtcgagaacaacatgaagatcctggagctgcgtcaggagaacctgcagctcaagaaggacctcgacgcggtggaggcgcagctgcaccagctcaagatcgcccagggagagatctgccgccccaagcgtcgccgcgtttgccgcagccagaagatcaccgcccgcaagagcacctccaggcctgagcttgtccgtcagtccctggcgtggacttgcttcgtcgagacccctcgtgccgagcctgcgcccgtggttccccaggagggggaagcctccggcgttggtagctcggaggctctctctctgcttgctggttctgtgtggggttttcagatggtgacgaccaggagaaatgctgttaccggtgatggcaaccaacccgaaggcagcaaccccaaccaccaaggcaacccacctccacctcctcctccgcctccaccaccaccaccagacaccaacgccattctcacccaaatcctcgcccagcaagccaacatgatgaatgctttcctccaccacctccaaaatccgccacaacagaatgctccaccaccacccccacaacactctaaactcgccgagttcctccgcatccgcccacctaccttctccagctccaacaaccccgtggatgctttggattggttgcatgccgtggggaagaagttagacacggtgcagtgcagcgatgaggagaaagtcgtcttcgccgcccaccagctgcagggacccgcatctctatggtgggaccatttccaggctacgcagccaaaggggcaacctattacttgggctcgcttcaccgccgctttccggagaacccatgtgcccgctggagtcgtggctcttaagaaaagggaattccgagagttgaagcaaggcaaccgctccgtgatggagtatttgcatgagttcaacaacctggcccgttacgccccagaggatgtgcgggaagatgaggagaagcaggagaagttcctggcaggaatggaccccgagctgtccgtccgtctagtctctggggactatcctgattttcaacgactggtggacaagagcatctgcttggaagctaagcacaaggagctggagtcgcacaagcgccgcttggcgaatttccgcaatcaacagggtgctaaccaaagggtccgctacaccaatccctatccagggggatcctcctcgcagcagcaacaacagcagcagcaacctcgcccagcgccccgacctcaattcgtggtgcgcgtcccacagccgcagcagcagcagaatcagcaagggactcgtgcgccccgtcctcctacgccaactgtgcagcctggtcaaggccgcagggacgctcaaggtcagcagcgtctgtgcttcaactgcttcgagcccgggcactttgcggataaatgcccgaagccaaggcgtcagcaaggccaagcgcctccccgctccaacaacggcgggaaggatgtcattcggggtcgtgtgaatcacgtgacggccgaggacgtgctgacaactccagacgtcatcgttggtacgttcctcgttcattccatccctgctacaattttgttcgactctggagcttcccactcgtttatatctgtgccattcgtggggaaaaatcagttgggggtagaaaggcttagaaaccctctgctcatcaccacccctggaggggttatgacagcaaagtattatagtcctgccgtccctatagaaattcaggggattccttttccctcggatctgattcttctagacacaaagaacttggatgtgattcttgggatgaattggttggctcaattccaaggagtagtggattgcgcgagacgcactgtcactctgtaccgaggtccagaacaaccggttgttttctttgcacccccaacctctgtcagaagttcagaacttcatcagatagaactgtcagaaattcccatcgtcagagagttcggagacgtgtttccggaagaactacccggtatgccgcccaagcgagagattgagttccggatagatcttgctccaggaaccactcctctgcacaagcgaccctaccgtatggcagcaaatgaactagccgaagtaaagaaacagttggaagagttgaaagaaaaggggtacatacgtccgagtacttccccatggggtgctcctgtgatttttgtagagaagaaagacaagacgaagaggatgtgcgttgactacagagctctcaatgaagtcaccataaaaaacaagtaccctcttccccggatcgatgatttgttcgatcagcttaaaggtgccactgtattctccaagattgatctccgttccggatatcaccaattacgtattcgtgaagaagatattccgaagaccgcattcaccacgcgatacgggctgtatgaattcacggtgatgtcgttcggtttgaccaatgcacctgccttcttcatgaacttgatgaacaaagtgttcatggaatacttggataagtttgttgtggttttcattgatgacattctgatatactcacaatcagaggaagaccatcagcaccatctccgtctggtgttgggaaagttgcgggaacatcaattgtatgccaagcttagcaagtgtgagttctggttgtccgaagtcaaattcttagggcacgtgatatctgctaaaggagttgctgtggatcccgaaacagtgaccgccgtcaccgattggaagcaacccaagacagttactcaagtccgcagtttcttaggtttggcaggatactatcggagattcatcgagaacttctccaaaatcgctcgacccatgacacagttgttgaagaaagaagagaaatttgtgtggagcccgcaatgcgagaaggcgtttcaaactctcaaggaaaagctggtttcctcgccggtgttaatcttgccggatactcgcaaggacttcatggtgtattgtgatgcttcgcgccaaggattggggtgcgtgctcatgcaggacggtcatgtggtagcctatgcctcacgccagctacgtcctcatgaaggcaactaccctacacatgatttggagttagccgcagtagttcatgctctaaaaatctggcggcactatctcattgggaatcgctgtgaaatctataccgaccataagagtctgaaatacatcttcactcagtcggacctgaatcttcggcaaaggagatggttagaactcatcaaggattatgatgtgggaattcactatcatcccggtaaggccaacgtggttgccgacgctctaagtcgaaagagccattgcaacactcttaacgtccgtggcattccacccgaacttaaccaacagatggaagccctgaatctaagcatagtgggtcgtggattcttagctgcattggaagccaagcccaccttgctcgatcaaatccgcgaggctcagaagaatgatccggacatgcatggactcctcaagaatatgaaacagggtaaagccgctggtttcgcagaggatgaacacggaaccctatggaacggaaatcgggtatgcgtcccagataacagagaacttaaacagctgatacttcaggaagctcacgaaagtccttattccatccaccctggcagtacaaagatgtacttagacttgaaagagaaatactggtgggttagcatgaagcgggagattgcagagttcgtggccctgtgtgatgtgtgccagcgtgtcaaggcagagcaccagcgaccggccggacttctccaacctctccaagtaccagaatggaaatgggatgaaattgggatggatttcatcaccggacttccgaagacccaaggtggatatgattctatatgggtagttgtggatcgattaaccaaggtagctcgattcattcctgtgaagaccacctatggagggaacaaactagcggagctctacttcgccaggatcgtgagtctccatggcgttcccaagaaaatcgtatctgataggggaagccaattcacctctcacttttggaagaagctccaagaagagctgggtactcgattgaatttcagcaccgcctatcacccacagacagatggacagaccgagcgtctaaatcagatcctagaagatatgctccgcgcatgtgtactagatttcgggaagacctgggataagagtctcccctatgccgagttctcctacaataacagctatcaagccagcatacaaatggcaccttatgaagcgttgtacgggcgcaaatgccggacaccgctattgtgggaccaagttggagaaagccaagtgttcgggaccgatatcctgagagaagctgaagctaaagtcagaatcattcgggataatctaaaggtggcacagtcccggcagaaaagttatgcagataaccgtcgccgtaatctggaattcgcagtggatgactttgtgtatcttcgggtcacgccattgcgaggtgtacacaggtttcagacgaaagggaagctcgcacctcggtatgtgggtcctttccgcatcattgctcgacgcggagaagtcgcttaccaattggagctgcccgcctccttgggcaacgtgcatgatgtgttccatgtgtcgcaactcaagaaatgtcttcgagtgccatccgagcagaccgactcagagcaaattaaagttcgcgaagatttgacctacgtggagaggccagtaaaaatcctggacaccatggagcgcaggaccaggaaccgggtaatccgtttttgcaaggtccagtggagcaaccatgccgaagaagaagctacctgggagcgtgaagacgagttgaaggcagcccatcccgatctcttcgccagttcttccgaatctcggggtcgagattccgtttaa

SEQ ID NO: 14203 - DNA, 4512 bp, Oryza sativa
  Clone ID: TFbOSC401068j.C1.o3.gm
atggttacaccgatggtgacgaccaggagaaatgttaacaccggtgaaggcaaccaacccgaaggcagcaaccccaaccaccaaggcaacccacctccaccaccaccaccagacaccaacgccattctcacccagatcctcgcccagcaagccaacatgatgaatgctttcctccaccacctccaaaatccaccacaacagaatgctccaccaccacctccccaacactctaaactcgccgaattcctccgcatccgcccacctaccttctctagctccaacaaccccgtggatgctttggattggttgcatgccgtggggaagaagctggacactgtgcagtgcagtgatgaagagaaagtcatcttcgccgcccatcagctgcaggggcccgcatctctctggtgggaccatttccaggccacgcagcccgaggggcaaccgattacttgggctcgcttcaccgccgctttccggagaacccatgtgcccgctggagtcgtggctcttaagaaaaaggaattccgagagttgaagcaaggcaaccgctctgtgatggagtatttgcatgagttcaacaatctagcccgttacgctccggaggatgtgcgggaagatgaggagaaacaagagaagttcctggcaggaatggaccccgagctgtccgttcgtttagtctctggggactatccggacttccaacgtctggtggacaagagcatccgcttggaagccaagcacaaggagctggaattgcacaagcgccgcttggcgaacttccgcaatcaacagggtgctaaccagagggtccgctacaccaatccctacccagggggatcctcctcgcagcaacaacagcagcagcaacctcgcccagcgccccgacctcaattcgtggtgcgcgtcccacagccgcagcagcagcagaatcagcaagggacccgtgcaccccgtcctcctacgccaactgtgcagcccgttcaaggccgcagggacgcttcaggtccgcagcggctgtgcttcaactgcttcgagcccggacactttgcggataaatgcccaaagccaaggcgtcagcaaggccaagcgcctccccgctccaacaacggtggcaaggacgtcagccgtggtcgtgtgaatcacgtgacggccgaggacgtgctgacaactccagacgtcatcgttgagaagaaagacaagacgaagaggatgtgcgtcgactacagagctctcaatgaagtcaccatcaaaaacaagtaccctcttcctcggatcgatgatctgttcgatcagcttaaaggtgccactgtattctccaagattgatcttcgttccggatatcaccaattacgtattcgtgaagaagatattccgaagaccgcattcactacgcgatatggactgtatgaattcacggtgatgtcgttcggcttgaccaatgctcctgccttcttcatgaacttaatgaataaagtgttcatggaatacttggataagtttgttgtggttttcattgatgacattctgatatactcacaatcagaagaagatcatcagcaccatctccgtctggtgttgggaaagttgcgggaacatcaattgtatgccaagcttagcaagtgtgagttctggttgtccgaagtcaaattcttggggcacgtgatatctgctaaaggagttgctgtggaccccgaaacagtgaccgccgtcaccgattggaagcaacctaagacagtcactcaaattcgcagtttcttgggtttggcaggatactaccggagattcatcgagaacttctccaaaatcgctcgacccatgacacagttgttgaagaaagaagagaagtttgggtggagcccgcaatgcgaaaaggcgttccaaactctcaaggaaaagctggtttcctcgccagtgttaatcttgccggatactcgcaaggacttcatggtgtattgtgatgcttcgcgccaaggattggggtgcgtgctcatgcaggacggtcatgtggtagcctatgcctcacgccagctacgacctcatgaaggcaactaccctacacatgacttggagttagccgcagtgtcagatctgaaccttcggcaaaggagatggttagaactcatcaaggattatgatgtgggaattcactatcatcctggtaaggctaacgtggttgccgacgctctaagtcgaaagagccactgcaacactctcaacgtccgaggcattccacccgagcttaatcaacagatggaagccctgaacctaagcatagttggtcgcggattcttagctgcgttagaagccaagcccaccttgctcgatcaaatccgcgaggctcagaagaatgatccggacatgcatggactcctcaagaatatgaaacagggtaaagccgctggtttcacagaggatgaacacggaaccttatggaacggaaagcgggagaaatactggtgggttagcatgaagcgggaaattgcagagtttgtggctctatgtgatgtgtaccagcgtgtcaaggcagaacaccaacgaccggccggacttctccaacctctccaagtgccggaatggaaatgggatgaaattgggatggatttcatcaccggccttccaaaaacccaaggtggatatgattctatatgggtaattgtggatcgactaacaaaggtagctcgattcattcctgtgaagaccacctatggaggaaacaaactagcggagctctacttcgctaggatcgtgagtctccatggtattcccaagaaaatcgtatctgataggggaagccaattcacctctcacttttggaagaagctccaagaagagctgggtactcggttgaatttcagcaccgcctatcacccgcagacagatggacagaccgagcgtctaaatcagatcctagaagatatgctccgcgcatgtgtcctagatttcgggaagacctgggataagagtctcccctatgccgagttctcctacaataacagctatcaagccagcatacaaatggcaccatatgaagcgttgtacgggcgcaaatgccggacaccgctcctgtgggaccaagtcggagaaagccaagtgttcgggactgatatcctgagagaagctgaaactaaagtcagaatcattcgggataatctaaaggtggcacagtcccggcagaaaagttatgcagataaccgtcgccgtgatctggaattcgcagtggatgattttgtgtaccttcgggtcacgccattgcgaggtgtacacaggtttcagacaaaagggaagctcgcacctcggtatgtgggtccctttcgtatcactgctcgacgcggagaagtcgcctaccagctggagttgcccgcctccttgggcaacgtgcatgatgtgttccatgtgtcgcaactcaagaaatgtctccgagtgccatccgagcaggccgactcagagcgaattgaagttcgcgaagacttgacgtatgtggagaagccagtgaaaatcctggacaccatggagcgcaggaccaggaaccgagtaatccgtttctgcaaggcgggcccgcccgccgctctcgctgacgggtgggacccacctgtcatcgccctcctcgcgccgcgcccgccgccgcgcccgtgccctagcgccgccgccgccgcgaatcccgccgctcccgtccgccccgcgtgcaatcaagaggggggaattactccccgtaatcccctcccccgtttccccctctttcccctctctctctccctcggattcgctcggaatcaatcccgcattcatcgccggcgcaatcaatggcggccgaatcctccgcgcgcgattcctccctccccggccgctctttccttcccccggcgctatttaaacgttgcccgagctccgctctttcgtttccgccgctcgccgctcgctctcgccgtcggaatcgtgctcgcgccgtgctcctctctctccgccgtcgccgccgagctccgttgcgccrccgtcgtcgctccggttctcctcccgactcggcgacccctccctcggcatcgccgcatcgccgtcgacctcgtccgcgcctccgtttcgctcgccgactgccggagcgccgtcgtcatcgtcatcccgaaccgcgccgccgccttcttccgctccgtccgccgtttccgccgccttcgctgtctcggggtgagccgtggaccgtccccttcgtttcccccttccctcctctctctcgggtgccgctccgccgcgccgttggtcgccggcagtgaccatcggggcgcgggcgcgccgctcccgtcggccgtgccggcgaggccgccctcgggcgcgccctcgcggctgccaagtgggcccggccgtcagccgcccgcgcccgcgggtgcggctgacgcgcgggacccacggcgccgaccgccgccagccgcgtgcgcccggtccaccgtggaccgagcggctgacgcgtgggccccacttcccgtggacccggtccgcgcgcccgcccctcggctgacgcaataa

SEQ ID NO: 14204 - DNA, 5415 bp, Oryza sativa
  Clone ID: TFbOSC401143j.C1.o10.fg
atggatgaagtcgggcgtcgatggacattctccagggcaaatgaaggctacacgagctgcggcccgatggccggtagcgttacccgtcgtggtttggacatgactggcttcgtcttggagctgcgaggcatgtgcgtggtcttggggtatccacatggagtggattaccaggccaggccgctcccggagcaggagggtgaggatgcagagcctcacgctggttgggaggtcactgcagtgatcctctccggctctcccgagcggacttcgctggcagtcaccgcgggtggagattccttccccgccgcttgccagaacgccgctctcctcgccatcggcacccttcaccagcgctacccggacgagttgcagcactcgccctaccgctaccacgctcgtcgcggaggagcccgcgactacgccaccttccgagacgccagttcggaggatgacgctaccgtcgtgcatctggcacgcatggtggaggcgtacgacgcggctcgtatcgacttccatcagatggtgcgccgtggcatggtggagaacaacatgaagatcctggagctgcgccaagagaatctgcagctcaagaaggacctcgacgcagtggaggcgcagctgcatcagctcaagatcgcccagggagaggacagccgtcccaagcgtcgccgcgtctgccgcagccagaagatcaccgcccgcaagagcacctccaggcccgagcttgttcgtcagtccctggcgtggacctgcttcgtcgagacccctcgtgccgagcctgcgcccgtggttccccaggagggggaagcctccggcgttggtagctcggagggtgcgctgttgctcaccttccgtcctggcccgtcgcagcgctctccttctctgtttgctggttctgtgaggggttttcagatggtgacgaccaggagaaatgttaacaccggtgaaggtaaccaacccgaaggcagcaaccccaaccaccaaggcaatccacctccgccaccaccaccagacaccaacgccattctcacccagatcctcgcccaacaggccaacatgatgaatgctttcctccaccaccttcaaaacccgccacaacagaatgctcccccaccacctccccaacactctaaactcgccgagttcctccgcatccgcccacctaccttctctagctccaacaaccccgtggatgcgttggattggttgcatgccgtggggaagaagttagacactgtgcagtgcagtgatgaggagaaagtcatcttcgccgcccatcagctgcaggggcccgcatctctctggtgggaccacttccaggctacgcagccagagggacagccgatcacttgggcccgcttcaccgccgctttccggagaacccatgtgcccgctggagtcgtggctcttaagaaaagggaatttcgggagttgaagcaaggcaaccgctccgtgatggagtatttgcatgagttcaacaatctagcccgttatgccccggaggatgtgcgggaagatgaggagaagcaagagaagttcttggcaggaatggaccctgagctgtccgttcgtctagtctctggggactatcctgattctcaacgtctggtggacaagagcatccgcttggaagccaagcacaaggagctggagtcgcacaagcgccgcttggcgaatttccgcaatcaacagggtgctaaccagagggtccgctacaccaatccctacccagggggatcctcctcgcagcagcagcagcagcagcagcaacctcgctccgcgccccgacctcaattcgtggtgcgcgtcccacagcagcaacagcagcagaatcagcaggggactcgtgcgccccgtcctcctacgccaactgtgcagcctgttcaaggtcgcagggacgctcaaggtcagcagcgtctgtgcttcaactgcttcgagcccgggcactttgcggataaatgcccaaagccaaggcgtcagcaaggccaagcgcctccccgctccaacaacggcgggaaggatgtcattcggggtcgtgtgaatcacgtgacggccgaggacgtgctgacaactccagacgtcatcgttggtacgttcctcgttcattccatccctgctacaattttgttcgactctggagcttcccactcgtttatatctgtgccattcgtggggagaaatcagttgggggtagaaaggcttagaaaccctctgctcatcaccacccctggaggggttatgacagcaaagtactatagccctgccgtccctatagaaattcaggggattccttttccctcggatctgattctgctagacaccaagaacttggacgtgattcttgggatgaattggttggcccaattccaaggggtagtggattgcgcgaggcgcactgtcactctgtaccgagggccagaacagccggttgttttctttgcacctccaacctctgtcagaagttcagaactgcatcagataggtctgtcagaaatccccatagtcagagagttcggagacgtgtttccggaagaactacctggtatgccgcccaagcgagagattgagttccggatagatcttgctccaggaaccactcctctgcacaagcgaccctaccgtatggcagcaaatgaactagccgaagtaaagacacagttggaagaattgaaagaaaaggggtacatacgtccgagtacttccccatggggtgctcctgtgatctttgtagagaagaaagacaagacgaagaggatgtgcgttgactacagagctctcaatgaagtcaccatcaaaaacaagtaccctcttccccggatcgatgatctgttcgaccaactcaaaggtgccactgtattctccaagattgatcttcgttccggatatcaccaattacgtattcgtgaagaagatattccgaagaccgcattcactacgcgatacgggctgtatgaattcacggtgatgtcgttcggcttaaccaatgctcctgccttcttcatgaacttgatgaacaaagtgttcatggaatacttggataagttcgttgtggttttcatcgatgacattctgatatactcacaatcagaggaagaccatcagcaccatctccgtctggtattgggaaagctgcgggaacatcaattgtatgccaagctcagcaagtgtgagttctggttgtccgaagtcaaatttttggggcacgtgatatctgctaaaggagttgctgtggatcccgaaacagtgaccgccgtcaccgattggaagcaacccaagacagtcactcagattcgcagtttcttgggtttggcaggatactaccggaggttcatcgagaacttctccaaaatcgctcgacccatgacacagttgttgaagaaagaagagaagtttgtgtggagcccgcaatgcgagaaggcgttccaaactctcaaagaaaagctggtttcctcgccagtgttaatcttgccggatactcgcaaggatttcatggtgtactgtgatgcttcgcgccaaggattggggtgcgtgctcatgcaggacggtcatgtggtagcctatgcctcacgccagctacgacctcatgaaggcaactaccctacacatgacttggagttagcagcggtggttcatgctttaaaaatctggcggcactatctcattgggaaccgctgtgaaatatatactgatcataagagtttgaaatacatcttcacccagtcggatctgaatcttcggcaaaggagatggttagaactcatcaaggattatgatgtgggaattcactatcaccctggtaaggctaacgtggttgccgatgctctaagtcggaagagccattgcaatactctcaacgtccgaggcattccacccgagcttaatcaacagatggaagccctgaacctaaacatagttggtcgtggatttttggccgcgctagaagcccagcccaccttgctcgatcaaatccgcgaggctcagaagaatgatccggacatgcatggactcctcaagaatatgaaacagggtaaagccgctggtttcacagaggatgaacacggaaccttatggaacggaaagcgggtatgcgttccggatagcagagaacttaaacagctgatacttcaggaagctcacgaaagtccttattccattcacccgggcagtaccaagatgtacttagatttgaaggagaaatactggtgggttagcatgaagcgggaaattgcagagtttgtggctctatgtgatgtgtgccagcgtgtcaaggcagaacaccaacgaccggccggacttctccaacctctccaagtgccagaatggaaatgggatgaaattgggatggatttcatcaccggccttccaaaaacccaaggtgggtatgattctatatgggtaatagtggatcgattaaccaaggtagctcgattcattcctgtgaagaccacctatggagggaataaactagcggagctctacttcgctaggatcgtgagtctccatggcgttcccaagaaaatcgtatctgataggggaagccaattcacctctcacttttggaagaagctccaagaagagcttggtacccgactaaatttcagcaccgcatatcacccgcagacagatggacagaccgagcgtctaaatcagatcctagaagatatgctccgcgcatgtgtcctagatttcgggaagacttgggataagagtctcccctatgccgagttctcctacaataacagctaccaagccagcatacaaatggcaccatatgaagcgttgtacgggcgcaaatgccggacaccgctcctgtgggaccaagttggggaaagccaagtgttcgggactgatatcctgagagaagctgaagctaaagtcagaatcattcgggataatctaaaggtggcacagtctcggcagaaaagttatgcagataaccgtcgccgtgatctggaattcgcagtggatgactttgtgtatcttcgggtcacgccattgcgaggtgtgcacaggtttcagacaaaagggaagctcgcacctcggtatgtgggtcccttccgtatcactgctcgccgcggagaagtcgcctaccagctggagttgcccgcctccttgggcaacgtgcatgatgtgtttcatgtgtctcaactcaagaaatgtcttcgagtgccatccgagcaggccgactcagagcaaattgaagttcgcgaagacttgacctatgtggagaagccagtgaaaatcctggacgccatggagcgcaggaccaggaaccgagtaatccgtttttgcaaggtccagtggagcaaccacgccgaagaagaagctacttgggagcgtgaagacgagctgaaggcagcccatcccgatctcttcgccagttcttccgaatctcggggtcgagattccgtttaa

SEQ ID NO: 14205 - DNA, 4035 bp, Oryza sativa
  Clone ID: TFbOSC401143j.C1.o3.fg
atgtcatggcacagggccggtgtcctgctgctaggggctcagtcctgcctgcctgtcccggaggttccggccgtaggtgggattgggtcggtactcttgtctatggctaggatgggttggaaactatgtcacgtcttccgtccgtataccgtggtgatggccggcagcatcagccgtcgtggtctggacctgactggtttcgtcttggagctgcggggcatgtgcgttgtcctggggtatccacatggagtggactaccagggcaggccgcttccggagcaggagggtgacgatgcagagccccacgctgcttgggaggttactgcagtgatcctcactggctctcccgagcggacttcgttggcagtcaccgcgggtggagattctttccccgccgcttgccagaacgccgctctcctcgccatcggcactcttcaccagcgctacccggacgagttgcagcactcgccctaccgctaccaccctcgccgcggaggagcccgcgacttcgccaccttccgggatgctagctcggaggatgacgctaccatcatgcacctggcgcgcatggtggaggcgtacgacgcggctcgtatcgacttccatcagatggtgcgccgtgggatggtcgagaacaacatgaagatcctggagctgcgtcaagagaatctgcagctgaagaaggaactagacgcagtggaggcgcagctgcatcagctcaagatcgcccagggagaggtctgtcgccccaagcgtcgccgcgtctgccgcagccagaagatcaccgcccgcaagagcacctccaggcccgagcttgttcgtcagtccctggcgtggacttgcttcgtcgagacccctcgtgccgagcccgcgcccgtggttcctcaggagggggaagcctccggcgttggtagcacggaggatgcgctgttgctcaccttccgtcctggcccgtcgcagcggagaagtgctaataccggtgatggcaaccaacccgaaggcagcaaccacaacaaccatggcagtccacctccacctcctcctccgcctccaccaccaccaccagacaccaacgctattctcacccaaatcctcgcccagcaggccaacatgatgactgctttcctccaccacctccaaaatccgccacaacagaatgctcctccaccacccccacaacactgtaaactcgccgagttcctccgcatccgtccaccaaccttctctagctccaataaccccgtggatgcgttggattggttgcatgccgtggggaaaaagctagacactgtgcagtgcagcgatgaggagaaagtcatcttcgccgcccaccagctgcaggggcccgcatctctatggtgggaccatttccaggctacgcagccagaggggcagcctattacttgggctcgcttcaccgccgctttccggagaacccatgtgcccgccggagtcgtggcccttaagaaaagggaattccgagagttgaagcaaggcaaccgctccgtgatggagtatttgcatgagttcaacaacctggcccgttacgccctggaggatgtgcgggaagatgaggaaaagcaggagaagttcttggcaggaatggaccctgagctgtccgtccgtctagtctccggtgactatccggatttccaacgtctggtggacaagagcatccgcttggaagccaagcacaaggaactggagtcgcacaagcgccgcttggcgaatgtccgcaatcaacagggtgctaaccaaagggtccgctacaccaatccctatccagggggatcgtcctcgcagcagcaacagcagcaacaacctcgctccgcgccccgacctcaattcgtggtgcgcgtcccacagccgcagcaacagcagagccagcaagggacccgtgtgccccgtcctcctacgccagctgcgcagtctggtcaaggccgcagggacgcttcaggtccgcagcgtctgtgcttcaactgcttcgagcccgggcactttgcggataaatgcccgaagccgaggcgccagcaaggccaagcgcctccccgctccaacaacggtggtaaggatgtcattcggggtcgtgtgaaccacgtgacggccgaggacgtgctgacaactccagacgtcatcgttggtacgttcctcattcattccatccctgctaccattttgttcgactctggagcttcccactcgtttatatctgtgccattcgtggggagaaatcagttgggggtagaaaggcttaggaaccctctgctcatcaccacccctggaggggttatgacagcaaagtattatagtcctgccgtccctatagaaattcaggggattccttttccctcggatctgattctgctagacaccaagaacttggatgtgatccttgggatgaattggatggctcaattccaaggagtagtggattgcgcgagacgcactgtcactctgtaccgagggccggaacaatcggttgttttctttgcacccccaacctctgtcagtagttcagaacttcatcagataggactgtcagaaatccccatcgtcagggagttcggagatgtgtttccggaagaactacccggtatgccgcccaagcgagagattgagttccggatagatcttgctccaggaaccactcctctgtacaaacgaccctaccgtatggcagcaaatgaattggccgaagtcaagaaacagttggaagagttgaaagaaaagggagctctcaatgaagtcaccatcaaaaacaagtaccctcttccccggatcgatgatctgttcgatcagcttaaaggtgccactgtattctccaagattgatcttcgttccggatatcaccaattacgtattcgtgaagaagatattcctaagaccgcattcaccacgcgatacggactgtatgaattcacggtgatgtcgttcggtttaaccaatgcacctgccttcttcatgaacttaatgaacaaagtgttcatggaatacttggataagtttgttgtggtgttcattgatgacattctggtgtactcacaatcagaggaagaccatcagcaccatctccgtctggtgttgggaaagttgcgggaacatcaattgtatgccaaacttagcaagtgtgagttctggttgtccgaagtcaaattcttagggcacgtgatatctgctaaaggagttgctgtggaccccgaaacagtgaccgccgtcaccgattggaagcaacccaagacagtcactcaagtccgcagtttcttaggttttgcaggatactaccggaggttcatcgagaacttctccaaaatcgctcgacccatgacacagttgttgaagaaagaagagaaatttgtgtggagcccgcaatgcgagaaggcgtttcaaactctcaaagaaaagctggtttcctcgccggtgttaaccttgccagatactcgcaaggatttcatggtgtattgtgatgcttcgcgccaaggattggggtgcgtgcttatgcaggatggtcatgtggtggcctatgcctcacgccagctacggcctcatgaaggcaactaccctacccatgatttggagttagccgcggtggttcatgctctaaaaatctggcggcactatctcattgggaatcgcagtgaaatatatactgatcataagagtttgaaatacatcttcacccagtcggatctgaatcttcggcagaggagatggttagaactcatcaaggattatgatgtgggaattcactaccatcctggtaaggccaacgtggtcgccgacgctctaagtcgaaagagccattgcaacactcttaacgtccgtggcattccacccgaacttaaccaacagatggaagccctgaatctaagcatagtgggtcgtggattcttggttgcgttggaagccaagcccaccttgctcgatcaaatccgcgaggctcagtgtcgcgaccgggaaaattgccttttcccgaacgccagtgtattaatccccgtcccaggaaaagccggggtacaccacacaagcatgatataa

SEQ ID NO: 14206 - DNA, 5187 bp, Oryza sativa
  Clone ID: TFbOSC401235j.C1.o53.fg
atgtcatggcacagggccggtgtcctgctgctaggggctcagtcctgcctgcctgtcccgggggttacggccgtaggtgggattgggtcggtactcttgtctatagctagaatgggttggaaactatgtcacgtcttccgtctgtataccgtggtgatggccggcagcgtcagccgtcgtggtttggacatgactggcttcgtcttggagctgcggggcatgtgcgttgtcctggggtatccgcatggagtggactaccaggccaggccgcttccggagcaggagggtgacgatgcagagccccacgctgcttgggaggttactgcagtgatcctcactggctctcccgagcggacttcgttggcagtcaccgcgggtggagattccttccccgccgcttgccagagcgccgctctcctcgccatcggcactcttcaccagcgctacccggacgagttgcagcactcgccctaccgctaccaccctcgtcgcggaggagcccgcgactacgccaccttccgggatgctagctcggaggatgacgctaccatcgtgcacctagcgtgcatggtggaggcgtacgacgcggctcgtatcgacttccatcagatggtgcgccgtgggatggtcgagaacaacatgaagatcctggagctgcgtcaggagaatctgcagctgaagaaggacctagacgcggtggaggcgcagctgcatcagctcaagatcgcccagggagaggtctgtcgccccaagcgccgccgcgtctgccgcagccagaagatcaccgcccgcaagagcacctccaggcccgagcttgttcgtcagtccctggcgtggacctgcttcatggagacccctcgtgccgagcccgcgcccatggttccccaggagggggaagcctccggcgttggtagcacggaggatgcgctgttgctcaccttccgccctggcccgtcgcagcggagaagtgttaataccggtgatggcaaccaacccgagggcagcaaccacaacaaccatggcagcccacctccacctcctcctccgcctccaccaccaccaccagataccaacgccattctcacccaaatcctcgcccagcaggccaacatgatgactgctttcctccaccacctccaaaatccgctacaacagaatgctccaccaccacccccacaacactctaagctcgccgagttcctccgcatccgtccacccaccttctctagctccaacaaccccgtggatgcgttggattggttgcatgccgtggggaaaaagctagacactgtgcagtgcagcgatgaggagaaagtcatcttcgccgcccaccagctgcaggggcccgcatctctatggtggtaccatttccaggctacgcagccagaggggcagcctattacttgggctcgcttcaccgccgctttccggagaacccatgtgcccgctggagtcgtggcccttaagaaaagggaattccgagagttgaagcaaggcaacctctccgtgatggagatgtgcgggaagatgaggagaagcaagagaagttcaggaatggaccctgagctgtccgtccgtctagtctccggggactatccggatttccaacgtctggtggacaagagcatccgcttggaagccaagcacaaggaactggagtcgcacaagcgccgcttggcgaatttccgcaatcaacagggtgctaaccaaagggtccgctacaccaatccctatccagggggatcgtcctcgcagcagcaacagcagcaacaacctcgctccgcgccccgacctcaattcgtggtgcgcgtcccacagccccagcaacagcagagtcagcaagggactcgtgcgccccgtccttctacgccaactgtgcagcctggtcaaggccgcagggacgctcaaggcccgcagcgtctgtgcttcaactgcttcgagcccgggcactttgcggataaatgcccgaagccgaggcgccagcaaggccaagcgcctccccgctccaacaacggtggtaaggatgtcattcggggtcgtgtgaaccacgtgacggccgaggacgtgctgacaactccagacgtcatcgttggtacgttcctcattcattccatccctgctaccattttgttcgactctggagcttcccactcgtttatatctgtgccattcgtggggagaaatcagttgggggtagaacggcttaggaaccctctcctcatcaccacccctggaggggttatgacagcaaagtattatagtcctgccgtccctatagaaattcaggggattccttttccctcggatctgattctgctagacaccaagaacttggatgtgatccttgggatgaattggttggctcaattccaaggagtagtggattgcgcgagacgcactgtcactctgtaccgagggccggaacaaccggttgtattctttgcacccccaacctctgtcagtagttcagaacttcatcagataggactgtcagaaatccccatcgtcagggagttcggagacgtgtttccggaagaactacccggtatgccacccaaacgagagattgagttccggatagatcttgctccaggaaccactcctctgtacaagcgaccctaccgtatggcagcaaatgaactcgctgaagtcaagaaacagttggaagagttgaaagaaaaggggtatatacgtccgagtacttccccctggggtgctcctgtgatttttgtggagaagaaagacaagacgaagaggatgtgcgttgactacagagctctcaatgaagtcaccatcaaaaacaagtaccctcttcctcggatcgatgatctgtttgatcagcttaaaggtgccacggtattctccaagattgatcttcgttccggatatcaccagttacgtatccgcgaagaagatattccgaagaccgcattcaccacgcgatacggactgtatgaattcacggtgatgtcgttcggtttaaccaatgcacctgccttcttcatgaacttaatgaacaaagtgttcatggaatacttggataagtttgttgtggttttcattgatgacattctggtatactcacaaacagaggaagaccatcagcaccatctccgtctggtgttgggaaagttgcgggaacatcaattgtatgccaaacttagcaagtgtgagttctggttgtccgaagtcaaattcttagggcacgtgatatctgctaaaggagttgctgtggaccccgaaacagtgaccgccgtcactgattggaggcaacccaagaccgtcactcaaattcgcagtttcttaggtttggcaggatactaccggaggttcatcgagaacttctccaaaatcgctcgacccatgacacagttgttgaagaaagaagagaaatttgtgtggagcccgcaatgcgagaaggcgttccaaactctcaaagaaaagctggtttcctcgccagtgttaatcttgccagatactcgcaaggattttatggtgtattgtgatgctgcgcgccaaggattggggtgcgtgctcatgcaggacggtcatgtggtggcctatgcctcacgccagctacggcctcatgaaggcaattaccctacccatgatttggagttagccgctgtggttcatgctctaaaaatctggcggcactatctcattgggaattgctgtgaaatatatactgatcataagagtttgaaatacatcttcacccagtcggatctgaatcttcggcaaaggagatggttagaactcatcaaggattatgatgtgggaattcactatcatcctggtaaggccaacgtggtcgccgacgctctaagtcgaaagagccattgcaacactcttaacgtccgtggcattccactcgaacttaaccaacagatggaagccctgaatctaagcatagtgggtcgtggattcttggctgcgttggaagccaagcctaccttgctcgatcaaatccgcgaggctcagaagaatgatccggacatgcgtggactcctcaagaatatgaaacagggtaaagccactggtttcacagaggatgaacacggaaccctatggaacggaaatcgggtatgcgttccagataacagagaacttaaacagctgatacttcaggaagctcacgaaagtccttattccatccaccctggcagtacgaagatgtacttagacttgaagaagaaatactggtgggttagtatgaagcgggaaattgcagagttcgtggccctgtgtgatgtgtgccagcgtgtcaaggcagaacaccaacggccggccggacttctccaacctctccaagtaccagaatggaaatgggatgaaattgggatggatttcatcaccggacttccaaaaacccaaggtggatatgattctatatgggtagttgtggatcgattaaccaaggtggctcgatttattcctgtgaagaccacctatggagggaacaaactagccgagctctacttcgctaggatcgtgagtctccatggcgttcccaagaaaatcgtatctgataggggaagccaattcacctctcacttttggaagaagctccaagaagagctgggtacccgattaaatttcagcaccgcgtatcacccgcagacagatggacagaccgagcgtctaaatcagatcctagaagatatgcttcgcgcatgcgtcctagatttcgggaagacctgggataagagtctcccctatgccgagttctcctacaataacagctatcaagccagcatacaaatggcaccctatgaagcgttgtttcagacaaaagggaagctcgcacctcggttcgtgggtcctttccgtatcattgctcgacgcggagaagtcgcttaccagttggagctgcccgcctccttgggcaacgtgcatgatgtgttccatgtgtcgcaactcaagaaatgtcttcgagtgccatccgagcaggccgactcagagcaaattgaagttcgcgaagacttgacctacgtggagaggccagtgaaaatcctggacaccatggagcgcaggaccaggaaccgggtaatccgtttttgcaaggtccaatggagcaaccacgccgaagaagaagctacctgggagcgtgaagacgagctgaaagcagcccatcccgatctcttcgccagttcttccgaatctcggggtcgagattccgtttaa

SEQ ID NO: 14207 - DNA, 5355 bp, Oryza sativa
  Clone ID: TFbOSC401235j.C1.o71.fg
atggatgaagtcgggggtcgatggacattctccagggcaaatgaaggctacacgagctgcggcccgatggccggcagcgttacccgtcgtggtttggacatgactggcttcgtcttggagctgcggggcatgtgcgtggtcttggggtatccacatggagtggattaccaggccaggccgctcccggagcaggagggtgaggatgcagagcctcacgctggttgggaggtcactgccgtgatcctctccggctctcccgagcggacttcgctggcagtcaccgcgggtggagattccttccccgccgcttgccagaacgctgctctcctcgccatcggcacccttcaccagcgctacccggacgagttgcagcactcgccctaccgctaccaccctcgtcgtggaggcgcccgcgaccacgccaccttccgagatgccagctcggaggatgacgctaccgtcgtgcatctggcacgcatggtggaggcatacgacgcggctcgtatcgacttccaccagatggtgcgccgtggcatggtggagaacaacatgaagatcctggagctgcgtcaggagaatctgcagctcaagaaggacctcgacgcgttggaggcgcagctgcatcagctcaaggtcgcccaaggagaggacagccgccccaagcgccgccgcgtctgccgcagccagaagatcaccgcccgcaagagcacctccaggcccgagcttgttcgtcagtccctggcgtggacctgcttcgtcgagacccctcgtgccgagcctgcgcccgtggttccccaggagggggaagcatccggcgttggtagcacggaggatgcgctgttgctcaccttccgccctggcccgtcgcagcggagaaatgttagcaccggtgaaggcaaccaacccgaaggcagcaaccccaacccccaaggcaacccacctccaccaccaccacctgacaccaacgccattctcacccaaatcctcgcccagcaagccaacctgatgaccgctttcctccaccacctccaaaatccgccacaacagaatgctccaccactacctccccaacactccaaactcgccgaattcctccgcatccgcccacccaccttctctagctccaacaatcccgtggatgcgttggattggttgcatgccgtggggaagaagctagacacggtgcagtgcagcgacgaagagaaagtcaccttcgccgcccaccaactgcaagggcccgcatctctatggtgggaccacttccaggctacgcagcccgaggggcaaccgatcacttgggctcgcttcaccgccgctttccggagaacccatgtgcccgccggagtagtggctctcaagaagagggagttccgggagttgaaacaaggcaaccgctccgtgatggagtacttgcacgagttcaacaatctggcccggtacgctccggaggatgtgcgggaagatgaggagaagcaggagaagtttctggcaggaatggaccctgagctgtctgttcgtctggtctctggggactatccagacttccaacgtctggtggacaagagcatccgcttggaggccaagcacaaggagctggagtcgcacaagcgccgcttggcgaacttccgcaatcagcagggtgctaaccagagggtccgctacaccaatccctatccagggggatcctcctcgcagcagcagcagcagcaacctcgttccgcgccccgacctcaattcgtggtgcgcgtcccacagccgcagcagcagcagaaccaacaagggactcgtgcaccccgtcctcctacgccagccgtgcagcccgttcaaggccgcagggacgcttcaggtccgcagcgtctgtgcttcaactgcttcgagcccgggcactttgcggataaatgcccaaagccgaggcgccagcaaggccaagcgcctccccgctccaacaacggtggcaaggacgtcatccggggtcgtgtgaaccacgtggcggccgaggacgtgctgacaactccagacgtcattgttggtacgttcctcattcattccatccctgctaccattttgttcgactctggagcttcccactcgttcatatctgtgccattcgtggggaaaaatcagttgggggtagaaaggcttagaaaccctctgctcatcaccacccctggaggggttatgacagcaaagtattatagccctgccgtccctatagaaatccaggggattccttttccctcggatctgattctgctagacaccaagaatttggatgtgatccttgggatgaattggttggctcaattccaaggagtagtggattgcgcgagacgcactgtcactctgtaccgagggccagaacaaccggttgttttctttgcaccaccaacctctgtcaggagttcagaacttcatcagatagaactgtcagaaatccccgttgtcagagaattcggagatgtgtttccggaagaactacccggtatgccgcccaagcgagagattgagttccggatagatcttgctccaggaaccactcctctgcacaagcgaccctaccgtatggcagcaaatgaactggccgaagttaagaaacagttggaagagttgaaagaaaaggggtacatacgtccgagtacttccccttggggtgctcctgtgatttttgtggagaagaaagacaaaacgaagaggatgtgcgttgactacagagctctcaatgaagtcaccatcaaaaacaagtaccctcttccccggatcgatgatctgttcgatcagcttaaaggtgccactgtattctccaagattgatcttcgttccggatatcaccaattacgtatccgtgaggaagatattccgaagaccgcattcaccacgcgatatgggttatatgaattcacggtgatgtcgttcggcttgaccaatgcacctgcattcttcatgaacttaatgaataaagtgttcatggaatacttggacaagtttgttgtggttttcattgatgacattctgatatactcacagtcagaagaagaccatcagcaccatctccgtctggtgttgggaaagttgcgggaacatcaattgtatgccaagcttagcaagtgtgagttctggttgtccgaagtcaaattcttggggcacgtgatatctgctaaaggagttgccgtggaccccgaaacagtgaccgccgtcaccgattggaagcaacccaagacagttacccaagtccgcagtttcttgggtttggcaggatactaccggagattcatcgagaacttctccaaaatcgctcgacccatgacacagttgttgaagaaagaagagaaatttgtgtggagcccgcaatgcgagaaggcgttccaaactctcaaagaaaagctggtttcctcgccagtgttaatcttgccggatactcgcaaggatttcatggtgtactgtgatgcttcgcgccaaggattggggtgcgtactcatgcaggacggtcatgtggtagcctatgcctcgcgtcagctgcgacctcatgaaggcaactaccctacacatgacctggagttagcagcggtggttcacgctctgaaaatctggcggcactatctcattgggaatcgctgtgaaatatataccgatcataagagtttgaaatacatcttcacccagtcggatctgaatcttcggcaaagaagatggttagaactcatcaaggattatgatgtgggaattcactaccatcctggtaaggccaatgtggttgccgacgctctaagtcgaaagagccactgcaacactctcaacgcccgagacatcccacccgagcttaatcaacagatggaagccttgaacctaagcatagtcggtcgtggattcttagctgcgttggaagctaagcctaccttgctcgatcaaatccgcgaggctcagaagaatgatccggacatgcatggactcctgaagaatatgaaacagggtaaagccgctggtttcacggaggatgaacacggaaccctatggaacggaaaccgggtatgcgttccagctgacaaagaacttaaacagctgatacttcaggaagctcacgaaagtccttactcaatccacccgggcagtaccaagatgtacttagacttgaaggggaaatactggtgggtcagcatgaagcgggaaattgcagagttcgtggctctttgtgatgtgtgccagcgtgtcaaggcagaacaccagcgaccggccggacttctccaacctctccaagtgccagaatggaagtgggatgaaattgggatggatttcatcaccggccttccaaaaacccaaggtggatatgattctatatgggtaattgtggatcgattaacaaaggtagctcgatttattcctgtgaagaccacctatggagggaacaaactagcggaactctacttcgctaggatcgtgagtctccatggtattcccaagaaaatcgtatctgataggggaagccaattcacctctcacttttggaagaagctccaagaagagctgggtactcgattgaatttcagcactgcctatcacccgcagacagatggacagaccgagcgtctaaatcagatcctagaagatatgcttcgcgcatgtgtcctagatttcgggaagacttgggataagagtctcccctatgccgagttctcctacaataacagctaccaagccagcatacaaatggcaccttatgaagcgttgtacgggcgcaaatgccggacaccgcttttgtgggaccaagttggggaaagccaagtgttcgggactgatatcttgagagaagctgaagctaaagtcagaatcattcgggataatttaaaggtggcacagtcccggcagaaaagctatgcagacaaccgtcgccgtgacctggaattcgcggtggatgattttgtgtacctccgggtcacaccattgcgaggtgtgcacaggtttcagacaaaagggaagcttgcacctcggtatgtgggtcccttccgtgtcatcgctcgacgcggagaagtcgcttaccagctggagttgcccgcctccttgggcaacgtgcatgatgtgttccatgtgtcgcaactcaagaaatgtctccgagtgccatccgagcaggccgactcagagcagattgaagttcgcgaagacctgacttatgtggagaggccagtgaaaatcctggacaccatggagcgcaggaccaggaaccgggtaatccgtttttgcaaggtccagtggagcaaccacgccgaagaagaagctacgtgggagcgcgaagacgagctgaaggccgcccatcccgatctcttcgccagttcctccgaatctcggggtcgagattccgtttaa

SEQ ID NO: 14208 - DNA, 5055 bp, Oryza sativa
  Clone ID: TFbOSC401237j.C1.o35.fg
atggacatctctagggcaaatgaaggctacacgagctgcggcccggtagtcgagatgtcatggcacagggccggtgtcctgctgctaggggctcagtcctgcctacctgtcccggagattccggccgtaggtgggattgggtcggtactcttgtctatggctaggatgggttggaaactatgtcacgtcttccgtctgtataccgtggtgatggccggcagcatcaaccgtcgtggtctggacctgactggctttgttttggagctgcggggcatgtgtgttgtcctggggtatccgcatggagtggactaccagggcaggcagctcccggagcaggagggtgacgatgcagagccccacgctgcttgggaggttactgcagtgatcctcactggctctcccgagaggacttcgttggcagtcaccgcgggtggagattctttctccgccgcttgccagaacgccgctctcctcgccatcggcactcttcaccagcgctacccggacgagttgcagcactcgccctaccgctaccaccctcgccgcggaggagcccgcgaccacgccacctttcgggatgctagctcggaggatgacgctaccatcatgcatctggcgcgcatggtggaggcgtacgacgcggcccgtatcgacttccatcagatggtgcgccgtgggatggtcgagaacagcatgaagatcctggagctgcgtcaggagaatctgcagctgaagaaggacctagacgcagtggaggcgcagctgcatcagctcaagatcgcccagggagaggtctgtcgccccaagcgtcgccgcgtctgccgcagccagaagatcaccgcccgcaagagtacctccaggcccgagcttgttcgccagtccttggcatggacctgcttcgtcgagacccctcgtgccgagcccgcgcccgtggttcctcaggagggggaagcctcaggcgttggtagcacggaggatgcgctgttgctcaccttccgtcctggcccgtcgcagcggagaagtgctaacaccggtgatggcaaccaacctgaaggcagcaaccacaacaaccatggcagcccacctccacctcctcctccgcctccaccaccaccactagacaccaatgccatcctcacccaaatcctagcccagcaggccaacatgatggctgctttcctccaccacatccaaaatccgccacaacataatgctccaccaccacccccacaacactctaaactcgccgagttcctccgcatccgtccacctaccttctctagctccaataaccccgtggatgcattggattggttgcatgccgtggggaaaaagttagacaccgtgcagtgcagcgatgaggagaaagtcgtcttcgccgcccaccagctgcaggggcccgcatctctatggtgggaccatttccaggctacgcagccagaggggcagcctattacttgggcccgcttcaccgccgccttccggaggacccatgtgcccgccggagtcatggcccttaagaaaagggaattccgagagttgaagcaaggcaaccgctccgtgatggagtatttgcatgagtttaacaacctggcccggtacgccccggaggatgtacgggaagatgaggaaaagcaggagaagttcttggcaggaatggaccctgagctgtccgtgcgtctagtctccgggggatcgtcctcgcagcagcaacagcagcaacaacctcgctccgcgccccgacctcaattcgtggtgcgcatcccacagccgcaacaacagcagagtcagcaagggacccgtgcgccccgtcctcctacgacagccgcgcagtctggtcaaggccgcagggacgttcaaggtccgcagcgtctgtgcttcaattgcttcgagcctgggcactttgcggataaatgcccaaagccgaggcgccagcaaggccaagcgcctccccgctccaacaacggtggtaaggatgtcattcggggtcgtgtgaaccacgtgacggccgaggacgtgctgacaactccagacgtcatcgttggtacgttcctcattcattccatccctgctaccattttgttcgactctggagcttcccactcgtttatatctgtgccattcgtggggagaaatcagttgggggtagaaaggcttaggaaccctccgctcatcaccacccctggaggggttatgacagcaaagtattatagccctgctgttcctatagaaattcagggaattccttttccttcggatctgattcttctagacaccaagaacttggatgtgatccttgggatgaattggttggctcaattccaaggagtagtggattgcgcgagacgcactgtcactctgtaccgagggccggaacaaccggttgttttctttgcacccccaacctctgtcagtagtttagaacttcatcagataggactgtcagaaatccccatcgtcaaagagttcggagacgtgtttccggaagaactacccggtatgccgcccaagcgagagattgagttccggatagatcttgctccaggaaccactcctctgtacaagcgaccctaccgtatggcagcaaatgaactggccgaagttaagaaacagttggaagagttgaaagaaaaggggtatatacgtccgagtacttccccctggggtgctcctgtgatttttgtggagaagaaagacaagacgaagaggatgtgcgttgactacagagctctcaatgaagtcaccatcaaaaacaagtaccctcttccccggatcgatgatctgttcaatcagcttaaaggtgccacggtattctccaagattgatcttcgttccggatatcaccagttgcgcatccgtgaagaagatattccgaagaccgcattcaccacgcgatacggactgtatgaattcacggtgatgtcgttcggtttaaccaatgctcctgccttcttcatgaacttaatgaacaaagtgttcatggaatacttggataagtttgttgtagttttcattgatgacattatggtatactcacaatcagaggaagaccatcagcaccatctccgtctggtgttgggaaagttgcgggaacatcaattgtatgccaaacttagcaagtgcgagttctggttgtccgaagtcaaattcttagggcacgtgatatctgctaaaggagttgctgtggaccccgaaacagtgaccgccgtcaccgattggaagcaacccaagacagtcactcaaattcgcagtttcttaggtttggctggatactaccggaggttcatcgagaacttctccaaaatcgctcgacccatgacacagttgttgaagaaagaagagaaatttgtgtggagcccgcaatgcgagaaggcgttccaaactctcaaagaaaagctggaaggtcatgtggtggcctatgcctcacgccagctacggccccatgaaggcaattaccctacccatgatttggagttagccgctgtggttcatgctctaaagatctggcggcactacctcattgggaatcgctgtgaaatatatactgatcataagagtttgaaatacatcttcacccagtcggatctgaatcttcggcagaggagatggttagaactcatcaaggattatgatgtgggaattcactatcatcctggtaaggccaacgtggtagccgacgctctaagtcgaaaaagccattgcaacactcttgtcgtccgtggcattccacccgaacttaatcaacagatggaagccctgaatctaagcatagttagtcgtggattcttggctacgctggaagccaagccttccttgctcgatcaaatccgcgaggctcagaagaacgatccggacatgcgtggactcctcaagaatatgaaacagggtaaagccgctggtttcacagaggatgaacacggaaccctatggaacggaaatcgggtatgcgttccagatgtcagagaacttaaacagctgatacttcaggaagctcacgagagtccttattccatccaccctggcagcacgaagatgtacttagacttgaaagagaaatactggtgggttagtatgaagcgggaaattgcagagttcgtggccctttgtgacgtgtgccagcgtgtcaaggcagagcaccaacgaccggccggacttctccaacctctccaagtaccagaatggaaatgggatgaaattgggatggatttcatcaccggacttccaaaaacccaaggtggatatgattctatatgggtagttgtggaccgattaaccaaggtagctcggtttattcctgtgaaaaccacctatggagggaacaaactagccgagctctacttcgctaggatcgtgagtctccatggcgttcctaagaaaattgtatctgataggggaagccaattcacctctcacttttggaagaagctccaagaagagctgggtacccgattaaatttcagcaccgcgtatcacccgcagacagatggacagaccgagcgtctaaatcagatcctagaagatatgcttcgcgcatgtgtcctagatttcgggaagacctgggataagagtctcacctatgccgagttctcctacaataacagctatcaagccagcatacaaatggcaccctatgaagcgttgtatggacgcaaatgccggacaccgctattgtgggaccaagttggggaaagccaagtgttcgggactgatatcctgagagaagctgaagctaaagtcagaaccattcgggataatctaaaggtggcccagtctcggcagaagagttatgcagacaaccgacgccgtgacctggaattcgcagtggatgactttgtgtatcttcgggtcacgccattgcgaggtgtacacaggtttcagacgaaagggaagctcgcacctcggttcgtgggtcctttccgcatcattgctcgacgcggagaagttgcttaccagttggagctgcccgcctccttgggcaacgtgcatgatgtgttccatgtgtcgcaactcaagaaatgtcttcgagtgccatccgagcaggccgactcagagtaa

SEQ ID NO: 14209 - DNA, 5352 bp, Oryza sativa
  Clone ID: TFbOSC401303j.C1.o1.fg
atggatgaagtcgggggtcgatggacattctccagggcaaatgaaggctacacgagctgcggcccgatggccggcagcgttacccgtcgtggtttgcacatgactggcttcgtcttggagctgcgaggcatgtgcgtggtcttggggtatccacatggagtggattaccaggccaggccgcttccggatcaggagggtgaggatgcagagcctcacgctggttgggaggtcactgcagtgatcctctccggctctcccgagcggacttcactggcagtcaccgcgggtggggattccttccccgccgcttgccagaacgccgctctcctcgccatcggcacccttcaccagcgctacccggacgagttgcagcactcgccctaccgctaccaccctcgtcgcggaggagcccgcgactacgccaccttccgggacgccagctcggaggatgacgctaccgtcgtgcatctggcacgcatggtggaggcgtacgacgcggctcgtatcgacttccatcagatggtgcgtcgtggcatggtggagaacaacatgaagatcctggagctgcgtcaggagaacctgcagctcaagaaggacctcgacgcgttggaggcgcagctgcatcagctcaagatcgcccagggagagatctgccgccccaagcgtcgccgcgtctgccgcagccagaagatcaccgcccgcaagagcacctccaggcctgagcttgtccgtcagtccctggcgtggacttgcttcgtcgagacccctcgtgccgagcctgcgcccgtggttccccaggagggggaagcctccggcgttggtagctcggagggtgcgctgttgctcaccttccgccctggcccgtcgcagcgctctccttctctgtttgctggttctgtgtggggttttcagatggtgacgaccaggagaaatgttaacaccggtgaaggcaaccaacccgaaggcagcaaccccaacccccaaggcaatccacctccaccaccaccaccagacaccaacgccattctcacccaaatcctcgcccagcaagccaacatgatgaatgctttcctccaccacctccaaaacccgccacaacagaatgctccaccaccacctccccaacactccaaactcgccgaattcctccgcatccgcccacccaccttctctagctccaacaatccagtagatgcgttggattggttgcatgccgtggggaagaagctggacactgtgcagtgcagtgatgaagagaaagtcatcttcgccgcccatcagctgcagggacccgcatctctatggtgggaccatttccaggccacgcagccagagggacagcctattacttgggcccgcttcaccgccgctttccggagaacccatgtgcccgctggagtcgtggctcttaagaaaagggaattccgagagttgaagcaaggcaaccgctccgtgatggagtatttgcatgagttcaacaatctagcccgttatgccccggaggatgtgcgggaagatgaggagaagcaagagaagttcttggcaggaatggaccctgagctgtccgttcgtctagtctctggggactatcctgattttcaacgactggtggacaagagcatccgcttggaagccaagcacaaggagctggaatcgcacaagcgccgcttggcgaatttccgcaatcagcagggtgctaaccagagggtccgctacaccaatccctacccagggggatcctcctcgcagcagcagcaacagcagcagaatcagcaagggactcgtgcgccacgtcctcctacgccaactgtgcagcccgttcaaggccgcagggacgcttcaggtccgcagcggctgtgcttcaactgcttcgagcccgggcactttgcggataaatgcccgaagccaaggcgtcagcaaggccaagcgcctccccgctccaacaacggtggcaaggacgtcattcggggtcgtgtgaatcacgtgacggccgaggacgtgctgacaactccagacgtcatcgttggtacgttccccgttcattccatccccgctacaattttgttcgactctggagcttcccactcgtttatatctgtgccattcgtggaaaaaaatcagttgggggtagaaaggcttagaaaccctctgctcatcaccacccctggcggggttatgacggcaaagtattatagccctgccgttcctatagaaattcaggggattccttttccctcggatctgattctgttagacacaaagaacttggatgtgattcttgggatgaattggttggctcaattccaaggagtagtggattgcgcgaggcgcactgtcactctgtaccgaggaccagaacaaccggttgttttctttgcacctccaacctctgtcagaagttcagaactgcatcagataggtctgtcagaaatccccatagtcagagagttcggagacgtgtttccggaggaactacctggtatgccgcccaagcgagaaattgagttccggatagatcttgctccaggaaccactcctctgtacaagcgaccctaccgtatggcagcaaatgagctggccgaagttaagaaacagttggaagagttgaaagaaaaggggtacatacgtccgagtacttccccttggggtgcccctgtgatttttgtagaaaagaaagacaagacgaagaggatgtgcgttgactacagagctctcaatgaagttaccatcaaaaacaagtaccctcttccccggatagatgatttgttcgatcagcttaaaggtgccactgtattctccaagattgatcttcgttccggatatcatcaattacgtattcgtgaggaagacattccgaagaccgcattcactacgcgatatgggctgtatgaattcacggtgatgtcgttcggcttgaccaatgcacctgccttcttcatgaacttgatgaacaaagtgttcatggaatacttggataagttcgttgtggttttcatcgatgacattctgatatactcacaatcagaggaagaccatcagcaccatctccgtctggtgttgggaaagttacgggaacatcaattgtatgccaagcttagcaagtgtgagttctggttgtccgaagtcaaattcttggggcacgtgatatctgctaaaggagttgctgtggatcccgaaacagtgaccgccgtcaccgattggaagcaacccaagacagtcactcagattcgcagtttcttgggtttggcaggatactaccggagattcatcgagaacttctccaaaatcgctcgacccatgacacagttgttgaagaaagaagagaagtttgtgtggagcccgcaatgcgagaaggcgttccaaactctcaagcaaaagctggtttcctcgccagtgttaatcttgccggatacccgcaaggacttcatggtgtactgtgatgcttcgcgccaaggattggggtgcgtactcatgcaggacggtcatgtggtagcctatgcctcacgccagctacgacctcatgaaggcaactaccctacacatgacttggagctagcagcggtggttcatgctctaaaaatctggcggcactatctcattgggaatcgctgtgaaatatatactgatcacaagagcttgaaatacatcttcactcagtcggacctgaatcttcgacaaaggagatggttagaactcatcaaggattatgatgtgggaattcactatcatcctggcaaggctaacgtggttgccgacgctctaagtcgaaagagccattgcaatactctcaacgttcgtggcattccacccgaacttagtcaacagatggaagccctgaacctaaacatagttggtcgtggatttttggccgcgttggaagccaagcctaccttgctcgatcaaatccgcgaggctcagaagaatgatccggacatgcatggactcctcaagaatatgaaacagggtaaagccgcaggtttcacagagggtgaacacggaaccttatggaacggaaagcgggtatgcgttccagatagcagagaacttaaacagctgatacttcaggaagctcacgaaagtccttattccattcacccgggcagtaccaagatgtacttagatttgaaggagaaatactggtgggtcagcatgaagcgggaaattgcagagtttgtggctctatgtgatgtgtgccagcgtgtcaaggcagaacaccagcgaccggccggacttctccaacctctccaagtgccggaatggaaatgggatgaaattgggatggatttcatcaccggacttccaaaaacccaaggtggatatgattctatatgggtaatagtggatcgattaaccaaggtagctcgatttattcctgtgaagaccacctatggagggaacaaactagcggagctctacttcgctaggatcgtgagtctccatggcgttcccaagaaaatcgtatctgataggggaagccaattcacctctcacttttggaagaagctccaagaagagctgggtactcgattgaatttcagcaccgcgtatcacccgcagacagatggacagaccgagcgtctaaatcagatcttagaagatatgcttcgcgcatgtgtcctggacttcgggaagacttgggataagagtctcccctatgccgagttctcctacaataacagctatcaagccagcatacaaatggcaccctatgaagcgttgtacgggcgcaaatgccggacaccgctattgtgggaccaagttggagaaagccaagtgttcgggactgatatcctgagagaagctgaagctaaagtcagaatcattcgggataatctaaaggtggcacagtctcggcagaaaagttatgcagataaccgacgccgtgatctggaattcgcagtggatgactttgtgtaccttcgagtcacgccattgcgaggtgtgcacaggtttcagacaaaagggaagctcgcacctcggtatgtgggtcccttccgtatcatcgctcgacgcggagaagttgcttaccagctggagttgcccgcctccttgggtaacgtgcatgatgtgttccatgtgtcgcaactcaagaaatgtctccgagtgccatccgagcaggccaactcagagcaaattgaagttcgcgaagatttgacctatgtggagaggccagtgaaaatcctggacaccatggagcgcaggaccaggaaccgggtaatccgtttttgcaaggtccagtggagcaatcacgccgaagaagaagctacttgggagcgcgaagacgagctgaaggcagcccatcccgatctcttcgccagttcttccgaatctcggggtcgagattccgtttaa

SEQ ID NO: 14210 - DNA, 5424 bp, Oryza sativa
  Clone ID: TFbOSC401317j.C1.o24.fg
atggaggtggatgaagtcgggggtcgatggacattctccagggcaaatgaaggctacacgagctgcggcccggtagtcgagatgtcatggcacagggccggtgtcctgctgctaggggctcagtcctgcctgcctgtctcgggggttccggccgtaggtgggattgggtcggtactcttgtctatagctaggatgggttggaaactatgtcacgtcttccgtctgtataccgtggtgatggccggcagcgtcacccgtcgtggtttggacatgactggtttcgtcttggagctgcggggcatgtgcgtggtcctggggtatccacatggagtggactaccaggccaggccgcttccggagcaggagggtgacgatgcggagccccacgctgcttgggaggtcactgcagtgatcctcgctggctctcccgagcggacttcgctgacagtcaccgcgggtggagactccttccccgccgcctgccagagcgccgctctcctcgccatcggcactcttcaccagcgctacccggacgagttgcagcactcgccctactgctaccaccctcgtcgcggaggagcccgcgaccacgccaccttccgggacgctagctcggaggatgacgctaccatcgtgcacttggcgcgcatggtggaggcatacgacgcggctcgtatcgacttccatcagatggtgcgccgtgggatggtcgagaacaacatgaagatcctggagctgcgtcaggagaacctgcagctcaagaaggacctggacgcagtggaggcgcagctgcaccagctcaagatcgcccagggagaggtctgccgccccaagcgtcgccgcgtctgccgcagcctgaagatcaccgcccgcaagagcacctccaggcctgagcttgttcgtcagtccctggcgtggacctgcttcatcgagacccctcgtgccgagcctgcgcccgtgatggtgacgaccaggagaaacgctgttaccggtgatggcaaccaacctgaaggcagcaaccacaacaaccatggcagtccacctccacctccacctcctcctccaccaccaccaccagataccaacgccattctcacccaaatcctcgcccagcaggccaacatgatgactgctttcctccaccacctccaaaatccgccacaacttaatgctccaccaccacccccacaacactctaaactcgccgagtttctccgcatccgcccacctaccttctctagctccaacaaccccgtggatgcgttggattggttgcatgccgtggggaaaaagttagacactgtgcagtgcagcgatgaggagaaagtcatcttcgccgcccaccaactgcagggacccgcatctctatggtgggaccatttccaggctacgcagccagaggggcagcctattacttgggcccgttttaccgccgctttccggagaacccatgtgcccgccggagtcgtggcccttaagaaaagggaattccgagagttgaagcaaggcaaccgctccgtgatggagtatttgcatgagttcaacaacctggcccgttacgccccggaggatgtgcgggaagatgaggagaagcaagagaagttcttggcaggaatggaccctgagctgtccgtgcgtctagtctccggggactatccggacttccaacgtctggtggacaagagcatccgcttggaagccaagcacaaggaactggagtcgcacaagtgccacttggagaatttccgcaaccaacagggtgctaaccaaagggtccgctacaccaatccctatccagggggatcctcctcgcagcagcaaccacagcagcagcaacctcgctccgcgcctcgacctcaattcgtggtgcgcgtcccacagccgcagcagcaacagaatcaacaagggactcgagcgccccgtcctcctacgccaactgtgcagcctggtcaaggccgcagggacgcttcaggtccgcagcgtctgtgcttcaactgcttcgagcccgggcactttgcggataaatgcccgaagccaaggcgtcagcaaggccaagcgcctccccgccccaacaacggtggtaaggatgtcattcagggtcgtgtgaaccatgtgacggccgaggacgtgctgacaactccagacgtcatcgttggtacgttcctcattcattccatccctgctaccattttgttcgactctggagcttcccactcgtttatatctgtgccattcgtggggagaaatcagttgggggtagaaaggcttagaaaccctctgctcatcaccacccctggagaggttatgacagcaaagtattatagccctgccgtccctatagaaattcaggggattccttttccctcggatctgattctgctagacaccaggaacttggatgtgatccttgggatgaattggttggctcaattccaaggagtagtggattgcgcgagacgcactgtcactctgtaccgagggccggagcaaccggttgttttctttgcacccccaacctctgtcaatagatcagaactgcatcagataggactgtcagaaatccccatcgtcagagagtttggagacgtgttcccggaagaactacccggtatgccgcccaagcgagagattgagttccggatagatcttgctccaggaaccacccctctgtacaagcgaccctaccgtatggcagcaaatgaactggccgaagttaagaaacagttggaagagctgaaagaaaaggggtatatacgtccgagtacttccccctggggtgctcctgtgatttttgtggagaagaaggacaagacgaagaggatgtgcgttgactacagagctctcaatgaagtcaccatcaaaaacaagtaccctcttccccggatcgacgatctgttcgatcagcttaaaggtgccactgtattctccaagattgatcttcgttccggatatcaccaattacgtattcgcgaagaagatattccgaagaccgcattcaccacgcgatacggactgtatgaattcacggtgatgtcgttcggtttaaccaatgcccctgccttcttcatgaacttaatgaacaaagtgttcatggaatacttggataagtttgtggtggtattcattgatgacattctgatatactcacaatcagaggaagaccatcagcaccatctccgtctggtattgggaaagttgcgggaacatcaattgtatgccaaacttagcaagtgtgagttctggttgtccgaagtcaaattcttagggcacgtgatatctgctaaaggagttgctgtggaccccgaaacagtgaccgccgtcaccgattggaagccacccaagacagtcactcaagttcgcagtttcttaggtttggcaggatactaccggagattcatcgagaacttctccaaaatcgctcgacccatgacacagttgttgaagaaagaagagaaatttgtgtggagcccgcaatgcgagaaggcatttcaaactctcaaagaaaagctggtttcctcgccagtgttaatcttgccggatactcgcaaggacttcatggtgtattgtgacgcttcgcgccaaggattggggtgcgtgctcatgcaggatggtcatgtggtggcctatgcctcacgccagctacgacctcatgaaggcaactaccctacccatgatttggagttagcagcggtggttcatgctctaaaaatctggcggcactatctcattgggaatcgatgtgaaatatatactgatcataagagtttgaaatacatcttcacccagtcggatctgaatcttcggcaaaggagatggttagaactcatcaaggattatgatgtgggaattcactatcatcctggtaaggccaacgtggtcgccgacgctctaagtcaaaaaggccattgcaacactcttaacgtccgtggcattccacccgaacttaatcaacagatggaagccctgaacctaagcatagttagtcgcggatttttggctgcgctggaagccaagcccaccttgctcgatcaaatccgcgaggctcagaagaatgatccagacatgcatgggctcctcaagaatatgaaacagggtaaagccgctggtttcacagaggatgaacacggaaccctatggaacggaaatcgggtatgcgttccagataacagagaacttaaacagttgatacttcaggaagctcacgaaagtccttattccatccaccctggcagcacgaagatgtacttagacttgaaggagaaatactggtgggttagtatgaagcgggaaattgcagagttcgtggccctttgtgatgtttgccagcgtgtcaaggcagagcaccaacgaccggccggacttctccaacctctccaagtacctgaatggaaatgggatgaaattgggatggatttcatcaccggacttccaaaaacccaaggtggatatgattccatatgggtagttgtggatcgattaaccaaggtagctcgattcattcctgtgaagaccacctatggagggaacaaactagccgaactctacttcgctaggatcgtaagtctccatggcgttcctaagaaaatcgtatctgataggggaagccaattcacctctcacttttggaagaagctccaagaagagctgggtacccgattaaacttcagcaccgcgtatcacccgcagacagatggacagaccgagcgtctaaatcagatcctacaagatatgcttcgcgcatgtgtcctagatttcgggaagacctgggataagagtctcccctatgccgagttctcctacaataacagctatcaagccagcatacaaatggcaccttatgaagcgttgtatgggcgcaaatgccggacaccgctcctgtgggaccaagttggagaaagccaagtgttcgggactgatatcctgagagaagctgaagctaaagtcagaaccattcgggataatctaaaggtggcacagtcccggcagaaaagttatgcagataaccgtcgccgtgacctggaattcgcagtggatgattttgtgtaccttcgggtcacgccattgcggggcgtacacaggtttcagacaaaaggggaagctcgcacctcgctgcccgcctccttgggcaacgtgcatgatgtgttccatgtgtcgcaactcaagaaatgtctccgagtgccatccgagcaggccgactcagagcaaattgaagttcgcgaagacttgacctacgtggagaggccagtgaaaatcctggataccatggagcgcaggaccaggaaccgggtaatccgtttttgcaaggtccaatggagcaaccacgccgaggaagaagctacttgggagcgtgaagacgagctgaaggcagcctatcccgatctcttcgccagttcttccgaatctcggggtcgagattccgtttaa

SEQ ID NO: 14211 - DNA, 4908 bp, Oryza sativa
  Clone ID: TFbOSC401317j.C1.o25.fg
atgtcatggcacagggccggtgtcctgctgctaggggctcagtcctgcctacctgtcccgggggttccggccgtaggtgggattgggtcggtactcttgtctatggctaggatgggttggaaactatgtcacgtcttccgtctgtataccgtggtgatggccggcagcatcaaccgtcgtggtctggacctgactggctttgttttggagctgcggggcatgtgcgttgtcctggggtatgcgcatggagtggactaccagggcaggcagctcccggagcaggagggtgacgatgcagagccccacgctgcttgggaggttactgcagtgatcctcactggctcacccgagaggacttcgttggcagtcaccacgggtggagattctttctccgccgcttgccagaacgccgctctcctcgccatcggcactcttcaccagcgctacccggacgagttgcagcactcgccctaccgctaccaccctcgccgcggaggagcccgcgactacgccaccttccgggatgctagctcggaggatgacgctaccatcatgcacctggcgcgcatggtggaggcgtacgacgcggctcgtatcgacttccatcagatgctgaagaaggacctagacgcagcagaggcgcagctgcatcagctcaagatcgcccagggagaggtctgtcgccccaagcgccgccgcgtctgccgcagccagaagatcaccgcccgcaagagcacctccaggcccgagcttgttcgccagtccttggcatggacctgcttcgtggagacccctcgtgccgagcccgcgcccatggctcctcaggagggggaagcctccggcgttgatggtgacgaccaggagaagtgctgctacggtgaaggcagtcaccccgaaggcagcaaccacaacaaccagggcagcccacctccacctcctcctccgcctctaccaccaccaccagacaccaacgccattctcacccaaatcctcgcccagcaggccaacatgatggctgctctcctccaccacatccaaaatccgccacaacataatgctccaccaccaccgccacaacactctaaactcgctgagttcctccgcatccgtccacctaccttctctagctccaataaccccgtggatgcgttggattggttgcatgccgtggggaaaaagttagacaccgtgcagtgcagcgatgaggagaaagctacgcagccagaggggcagcctattacttgggcccgcttcaccgccgctttccggaggacccatgtgcccgccggagtcatggcccttaagaaaagggaattccgagagttgaagcaaggcaaccgctccgtgatggagtatttgcatgagttcaacaacctggcccggtacgccccggaggatgtacgggaagatgaggaaaagcagaagaagttcttggcaggaatggatcctgagctgtccgtctgtctagtctccggggactatccggatttccaacgtctggtggacaagagcatccgcttggaagccaagcacaaggaactggagtcgcacaagcgccgcttggcgaatttccgcaatcaacagggagctaaccaaaggatccgctacaccaatccctatccagggggatcgtcctcgcagcagcaaaagcagcagcaacctcgctccgcgccccgacctcaattcgtggtgtgcgtcccacagccgcagcaacagcagagccagcaagggacccgtgcgccccgtcctcctacgccagccgcgcagtctggtcaaggccgcagggacgttcaaggtccgcagcgtctgtgcttcaactgctttgagcctgggcactttgcggataaatgcccaaagccgaggcgccagcaaggccaagcgcctccccgctccaacaacggtggtaaggatgtcattcggggtcgtgtgaaccacgtgacggccgaggacgtgctgacaactccagacgtcatcgttggtacgttcctcattcattccatccctgctaccattttgttcgactctggagcttcccactcgtttatatctgtgccattcgtggggagaaatcagttgggggtagaaaggcttaggaaccctctcctcatcaccacccctggaggggttatgacagcaaagtattatagtcctgccgtccctatagaaattcaggggattccttttccctcggatctgattcttctagacaccaagaacttggatgtgatccttgggatgaattggttggctcaattccaaggagtagtggattgtgcaagacgcactgtcactctgtaccgagggccggaacaaccggttgttttctttgcacccccaacctctgtcagtagttcagaacttcatcagataggactgtcagaaatccccatcgtcagagagttcggagacgtgtttccggaagaactacccggtatgccgcccaagcgagagattgagttctggatagatcttgctccaggaaccactcctctgtacaagcgaccctaccgtatggcagcaaatgaactggccgaagttaagaaacagttggaagagttgaaagaaagggggtacatacgtccgagtacttccccctggggtgctcctgtgatttttgtggagaagaaagacaagacgaagaggatgtgcgttgactacagagctctcaatgaagtcaccatcaaaaacaagtaccctcttccccggatcgatgatctgttcgatcagcttaaaggtgccacggtattctccaagattgatcttcgttccggatatcaccagttgcgcatccgtgaagaagatattccgaagaccgcattcaccacgcgatacggactgcatgaattcacggtgatgtcgttcggtttaaccaatgctcctgccttcttcatgaacttaatgaacaaagtgttcatggaatacttggataagtttgttgtggttttcattgatgacattctggtatactcacaatcagaggaagaccatcagcaccatctccgtctggtgttgggaaagttgcgggaacatcaattgtatgccaaacttagcaagtttgttgaagaaagaagagaaatttgtgtggagcccgcaatgcgagaaggcgttcaagaaaagctggtttcctcgccagtgttaatcttgccggatactcgcaaggacttcatggtgtattgtgacgcttcgcgccaaggattggggtgcgtgctcatgcaggaaggtcatgtggtggcctatgccttacgccagctacggcctcatgaaggcaactaccctacccatgatttggagttagccgcggtggttcatgctctaaaaatctggcggcattatctcattgggaatcgctatgaaatatatactgatcataagagtttgaaatacatcttcaaccagtcggatctgaatcttcggcagagaagatggttagagctcatcaaggattatgatgtgggaatccactatcatcccggtaaggccaacgtggtcgccgacgcgctaagtcgaaaaagccattgcaacactcttaacgtccgtggcattccacccgaacttaatcaacagatggaagccctgaacctaagcatagttggtcgcggattcttggctgcgttggaagctaagcctaccttgctcgatcaaatccgcgaggctcagaagaatgatccggacatgcgtggactcctcaagaatatgaaacagggtaaagccgctggtttcacagaggatgaacacggaaccctatggaacggaaatcgggtatgcgttccagataacagagaacttaaacagctgatacttcaggaagctcacgaaagtccttattccatccaccctggcagtacgaagatgtacttagacttgaaggagaaatactggtgggttagtatgaagcgggaaattgcagagttcgtggccctttgtgatgtgtgccaacgtgtcaaggcagagcaccaacgaccagccggacttctccaacctctccaagtaccagaatggaaatgggatgaaattgggatggatttcatcaccggacttccaaaaacccaaggtggatatgattctatatgggtagttgtggaccgattaaccaaggtagctcggtttattcctgtgaagaccacctatggagggaacaaactagccgagctctacttcgctaggatcgtgagtctccatggcgttcctaagaaaattgtatccgataggggaagccaattcacctctcacttttggaagaagctccaagaagagatggatacccgattaaatttcagcaccgcgtatcacccgcagacagatggacagaccgagcgtctaaatcagatcctagaagatatgcttcgcgcatgtgtcctagatttcgggaagacctgggataagagtctcccctatgccgagttctcctacaataacagctaccaagccagcatacaaatggcaccttatgaagcgttgtatgggcgcaaatgccggacaccgctcctgtgggacctagttggggaaaaccaagtgttcgggactgatatactgagagaagctgaagcgaaggttatcattgctcggcgcggagaagtcgcttaccagttggatctgcccgcctccttgggcaacgtgcatgatgtgttcgatgtgtcgcaactcaagaaatgtcttcgagtgccatccgagcaggccgactcagagcaaattgaagttcgcgaagacttgacctacgtggaaaggccagtgaaaatcctggacaccatggagcgcgggaccaggaaccgagtaattcgtttttgcaaggtccaatggagcaaccacgccgaggaagaagctacctgggagcgtgaagacgagctgaaggcagcccatcccgatctcttcgccagttcttccgaatctcggggtcgaaattccgtttaa

SEQ ID NO: 14212 - DNA, 2360 bp, Oryza sativa
  Clone ID: TFbOSC401341j.C1.o51.np
atggccgccaccggcgaccataggggcgcgggcgccgcctcccgccggccgcgccggcttggccgccctcgggcgcaccgagtggctgccgcgtggggcccggccgtcagccgcccgcgcccttaggtgcggctgacgcgtgggacccacggtgccggccgatggccggcagcatcaatcgtcgtggtctggacctgactggcttcgttttggagctgcggggcatgtgcgttgtcctggggtatccgcatggagtggactaccagggcaagcagctcccggagcaggagggtgacgatgcagagccccacgctgcttgggaggttactgcagtgatcctcactggctcacccgagaggacttcgttggcagtcaccgcgggtggagattccttctccgccgcttgccagaacgccgcactcctcgccatcggcactcttcaccagcgctacccggacgagttgcagcactcgccctaccgctaccaccctcgccgcggaggagcccgcgactacgccaccttccgggatgctagctcggaggatgacgctaccatcatgcacctagcgcgcatggtggaggcgtacgacgcggcccgtatggacttccatcagatggtgcgccgcgggttggtcgagaacaacatgaagatcctggagctgcgtcaggagaatctgcagctgaagaaggacctagacgtagtggaggcgcagctgtgtcagctcaagatcgcccagggagaggtctgtcgccccaagcgtcgccgcgtctgccgcagcctgaagatcaccgcccgcaagagtacctccaggcccgagcttgttcgtcagtccctggcgtggacctgcttcgtcgagacccctcgtgccgagcccgcgcccgtggttcctcaggaggatggagtctccggcgttggcagcacggaggatgcgctgctgctcaccttccgccctggcccgttgcagaagagaagtgctgctaccggtgatggcaaccaacccgtaggcagcaaccacaacaaccatggcagcccacctccacctcctcccccgcctccaccaccaccactagacaccaacaccatcctcacccaaatcatcgcccagcgggccaacatgatggctgctttcctccaccacatccaaaatccgccacaacataatgctccaccaccacccccacaacactctaaactcgccgagttcctccgcatccgtccacctaccttctctagctccaataaccccgtggatgctttggattggttgcatgccgtggggaaaaagttagacaccgtgcagtgcaacgatgaggagaaagtcatctttgccgctcactaactgcaggggcccgcatctctatggtgggaccacttccaggctacgtagccagaggggcagcctattacttgggcccgcttcaccgcctctttccagagaacccatgtgcccgtcggagtcatggcccttaagaaaagggaattctgagagttgaagcaaggcaaccgctccatgatggagtatttgcatgagtttaacaacctggcccggtacgccccggaggatgttcgtgaagatgaggagaagcaagagaagttcttggcaggaatggaccctgagctgtccgtgcgtctggtctccggggactatccggatttccaacgtctggtggacaagagcatccgcttggaagccaagcacaaggaactggagtcgcacaagcgtcgcttggcgaatttccgcaaccaacagggggctaaccaaagggtccgctacaccaatccctatccagggggatcctcctcgcagcagcagcagcagcagcaacctcgctccacgtcccgacctcaattcgtggtgcatgtcccacagccgcagcaacagcagagtcagcaagggactcgtgcgccccgtcctcctacgccagccgtgcagcctgttcaaggccgcagggacgctcaaggtcagcagcgtctgtgcttcaactgcttcgagcctgggcactttgcggataaatgcccaaagccgaggtgccagcaaggccaagcgcctccccgctccaacaacggtggtaaggatgtcattcggggtcgtgtgaaccacgtgacggccgagaacgtgctgacaactccagacgtcatcgttggtacgttcctcattcattccatccctgctaccatttttgtcacgtcccaaaacgactctaaaatacatcctctaaattatgcctagaataattaaaatccgtgtgaaagccttcaacaaataaaatccctaacctcgccggcgccattaatggcggccgggtcttccgcgcccgtttccccctcctccggccgccctctctcacccccaacccta

SEQ ID NO: 14213 - DNA, 5469 bp, Oryza sativa
  Clone ID: TFbOSC401344j.C1.o11.fg
atgtcatggcacagggccggtgtcctgctgctaggggctcagtcctgcctgcctgtcccggaggttccggccgtaggtgggattgggtcggtactcttgtctatggctaggatgggttggaaactatgtcacgtcttccgtctgtataccgtggtgatggccggcagcgtcacccgtcgtggtttggacatgactggcttcgtcttggagctgcggggcatgtgcgtggtcctagggtatccacatggagtggactaccaggccaggccgcttccggagcaggagggtgacgatgcagagccccacgctggttgggaggtcactgcagtgatcctctctggctctcccgagcggacttcgctggcagtcaccgcgggtggagattccttccccgccgcttgccagagcgccgctctcctcgccatcggcactcttcaccagcgctacccggacgagttgcagcactcgccctaccgctaccaccctcgccgcggaggagcccgcgactacgccaccttccgggatgctagctcggaggatgacgctaccatcgtgcacctggcgcgcatggtggaggcgtacgacgcggctcgtatcgacttccatcagatggtgcgccgtgggatggtcgagaacaacatgaagatcctggagctgcgtcaagagaacctgcagctcaagaaggacctagacgtggtggaggcgcagctgcatcagctcaagatcgcccagggagaggtctgccgccccaagcgccgccgtgtctgccgcagccagaagatcaccgcccgcaagagcacctccaggcccgagcttgttcgtcagtccctggcgtggacttgcttcgtcgagacccctcgtgccgagcccgcgcccgtggttccccaggagggggaagcctccggcgttggtagcacggaggatgcgctgttgctcaccttccgtcctggcccgtcgcagcggagaagtgctaacaccggtgatggcaaccaacctgaaggcagcaaccaccaccaccagtgcagcccacctccacctcctcctccgcctccaccaccaccaccagacaccaacgccattctcacccaaatcctcgcccagcaggccaacatgatgactgctttcctccaccacctccaaaatccgccacaacataatgctccaccaccacccccacaacactctaaactcgccgagttcctccgcatccgcccacctaccttctctagctccaacaaccccgtggacgcgttggattggttgcatgctgtggggaaaaagctagacactgtgcagtgcagcgatgaggagaaagtcatcttcgccgcccaccagctgcagggacccgcatctctatggtgggaccatttccaggctacgcagccagaagggcaacctattacttgggcccgtttcaccgccgctttccggagaacccatgtgcccgccggagtcgtggcccttaagaaaagagaattccgagagttgaagcaaggcaaccgctccgtgatggagtatttgcatgagttcaacaacctggcccgttacgccccggaggatgtgcgggaagatgaggagaagcaagagaagttcttggcaggaatggaccctgagctgtccgtccgtctagtctccggggactatccggatttccaacgtctagtggacaagagcatccgcttggaagccaagcacaaggaactggagtcgcacaagcgccgcttggcgaatttccgcaatcaacagggtgctaaccaaagggtccgctacaccaatccctatccagggggatcctcctcgcaacagcaacaacagcagcagcaacctcgctccgcgcctcgacctcaattcgtggtgcgcgtcccacagccgcagcagcagcagaatcaacaagggactcgtgcgccccgtcctcctacgccaactgtgcagcctggtcaaggccgcagggacgctcaaggtccgcagcgtctgtgcttcaactgcttcgagcccgggcactttgcggataaatgcccaaagccgaggcgtcagcaaggccaagcgcctccccgctccaacaacggtgggaaggatgtcattcggggtcgggtgaaccacgtgacggccgaggacgtgctgacaactccagacgtcatcgttggtacgttcctcattcattccatccctgctaccattctgttcgactctggagcatcccactcgtttatatctgtgccattcgtggggagaaatcagttgggggtagaaaggcttaggaaccctctgctcatcaccacccctggaggggttatgacagcaaagtattatagtcctgccgtccctatagaaattcaggggattcctttttcctcggatctgattctgctagacaccaagaacttggatgtgatccttgggatgaattggttggctcaattccaaggagtagtggattgtgcgagacgcactgtcactctgtaccgagggccggaacaaccggttgttttctttgcacccccaacctctgtcagtagttcagaacttcatcagataggactgtcagaaatccccatcgtcagagagttcggagacgtgtttccggaagaactacccggtatgccgcccaaacgagagattgagttccggatagatcttgctccaggaaccactcctctgtacaagcgaccctaccgtatggcagcaaatgaactggccgaagtcaagaaacagttggaagagttgaaagaaaaggggtatatacgtccgagtacttccccctggggtgctcctgtgatttttgtggagaagaaagacaagacgaagaggatgtgcgttgactacagagctctcaatgaagtcaccatcaaaaacaagtaccctcttccccggatcgatgatctgttcgatcagcttaaaggtgccactgtattctccaagattgatcttcgttccggatatcaccaattacgtattcgtgaagaagatattccgaagaccgcattcaccacgcgatacggactgtatgaattcacagtgatgtcattcggtttaaccaacgcacctgccttcttcatgaacttaatgaacaaagtgttcatggaatacttggataagtttgttgtggttttcattgatgacattctgatatactcacaatccgaggaagaccatcagtaccatctccgtctggtgttgggaaagttgcgggaacatcaattgtatgccaaacttagcaagtgtgagttctggttgtccgaagtcaaattcttagggcacgtgatatctgctaaaggagttgctgtggaccccgaaacagtgaccgccgtcactgattggaagcaacccaagacagtcactcaagtccgcagtttcttaggtttggcaggatactaccggaggttcatcgagaacttctccaaaatcgctcgacccatgacacagttgttgaagaaagaagagaaatttgtgtggagcccgcaatgcgagaaggcgttcaaaactctcaaagaaaagctggtttcctcgccagtgttaatcttgccggatacttgcaaggatttcatggtgtattgtgatgcttcgcgccaaggattggggtgcgtgctcatgcaggatggtcatgtggtggcctatgcctcacgccagctacggcctcatgaaggcaactaccctacccatgatttggagttagatgcggtggttcatgctctaaaaatctggcggcactatctcattgggaatcgctgtgaaatatatactgatcataagagtttgaaatacatcttcactcagtccgacctgaatcttcggcaaaggagatggttagaactcatcaaggattatgatgtgggaattcactatcatcctggtaaggccaacgtggtcgccgacgctctaagtcgaaaaagccattgcaacactcttaacgtccgtggcattccactcgaacttagtcaacagatggaagccctgaacctaagcatagttggtcgcggattcttggctgcgttggaagccaagcctaccttgctcgatcaaatccgcgaggctcagaagaatgatccggacatgcatggactcctcaagaatatgaaacaaggtaaagccgctggtttcacagaggatgaacacggaaccctatggaacggaaatcgagtatgcgttccagataacagagaacttaaacagctgatactacaggaagctcacgaaagtccttattccatccaccctggcagtacgaagatgtacttagacttgaaggagaaatactggtgggttagtatgaagcgggaaattgcagagttcgtggccctttgtgatgtgtgccagcgtgtcaaggcagagcaccaacgaccggccggacttctccaacctctccaagtacctgaatggaaatgggatgaaattgggatggatttcatcaccggacttcgaaagacccaaggtggatatgattctatatgggtagttgtggatcgattaaccaaggtagctcgatttattcctgtgaagaccacctatggagggaacaaactagccgagctctacttcgctaggatcgtgagtctccatggcgttcccaagaaaatcgtatctgataggggaagccaattcacctctcacttttggaagaagcttcaagaagagctgggtacccggttaaacttcagcaccgcataccacccgcagacagatgggcagaccgagcgtctaaatcagatcctagaagatatgcttcgcgcgtgtgtcctggatttcgggaagacctgggataagagtctcccctatgccgagttctcctacaataacagctatcaagccagcatacaaatggcaccttatgaagcgttgtatgggcgcaaatgccggacaccgctcttgtgggatcaagttggggaaagccaagtgttcgggactgatatcctgagagaagctgaagctaaagtcagaaccattcgggataatctaaaggtggcacagtcccggcagaaaagttatgcagataaccgtcgccgtgacctggaattcgcagtggacgattttgtataccttcgggtcacgccattgcggggtgtacacaggtttcggacaaaagggaagctcgcacctcggtatgtgggtcctttccgtatcgttgcccgacgcggagaagtcgcttaccaattggagctgcccgcctccttgggcaacgtgcacgatgtgttccatgtgtcgcaactcaagaaatgccttcgagtgccatccgagcaggccgactcagagcaaattgaagttcgcgaagacttgacctacgtggagaggccagtgaaaatcctggacaccatggagcgcaggaccaggaaccgggtaatccgtttttgcaaggtccagtggagcaaccacgtcgaagaagaagctacctgggagcgtgaagacgagctgaaggcagcccatcccgatctcttcgccagttcttccgaatctcggggtcgagattccgtttaa

SEQ ID NO: 14214 - DNA, 717 bp, Oryza sativa
  Clone ID: TFbOSC401344j.C1.o4.fg
atggagtatttgcatgagtttaacaacctggcccggtacgccccggaggatgttcgtgaagatgaggagaagcaagagaagttcttggcaggaatggaccctgagctgtccgtgcgtctggtctccggggactatccggatttccaacgtctggtggacaagagcatccgcttggaagccaagcacaaggaactggagtcgcacaagcgtcgcttggcgaatttccgcaaccaacagggggctaaccaaagggtccgctacaccaatccctatccagggggatcctcctcgcagcagcagcagcagcagcaacctcgctccacgtcccgacctcaattcgtggtgcatgtcccacagccgcagcaacagcagagtcagcaagggactcgtgcgccccgtcctcctacgccagccgtgcagcctgttcaaggccgcagggacgctcaaggtcagcagcgtctgtgcttcaactgcttcgagcctgggcactttgcggataaatgcccaaagccgaggtgccagcaaggccaagcgcctccccgctccaacaacggtggtaaggatgtcattcggggtcgtgtgaaccacgtgacggccgagaacgtgctgacaactccagacgtcatcgttggtacgttcctcattcattccatccctgctaccatttttgtcacgtcccaaaacgactctaaaatacatcctctaaattatgcctag

SEQ ID NO: 14215 - DNA, 5403 bp, Oryza sativa
  Clone ID: TFbOSC401348j.C1.o7.fg
atgtcatggcacagggccggtgtcctgctgctaggggctcagtcctgcctgcctgtcccggaggttccggccgtaggtgggattgggtcgatggccggcagcgtcacccgtcgtggtttggacatgactggcttcgtcttggagctgcggggcatgtgcgtggtcctggggtatccacatggagtggactaccaggccaggccgcttccggagcaggagggtgacgatgcagagccccacgctggttgggaggtcactgcagtgatcctctctggctctcccgagcggacttcgctggcagtcaccgcgggtggagattccttccccgccgcttgccagagcgccgctctcctcgccatcggcactcttcaccagcgctacccggacgagttgcagcactcgccctaccgctaccaccctcgccgcggaggagcccgcgactacgccaccttccgggatgctagctcggaggatgacgctaccatcgtgcacctggcgcgcatggtggaggcgtacgacgcggctcgtatcgacttccatcagatggtgcgccgtgggatggtcgagaacaacatgaagatcctggagctgcgtcaagagaacctgcagctcaagaaggacctagacgcggtggaggcgcagctgcatcagctcaagatcgcccagggagaggtctgccgccccaagcgccgccgtgtctgccgcagccagaagatcaccgcccgcaagagcacctccaggcccgagcttgttcgtcagtccctggcgtggacttgcttcgtcgagacccctcgtgccgagcccgcgcccgtggttccccaggagggggaagcctccggtgttggtagcacggaggatgcgctgttgctcaccttccgtcctggcccgtcgcagcggagaagtgctaacaccggtgatggcaaccaacctgaaggcagcaaccaccaccaccagggcagcccacctccacctcctcctccgcctccaccaccaccaccagacaccaacgccattctcacccaaatcctcgcccagcaggccaacatgatgactgctttcctccaccacctccaaaatccgccacaacataatgctccaccaccacccccacaacactctaaactcgccgagttcctccgcatccgcccacctaccttctctagctccaacaaccccgtggacgcgttggattggttgcatgccgtggggaaaaagctagacactgtgcagtgcagcgatgaggagaaagtcatcttcgccgcccaccagctgcagggacccgcatctctatggtgggaccatttccaggctacgcagccagaagggcaacctattacttgggcccgtttcaccgccgctttccggagaacccatgtgcccgccggagtcgtggcccttaagaaaagagaattccgagagttgaagcaaggcaaccgctccgtgatggagtatttgcatgagttcaacaacctggcccgttacgccccggaggatgtgcgggaagatgaggagaagcaagagaagttcttggcaggaatggaccctgagctgtccgtccgtctagtctccggggactatccggatttccaacgtctagtggacaagagcatccgcttggaagccaagcacaaggaactggagtcgcacaagcgccgcttggcgaatttccgcaatcaacagggtgctaaccaaagggtccgctacaccaatccctatccagggggatcctcctcgcagcagcaacaacagcagcagcaacctcgctccgtgcctcgacctcaattcgtggtgcgcgtcccacagccgcagcagcagcagaatcaacaagggactcgtgcgccccgtcctcctacgccaactgtgcagcctggtcaaggccgcagggacgctcaaggtccgcagcgtctgtgcttcaactgcttcgagcccgggcactttgcggataaatgcccaaagccgaggcgtcagcaaggccaagcgcctccccgctccaacaacggtgggaaggatgtcattcggggtcgggtgaaccacgtgacggccgaggacgtgctgacaactccagacgtcatcgttggtacgttcctcattcattccatccctgctaccattctgttcgactctggagcatcccactcgtttatatctgtgccattcgtggggagaaatcagttgggggtagaaaggcttaggaaccctctgctcatcaccacccctgaaggggttatgacagcaaagtattatagtcctgccgtccctatagaaattcaggggattccttttccctcggatctgattctgctagacaccaagaacttggatgtgatccttgggatgaattggttggctcaattccaaggagtagtggattgtgcgagacgcactgtcactctgtaccgagggccggaacaaccggttgttttctttgcacccccaacctctgtcagtagttcagaacttcatcagataggactgtcagaaatccccatcgtcagagagttcggagacgtgtttccggaagaactacccggtatgccgcccaaacgagagattgagttccggatagatcttgctccaggaaccactcctctgtacaagcgaccctaccgtatggcagcaaatgaactggccgaagtcaagaaacagttggaagagttgaaagaaaaggggtatatacgtccgagtacttccccctggggtgctcctgtgatttttgtggagaagaaagacaagacgaagaggatgtgcgttgactacagagctctcaatgaagtcaccatcaaaaacaagtaccctcttccccggatcgatgatctgttcgatcagcttaaaggtgccactgtattatccaagattgatcttcgttccggatatcaccaattacgtattcgtgaagaagatattccgaagaccgcattcaccacgcgatacggactgtatgaattcacggtgatgtcattcggtttaaccaatgcacctgccttcttcatgaacttaatgaacaaagtgttcatggaatacttggataagtttgttgtggttttcgttgatgacattctgatatactcacaatccgaggaagaccatcagcaccatctccgtctggtgttgggaaagttgcgggaacatcaattgtatgccaaacttagcaagtgtgagttctggttgtccgaagtcaaattcttagggcacgtgatatctgctaaaggagttgctgtggaccccgaaacagtgaccgccgtcactgattggaagcaacccaagacagtcactcaagtccacagtttcttaggtttggcaggatactaccggaggttcatcgagaacttctccaaaatcgctcgacccatgacacagttgttgaagaaagaagagaaatttgtgtggagcccgcaatgcgagaaggcgttcaaaactctcaaagaaaagctggtttcctcgccagtgttaatcttgccggatactcgcaaggatttcatggtgtattgtgatgcttcgcgccaaggattggggtgcgtgctcatgcaggatggtcatgtggtggcctatgcctcacgccagctacggcctcatgaaggcaactaccctacccgtgatttggagttagctgcggtggttcatgctctaaaaatctggctgcactatctcattgggaatcgctgtgaaatatatactgatcataagagtttgaaatacatcttcactcagtccgacctgaatcttcggcaaaggagatggttagaactcatcaaggattatgatgtgggaattcactatcatcctggtaaggccaacgtggtcgccgacgctctaagtcgaaaaagccattgcaacactcttaacgtccgtggcattccactcgaacttagtcaacagatggaagccctgaacctaagcatagttggtcgcggattcttggctgcgttggaagccaagcctaccttgctcgatcaaatccgcgaggctcagaagaacgatccggacatgcatggactcctcaagaatatgaaacagggtaaagccgctggtttcacagaggatgaacacggaaccctatggaacggaaatcgagtatgcgttccagataacagagaacttaaacagctgatactacaggaagctcacgaaagtccttattccatccaccctggcagtacgaagatgtacttagacttgaaggagaaatactggtgggttagtatgaagcgggaaattgcagagttcgtggccctttgtgatgtgtgccagcgtgtcaaggcagagcaccaacgaccggccggacttctacaacctctccaagtacctgaatggaaatgggatgaaattgggatggatttcatcaccggacttccaaagacccaaggtggatatgattctatatgggtagttgtggatcgattaaccaaggtagctcgatttattcctgtgaagaccacctatggagggaacaaactagccgagctctacttcgctaggatcgtgagtctccatggcgttcccaagaaaatcgtatctgataggggaagccaattcacctctcacttttggaagaagcttcaagaagagctgggtacccggttaaacttcagcaccgcataccacccgcagacagatgggcagaccgagcgtctaaatcagatcctagaagatatgcttcgcgcgtgtgtcctggatttcgggaagacctgggataagagtctcccctatgccgagttctcctacaataacagctatcaagccagcatacaaatggcaccttatgaagcgttgtatgggcgcaaatgccggacaccgctcttgtgggatcaagttggggaaagccaagtgttcgggactgatatcctgagagaagctgaagctaaagtcagaaccattcgggataatctaaaggtggcacagtcccggcagaaaagttatgcagataaccgtcgccgtgacctggaattcgcagtggacgattttgtataccttcgggtcacgccattgcggggtgtacacaggtttcggacaaaagggaagctcgcacctcggtatgtgggtcctttccgtatcgttgcccgacgcggagaagtcgcttaccaattggagctgcccgcctccttgggcaacgtgcacgatgtgttccatgtgtcgcaactcaagaaatgccttcgagtgccatccgagcaggccgactcagagcaaattgaagttcgcgaagacttgacctacgtggagaggccagtgaaaatcctggacaccatggagcgcaggaccaggaaccaggtaatccgtttttgcaaggtccagtggagcaaccacgtcgaagaagaagctacctgggagcgtgaagacgagctgaaggcagcccatcccgatctcttcgccagttcttccgaatctcggggtcgagattccgtttaa

SEQ ID NO: 14216 - DNA, 5394 bp, Oryza sativa
  Clone ID: TFbOSC401354j.C1.o21.fg
atggacatctccagggcaaatgaaggctacacgagctgcggcccggtagtcgagatgtcatggcacagggccggtgtcctgctgctaggggctcagtcctgcctgcctatcccggaggttccggccgtaggtgggattgggtcggtactcttgtctatggctaggatgggttggaaactatgtcacgtcttccgtctgtataccgtggtgatggccggcagcgtcacccgtcgtggtttggacatgactggcttcgtcttggagctgcggggcatgtgcgtggtcctggggtatccacatggagtggactaccaggccaggccgcttccggagcaggagggtgacgatgcagagccccacgctggttgggaggtcactgcagtgatcctctctggctctcccgagcggacttcgctggcagtcaccgcgggtggagattccttccccgccgcttgccagagcgccgctctcctcgccatcggcactcttcaccagcgctacccggacgagttgcagcactcgccctaccgctaccaccctcgccgcggaggagcccgcgactacgccaccttccgggatgctagctcagaggatgacgctaccatcgtgcacctggcgcgcatggtggaggcgtacgacgcggctcgtatcgacttccatcagatggtgcgccgtgggatggtcgagaacaacatgaagatcctggagctgcgtcaagagaacctgcagctcaagaaggacctagacgcggtggaggcgcagctgcatcagctcaagatcgcccagggagaggtctgccgccccaagcgccgccgtgtctgccgcagccagaagatcaccgcccgcaagagcacctccaggcccgagcttgttcgtcagtccctggcgtggacttgcttcgtcgagatccctcgtgccgagcccgcgcccgtggttccccaggagggggaagcctccggcgttggtagcacggaggatgcgctgttgctcaccttccgtcctggcccgtcgcagcggagaagtgctaacaccggtgatggcaaccaacctgaaggcagcaaccaccaccaccagggcagcccacctccacctcctcctccgcctccaccaccaccaccagacaccaacgccattctcacccaaatcctcgcccagcaggccaacatgatgactgctttcctccaccacctccaaaatccgccacaacataatgctccaccaccacccccacaacactctaaactcgccgagttcctccgcatccgcccacctaccttctctagctccaacaaccccgtggacgcgttggattggttgcatgccgtggggaaaaagctagacactgtgcagtgcagcgatgaggagaaagtcatcttcgccgcccaccagctgcagggacccgcatctctatggtgggaccatttccaggctacgcagccagaagggcaacctattacttgggcccgtttcaccgccgctttccggagaacccatgtgcccgccggagtcgtggcccttaagaaaagagaattccgagagttgaagcaaggcaaccgctccgtgatggagtatttgcatgagttcaacaacttggcccgttacgccccggaggatgtgcgggaagatgaggagaagcaagagaagttcttggcaggaatggaccctgagctgtccgtccgtctagtctccggggactatccggatttccaacggggatcctcctcgcagcagcaacaacagcagcagcaacctcgctccgcgcctcgacctcaattcgtggtgcgcgtcccacagccgcagcagcagcagaatcaacaagggactcgtgcgccccgtcctcctacgccaactgtgcagcctggtcaaggccgtagggacgctcaaggtccgcagcgtctgtgcttcaactgcttcgagcccgggcactttgcggataaatgcccaaagccgaggcgtcagcaaggccaagcgcctccccgctccaaccacggtgggaaggatgtcattcggggtcgggtgaaccacgtgacggccgaggacgtgctgacaactccagacgtcatcgttggtacgttcctcattcattccatccctgctaccattctgttcgactctggagcatcccactcgtttatatctgtgccattcgtggggagaaatcagttgggggtagaaaggcttaggaaccctctgctcatcaccacccctggaggggttatgacagcaaagtattatagtcctgccgtccctatagaaattcaggggattccttttccctcggatctgattctgctagacaccaagaacttggatgtgatccttgggatgaattggttggctcaattccaaggagtagtggattgtgcgagacgcactgtcactctgtaccgagggccggaacaaccggttgttttctttgcacccccaacctctgtcagtagttcagaacttcatcagataggactgtcagaaatccccatcgtcagagagttcggagacgtgtttccggaagaactacccggtatgccgcccaaacgagagattgagttccggatagatcttgctccaggaaccactcctctgtacaagcgaccctaccgtatggcagcaaatgaactggccgaagtcaagaaacagttggaagagttgaaagaaaaggggtatatacgtccgagtacttccccctggggtgctcctgtgatttttgtggagaagaaagacaagacgaagaggatgtgcgttgactacagagctctcaatgaagtcaccatcaaaaacaagtaccctcttccccggatcgatgatctgttcgatcagcttaaaggtgccactgtattctccatgattgatcttcgttccggatatcaccaattacgtattcgtgaagaagatattccgaagaccgcattcaccacgcgatacggactgtatgaattcacggtgatgtcatttggtttaaccaatgcacctgccttcttcatgaacttaatgaacaaagtgttcatggaatacttggataagtttgttgtggttttcattgatgacattctgatatactcacaatccgaggaagaccatcagcaccatctccgtctggtgttgggaaagttgcgggaacatcaattgtatgccaaacttagcaagtgtgagttctggttgtccgaagtcaaattcttagggcacgtgatatctgctaaaggagttgctgtggaccccgaaacagtgaccgccgtcactgattggaagcaacccaagacagtcactcaagtccgcagtttcttaggtttggcaggatactaccggaggttcatcgagaacttctccaaaatcgctcgacccatgacacagttgttgaagaaagaagagaaatttgtgtggagcccgcaatgcgagaaggcgttcaaaactctcaaagaaaagctggtttcctcgccagtgttaatcttgccggatactcgcaaggatttcatggtgtattgtgatgcttcgcgccaaggattggggtgcgtgctcatgcaggatggtcatgtggtggcctatgcctcacgccagctacggcctcatgaaggcaactaccctacccatgatttggagttagctgcggtggttcatgctctaaaaatctggcggcactatctcattgggaatcgttgtgaaatatatactgatcataagagtttgaaatacatcttcactcagtccgacctgaatcttcggcaaaggagatggttagaactcatcaaggattatgatgtgggaattcactatcatcctggtaaggccaacgtggtcgccgacgctctaagtcgaaaaagccattgcaacactcttaacgtccgtggcattccactcgaacttagtcaacagatggaagccctgaacctaagcatagttggtcgcggattcttggctgcgttggaagccaagcctaccttgctcgatcaaatccgcgaggctcagaagaacgatccggacatgcatggactcctcaagaatatgaaacagggtaaagccgctggtttcacagaggatgaacacggaaccctatggaacggaaatcgagtatgcgttccagataacagagaacttaaacagctgatactacaggaagctcacgaaagtccttattccatccaccctggcagtacgaagatgtacttagacttgaaggagaaatactggtgggttagtatgaagcgggaaattgcagagttcgtggccctttgtgatgtgtgccagcgtgtcaaggcagagcaccaacgaccggccggacttctccaacctctccaagtacctgaatggaaatgggatgaaattgggatggatttcatcaccggacttccaaagacccaaggtggatatgattctatatgggtagttgtggatcgattaaccaaggtagctcgatttattcctgtgaagaccacctatggagggaacaaactagccgagctctacttcgctaggatcgtgagtctccatggcgttcccaagaaaatcgtatctgataggggaagccaattcacctctcacttttggaagaagcttcaagaagagctgggtacccggttaaacttcagcaccgcataccacccgcagacagatgggcagaccgagcgtctaaatcagatcctagaagatatgcttcgcgcgtgtgtcctggatttcgggaagacctgggataagagtctcccctatgccgagttctcctacaataacagctatcaagccagcatacaaatggcaccttatgaagcgttgtatgggcgcaaatgccggacaccgctcttgtgggatcaagttggggaaagccaagtgttcgggactgatatcctgagagaagctgaagctaaagtcagaaccattcgggataatctaaaggtggcacagtcccggcagaaaagttatgcagataaccgtcgccgtgacctggaattcgcagtggacgattttgtataccttcgggtcacgccattgcggggtgtacacaggtttcggacaaaagggaagctcgcacctcggtatgtgggtcctttccgtatcgttgcccgacgcagagaagtcgcttaccaattggagctgcccgcctccttgggcaacgtgcacgatgtgctccatgtgtcgcaactcaagaaatgccttcgagtgccatccgagcaagccgactcagagcaaattgaagttcgcgaagacttgacctacgtggagaggccagtgaaaatcctggacaccatggagcgcaggaccaggaaccgggtaatccatttttgcaaggtccagtggagcaaccacgtcgaagaagaagctacctgggagcgtgaagacgagctgaaggcagcccatcccgatctcttcgccagttcttctgaatctcggggtcgagattccttttaa

SEQ ID NO: 14217 - DNA, 5590 bp, Oryza sativa
  Clone ID: TFbOSC401478j.C1.o79.np
atggacgaagtcgggggtcgatggacatctctaggacaaatgaaggctacacgagctgcggcccggtagtcgagatgtcatggcacagggccggtgtcctgctgctaggggcttagttctgcctacctgtcccgggggttccggccgtaggtggagttgggtcgatgtacacctctgatcagagtataatctattcgaatagccgcgcccccggttatgggcaagccgagcaatgtacccaaatggccagcagcatcaaccgtcgtggtctggacctgactggcttcgttttggagctgcggggcatgtgcgttgtcctggggtatccgcatggagtggactaccaaggcaagcagctcccggagcaggagggtgacgatgcagagccccacgctgcttgggaggttactgcagtgatcctcactggctcacccgagaggacttcgttggcagtcaccgcgggtggagattccttctccgttgcttgccagaacgccgcactcctcgccatcggcactcttcaccagcgctacccggacgagttgcagcactcgccctaccgctaccaccctcgtcgcggaggagcccgtgactacgccaccttccgggatgctagcttggaggatgacgctaccatcgtgcacctggcgcgcatggtggaggcgtacgacgcggcccgtatcgacttccatcagatggtgcgtcgcgggttggtcgagaacaacatgaagatcctggagctgcgtcaggagaatctgcagctaaagatggacctagacacagtggatgcgcagctgcgtcagctcaagatcgcccagggagaggtctgtcgccccaagcgtcgccgcgtctgccgcagcctgaagatcaccgcccgcaagagtacctccaggcccgagcttgttcgtcagtccctggcgtggacctgcttcgtcgagacccctcgtgccgagtccgcccccgtggttcctcaggaggagggagcctccggcgttggcagcacggaggatgcgctgctgctcaccttccgtcctggctcgttgcagctgtagacgagcagttagtaggcttgcgtatggtgacaaccaggagaagtgctgctaccggtgaatgcagtcaccccgaaggcagcaaccacaacaaccatggcagcccacctccacctccttctccgcctccaccaccaccaccagacaccaacgccattctcacccaaatcctcgcctagcaggccaacatgatggctgctttcctccaccacatccaaaatccgccacaacataatgctccaccaccgcccccacaacactctaaactcgccgagttcctccgcatccgtccgcctaccttctctagctccaataaccccgtggatgcgttggattggttgcatgccgtggggaaaaagttagacaccgtgcagtgcagcgacgaggagaaagtcatcttcggcgcccaccaactgcaggggccagcatctctatggtgggaccatttccaggctacgcagccagaggggcagcctattacttgggcccgcttcaccgccgctttccggagaacccatgtgcctgccggagtcatggcccttaagaaaagggaattccgagagttgaagcaaggcaaccgctccgtgatggagtatttgcatgagtttaacaacctggcccggtacgccccggaggatgtacgggaagatgaggagaagcaagagaagttcttggcaggaatggaccctgagctgtccgtgcgtctggtctccggggactatccggatttccagcgtttggttgacaagagcatccgcttggaagccaagcacaaggaactggagtcgcacaagcgtcgcctggcgaatttccgcaatcaacagggggctaaccaaagggtccgctacaccaatccctatccagggtgatcgtcctcgcagcagcaacagcagcagcaacctcgctccgtgccccgacctcaattcgtggtgcgcgtcccacagccgcagcaacagcagagtcagcaagggactcgtgcgccccgtcctcctacgctagccgtgcagcctggtcaagtccgcagggacgttcaaggtcagcagcgtctgtgcttcaactgcttcgagcctgggcactttgcggataaatgcccaaagccgcggcgccagcaaggccaagcgcctccccgctccaacaacggtggtaaggatgtcattcggggtcgggtgaaccacgtgactgccgaggatgtgctgacgactccagacgtcatcgtgggtacgttcctcattcattccatccctgctaccattttgttcgactctggagcttcccactcgtttatatctatgccattcgtggggagaaatcagttgggggtagaaaggcttaggaaccctctgctcatcaccacccctggaggggttatgacagcaaagtaatatagccctgccgttcctatagaaattcagggaattccttttccctcggatctgattcttctagacaccaagaacttggatgtgatccttgggatgaattggttggctcaattccaaggagtagtggattgtgcaagacgcactgtcactctgtaccgagggccggaacaaccggttgttttctttgcacccccaacctctgtcggtagttcagaacttcatcagataggaatgtcagaaatccccatcgtcagagagttcggagacatgtttccggaagaactaccaggtatgccgccgaaacgagagattgagttccggatagatcttgctccaggaaccactccccagtacaagcgaccctaccgtatggcgtcaaatgaactggccgaagtcaagaaacagttgggagagttgaaagaaaaggggtatatacggccgagtacttccccctggggtgctcctgtgatttttgtggagaagaaagacatgacgaagaggatgtgcgttgacaacagagctctcaatgaagttactatcaaaaacaagtacccacttccccggatcgatgatctgttcgatcagcttaaaggtgccactgtattctccaagattgatcttcgttccggatatcaccaattgcgtattcgtgaagaagatatcccgaagaccgcattcaccacgcgatacggactgtatgaattcacggtgatgtcattcggtttaaccaatgctcctgccttcttcatgaacttaatgaacaaagtgttcatggaatacttggataagtttgttgtggttttcattgacgacattctggtgtactcacaatcagaggaagaccatcagcagcatctccgtctggtgttgggaaagttgcgggaacaccaattgtatgccaagctcagcaagtgtgagttctggttgtccgaagtcaagttcttagggcacatgatatctgctaaaggagttgctgtggatcccgaaacggtgaccgccgtcactgattggaagcaacccaagacagtcactcaggttcgcagctttttgggtttggcagaatactaccgaagattcatcaagaacttctccaaaatcgctcgacccatgacacagttgctgaagaaagaagaaaaatttgtgtggagcccgcaatgcgagaaggcattccaaactctcaaggaaaagctggtttcctcgccagtgttaatcttaccggatactcgcaaggacttcctggtgtactgtgacgcttcgcgccaaggattggggtgtgtgctcatgcaggaaggccacatggtagcctatgcctcccagcagcttcggccccatgaaggcaactaccctacccatgatttggagttggccgctgtggttcatgctctaaagatctggcgacactatctcattgggaatcgctgtgaaatatatactgatcataagagtttgaaatacatcttcactcagtcggatctgaatcttcggcagaggagatggttagaactcatcaaggattaggatgtgggaattcactatcatcctggtaagacaaacgtggtcgccgacgctctaagtcgaaaaagccgttgcaacactcttggcgtccgtggcattccaccaaaacttcatcaacagatggaagccctgaacctaagcatagttggtcgtggattcttggctacgctggaagccaagcctaccttgctcgatcaaatccgcgaggctcagaagaatgatccagatatgcatgggatcctcaagaatatgaaacagggtaaagccgctggtttcacagaggatgaacacggaaccctatggaacggaaatcgggtatgcgttccagacgacagggaacttaaacagttgatacttcaggaagctcacgaaagtccctattccatccatcctggcagcacgaagatgtacttggacttgaaagaaaaatattggtgggttagtatgaagcgggaaattgcagagttcgtggccctttatgatgtgtgccagcgtgtcaaggcagagcaccaacgaccggccggacttctccaacctctccaagtactagaatggaaatgggatgaaattgggatggatttcatcaccggacttccaaaaacccagggcggttatgattctatatgggtagtcgtggaccgactaaccaaggtagctcggttcattcccgtgaagaccacctatggagggaacaaactagctgaactttacttcgctaggatcgtgagtctccatggcgttcctaagaaaattgtatctgataggggaagccaattcacctctcacttctggaagaagctccaagaagagttgggtacccgattaaatttcagcaccgcgtatcacccgcagacagatggacagaccgagtgtctaaatcagatcctagaagatatgctccgtgcctgtattctagattttgggaagacctgggataagagtctcccctatgccgagttctcctacaataacagctaccaagccagcatacaaatggcaccctatgaagcgttgtatggccgcaaatgccggacaccgctattgtaggaccaagttggggaaagccaagtgttcgggactgatatcctgagagaagctgaagcgaaggtcagaaccattcgggataatctaaaggtggcacagtcccgacaggagagctatgcagataaccgacgccgtaacctggaatttgcagtggatgactttgtgtaccttagggtcacaccattgcggggtgtacacaggttccagacgaaagggaagctcgcatctcggtttgtgggtcctttccgtatcattgctcgacgcggagaagtcgcttaccagttggagctgcccgcctccttgggcaacgtgcatgatgtgttccatgtgtcgcaactcaagaaatgtcttcgagtgctatccgagcaggccgattcagagcaaattgaagttcgcgaaaacttgacctacatggagaggccagtgaaaatcctggacaccatggagcgcaggaccaggaaccgggtaatccgtttttgcaaggtccaatggagcaaccacgccgaggaagaagctacttgggagcgtgaaaacgagttgaaggcagcccatcccgatctcttcgccagttcttccgaatctcggggtcgagattccgtt

SEQ ID NO: 14218 - DNA, 1969 bp, Oryza sativa
  Clone ID: TFbOSC401486j.C1.o1.fg
atggccggcagcgtcacccgtcgtggtttggacatgactggcttcgtcctggagctgcggggcatgtgcgtggtcttggggtatccacatggagtggattaccaggccaggccgctcccggagcaggagggtgaggatgcagagcctcacgctgggtgggaggtcactgcagtgatcctctctggctctcccgagcggacttcgctggcagtcaccgcgggtggggattcttctcccgccgcttgccagaacgccgctctcctcgccatcggcaccctccaccagcgctacccggacgagttgcagcactcgccctatcgctaccaccctcgtcgcggaggagcccgcgacttcgccaccttccgagatgctagcttggaggatgacgctaccgtcgtgcatctggcacgcatggtggaggcatacgacgcggctcgtatcgacttccatcagatggtgcgtcgcgggatggttgagaacaacctgaagatcctggagctgcgtcaggagaacctgcagctcaagaaggacctcgacgcattggaggcgcagctgcaccagctcaagatcgcccagggagaggacagccgccccaagcgtcgccgcgtctgccgcagccagaagatcaccgcccggaagagcacctccaggcccgagcttgttcgtcagtccctggcgtggacttgcttcgtcgagacccctcgtgccgagcctgcgcccgtggttccccaggagggggaagcctccggcgttggtagcacggaggatgcgctgttgctcaccttccgccctggcccgtcgcagcggagaaatgttagcaccggtgaaggcaaccaacccgaaggcagcaaccccaacccccaaggcaatccacctccaccaccaccaccagacaccaacgccattctcacccaaatcctcgcccagcaagccaacatgatgaccgctttcctccaccacctccaaaatccgccacaacagaatgctccaccaccacctccacaacactctaagctcgccgagttcctccgcatccgcccacccaccttctctagctccaacaatcccgtggatgcgttggattggttgcatgccgtggggaagaagctggacactgtgcagtgcagtgatgaagagaaagtcatcttcgccgcccatcagctgcaggggcccgcatctctatggtgggaccatttccaggctacgcagccagaggggcaaccgattacttgggcccgcttcaccgccgctttccggagaacccatgtgcccgccggagtcgtggctcttaagaagagggagttccgggagttgaagcaaggcaaccgctccgtgatggagtatttgcacgagttcaacagtctggcccggtacgctccggaggatgtgcgggaagatgaggagaagcaagagaagttcttggcgggaatggaccctgagctgtccgttcgcctagtctctggggactatccggacttccaacgtctggtggacaagagcatccgcttggaggccaagcacaaggagctggagacgcacaagcgccgcttggcgaacttccgcaatcagcagggcgctaaccagagggtccgctacaccaatccctatccagggggatcctcctcgcagcagcaacaacagcagcagcaacctcgctccgcgcctcgacctcaattcgtggtgcgcgtcccacagccgcagcagcagcagagtcagcaagggactcgtgtagcccgtcctcctacgccagttgtgcagcccgttcaaggccgcagggacgctcaaggtcagcagcgtttgtgcttcaactgcttcgagcccgggcactttgcggataaatgcccaaagccaaggcgtcagcaaggccaagcgcctccccgctccaacaacggtggcaaggacgtcattcggggtcgtgtgaaccacgtgacggccgaggacgtgctgacaactccagacgtcatcgttg

SEQ ID NO: 14219 - DNA, 5415 bp, Oryza sativa
  Clone ID: TFbOSC401664j.C1.o29.fg
atggatgaagtcgggggtcgatggacattctccagggcaaatgaaggctacacgagctgcggcccgatggccggcagcgttacccgtcgtggtttgcacatgactggcttcgtcttggagctgcgaggcatgtgcgtggtcttggggtatccacatggagtggattaccaggccaggccgctcccggagcaggagggtgaggatgtagagcctcacgctggttgggaggtcactgcagtgatcctctccggctctcccgagcggacttcgctggcagtcaccgcgggtggagattccttccccgccgcttgccagaacgccgctctcctcgccatcggcacccttcaccagcgctacccggacgagttgcagcactcgccctaccgctaccacccccgtcgcggaggagccagcgaccacgccaccttccgagacgccagctcggaggatgacgctaccgtcgtgcatctggcacgcatggtggaggcgtacgacgcggctcgtatcgacttccaccagatggtgcgccgtggcatggtggagaacaacatgaagatcctggagctgcggcaggagaacctgcagctcaagaaggacctcgacgcagtggaggcgcagctgcaccagctcaagatcgcccagggagagatctgccgccccaagcgtcgccgcgtctgccgcagccagaagatcaccgcccgcaagagcacctccaggcccgagcttgttcgtcagtccctggcgtggacttgcttcgtcgagacccctcgtgccgagcctgcgcccgtggttccccaggagggggaggcctccggcgttggtagctcggagggtgcgctgttgctcaccttccgccctggcccgtcgcagcgctctccttctctgtttgctggttctgtgtggggttttcagatggtgacgaccaggagaaatgttaacaccggtgaaggcaaccaacccgaaggcagcaaccccaacccccaaggcaacccacctccaccaccaccaccagacaccaacgccattctcacccaaatcctcgcccagcaagccaacatgatgaatgctttcctccaccacctccaaaacccgccacaacagaatgctccaccaccacctccccaacactccaaactcgccgaattcctccgcatccgtccacccaccttctctagctccaacaaccctgtggatgcgttggattggttgcatgccgtggggaagaagctggacacggtgcagtgcagtggtgaagagaaagtcatcttcgccgcccatcagctgcaggggcccgcatctctctggtgggaccatttccaggctgcgcagcccgaggggcagccgattacttgggctcgcttcaccgccgctttccggagaacccatgtgcccgctggagtcgtggctcttaagaagagggaattccgggagttgaagcaaggcaaccgctccgtgatggagtatttgcatgagttcaacaatctagcccgttacgctccggaggatgtgcgggaagatgaggagaaacaagagaagttcctggcaggaatggaccctgagctgtccgttcgtctagtctctggggactatcctgattttcaacgtttggtggataagagcatccgcttggaagctaagcacaaggagctggagtcgcacaagcgccgcttggcgaacttccgcaatcagcagggtgctaaccagagggtccgctacaccaatccctatccagggggatcctcctcgcagcagcagcagcagcagcagcaacctcgcccagcgccccgacctcaattcgtggtgcgcgtcccacagccgcagcagcagcagaatcaacaagggactcgtgcgccccgtcctcctacgccagctgtgcagcccgttcaaagccgcagggacgcttcaggtccgcagcgtctgtgcttcaactgcttcgagcccgggcactttgcggataaatgcccaaagccaaggcgtcagcaaggccaagcgcctccccgctccaacaacggtggccaggacgtcatccgtggtcgtgtgaatcacgtgacggccgaggacgtgctgacaactcccgacgtcatcgttggtacgttcctcgtccattccatccctgctacaattttgttcgactctggagcttcccactcgtttatatctgtgccattcgtggggaaaaatcagttgggggtagaaaggcttagaaaccctctgctcatcaccacccctggaggggttatgacagcaaagtattatagccctgccgtccctatagaaattcaggggattccttttccctcggatctgattctgctagacaccaagaacttggatgtgattcttgggatgaattggttggcacaattccaaggagtagtggattgcgcgagacgcactgtcactctgtaccgaggaccagaacaaccggttgttttctttgcacctccaacctctgtcagaagttcagaactgcaccagataggtctgtcagaaatccccatagtcagagagttcggagacgtgtttccggaagaactacctggtatgccgcccaagcgagagattgagttccgaatagatcttgctccaggaaccactcctctgtacaagcgaccctaccgtatggcagcaaatgaactggccgaagtaaagaaacagttggaagagttgaaagaaaaggggtacatacgtccgagtacttccccatggggtgctcctgtgatttttgtagaaaagaaagacaagacgaaaaggatgtgtgtcgactacagagctctcaatgaagtcaccatcaaaaacaagtaccctcttccccggatcgatgatctgttcgaccagcttaaaggtgccactgtattctccaagattgatcttcgttccggatatcaccaattacgtattcgtgaagaagatattccgaagaccgccttcactacgcgatatggactgtatgaattcacggtgatgtcgttcggtttgaccaatgcacctgccttcttcatgaacttgatgaataaagtgttcatggaatacttggataagtttgttgtggttttcattgatgacattctgatatactcacaatcagaggaagaccatcagcaccatctccgtctggtgttgggaaagttgcgggaacatcaattgtatgccaagcttagcaagtgtgagttctggttgtccgaagtcaaattcttagggcacgtgatatctgctaaaggagttgttgtggatcccgaaacagtgaccgccgtcaccgattggaagcaacccaagacagtcactcagattcgcagtttcttaggtttggcaggatactaccggagattcatcgagaacttctccaaaattgctcgacccatgacacagttgttgaagaaagaagagaagtttgtgtggagcccgcaatgcgaaaaggcgttccaaactctcaaagaaaagctggtttcctcgccagtgttaatcttgccggatactcgcaaggatttcatggtgtattgtgatgcttcgcgccaaggattggggtgcgtgctcatgcaggacggtcatgtggtagcctatgcctcacgccaactacgacctcatgaaggcaactaccctacacatgacttggagttagcagcggtggttcatgctctaaaaatctggcggcactatctcattgggaaccgctgtgaaatatatactgatcataagagtttgaaatacatcttcactcagtcagatctgaaccttcggcaaaggagatggttagaactcatcaaagattatgatgtgggaatacactatcatcctggtaaggccaacgtggttgccgacgctctaagtcgaaagagccattgcaacaatcttaacgcccgtagcattccgcccgagcttagtcaacagatggaagccctgaacctaaacatagttggtcgtggatttttggccgcgttggaagccaagcccaccttgctcgatcaaatccgcgaggctcagaagaatgatccggacatgcatggactcctcaagaatatgaaacagggtaaagccgctggtttcacagaggatgaacacggaaccttatggaacggaaagcgggtatgcgttccagatagcagagaacttaaacagctgatacttcaggaagctcacgaaagtccttattccattcacccgggcagtaccaagatgtacttagacttgaaggagaaatactggtgggtcagcatgaagcgggaaattgcagagtttgtggctctatgtgatgtgtgccagcgtgtcaaggcagaacaccaacgaccggccggacttctccaacctctccaagtgccggaatggaaatgggatgaaattgggatggatttcatcaccggacttccaaaaacccaaggcggatatgattctatatgggtagttgtggatcgattaacaaaggtagctcgatttattcctgtgaagaccacttatggagggaacaaactagcggagctctacttcgctaggatcgtgagtctccatggcgttcccaagaaaatcgtatctgataggggaagccaattcacctctcacttttggaagaagctccaagaagagctgggtactcgattgaatttcagcaccgcctatcacccgcagacagatggacagaccgagcgtctgaatcagattctagaagatatgctccgcgcatgtgtcctagatttcgggaagacttgggataagagtctcccctatgccgagttctcctacaataacagctaccaagccaacatacaaatggcaccctatgaagcgttgtacgggcgcaaatgccggacaccgctattgtgggaccaagttggagaaagccaagtgttcgggactgatatcctgagagaagctgaagctaaagtcagaatcattcgggataatctaaaggtggcacagtcccggcagaaaagttatgcagataaccgtcgccgtgatctggaattcgcagtggatgactttgtgtatcttcgggtcacgccattgcgaggggtgcacaggtttcagacaaaagggaagctcgcacctcggtatgtgggtcccttccgtatcatcgctcgacgcggagaagttgcttaccagctggagttgcccgcctccttgggcaacgtgcatgatgtgttccatgtgtcgcaactcaagaaatgtcttcgagtgccatccgagcaggccgactcagagcaaattgaagttcgcgaagatttgacctatgtggagaagccagtgaaaatcctggacaccatggagcgcaggaccaggaaccgagtaatccgtttttgcaaggtccagtggagcaaccacgccgaagaagaagctacttgggagcgcgaagacgagctgaaggcagcccatcccgatctcttcgccagttcttccgaatctcggggtcgagattccgtttaa

SEQ ID NO: 14220 - DNA, 5415 bp, Oryza sativa
  Clone ID: TFbOSC401716j.C1.o49.fg
atggatgaagtcgggggtcgatggacattctccagggcaaatgaaggctacacgagctgcggcccgatggccggcagcgttacccgtcgtggtttggacatgactggcttcgtcttggagctgcggggcatgtgcgtggtcttggggtatccacatggagtggattaccaggccaggccgctcccggagcaggagggtgaggatgcagagcctcacgctggttgggaggtcactgcagtgatcctctccggctctcctgagtggacttcgctggcagtcactgcgggtggagattccttccccgccgcttgccagaacgccgctctcctcgccatcggcactcttcaccagcgctacccggacgagttgcagcactcgccctaccgctaccacccccgtcgcggaggagccagcgaccacgccaccttccgagacgccagctcggaggatgacgctaccgtcgtgcatctggcacgcatggtggaggcgtacgacgcggctcgtatcgacttccatcagatggtgcgtcgtggcatggtggagaacaacctgaagatcctggagctgcgccaagagaatctgcagctcaagaaggacctcgacgcgttggaggcgcagctgcatcagctcaaggtcgcccagggagagatctgccgccccaagcgtcgccgcgtctgccgcagccagaagatcaccgcccgcaagagcacctccaggcccgagcttgttcgtcagtccctggcgtggacttgcttcgtcgagacccctcgtgccgagcctgcgcccgtggttccccaggagggggaagcctccggcgttggtagctcggagggtgcgctgttgctcaccttccgccctggcccgtcgcagcgctctccttctctgtttgctggttctgtgtggggttttcagatggtgtcgaccaggagaaatgttaacaccggagaaggcaaccaacccgaaggcagcaaccccaacccccaaggcaacccacctccaccaccaccaccaccagacaccaacgccattctcacccaaatcctcgcccagcaagccaacatgatgaatgctttcctccaccacctccaaaatctgccacagcagaatgctcccccaccacctccccaacactccaaactcgccgaattcctccgcatccgtccacccaccttctctagctccaacaaccctgtggatgcgttggattggttgcatgccgtggggaagaagctagacacggtgcagtgcagcgacgaagagaaagtcatcttcgccgcccaccagctgcaggggcccgcatctctatggtgggaccacttccaggctacgcagccagaggggcaaccgattacttgggctcgcttcaccgccgctttccgaagaacccatgtgcccgctggagtcgtggctcttaagaaaagggaattccgggagttgaagcaaggcaaccgctccgtgatggagtatttgcatgagttcaacaatctagcccgttatgccccggaggatgtgcgggaagatgaggagaagcaagagaagttcttggcaggaatggaccctgagctgtctgttcgtctagtctctggggactacccggattttcaacggctggtggacaagagcatccgcttggaagccaagcacaaggaactggagtcgcacaagcgccgcttggcgaatttccgcaatcagcagggtgctaaccagagggtccgctacaccaatccctacccagggggatcctcctcgcaacagcagcagcagcagcaacctcgctccgcgccccgacctcaattcgtggtgcgcgtcccacagcagcaacagcagcagaatcagcaagggactcgtgcgccacgtcctcctacgccaactgtgcagcctgttcaaggtcgcagggacgctcaaggtcagcagcgtctgtgcttcaactgtttcgagcctgggcactttgcggataaatgcccaaagccaaggcgtcagcaaggccaagcgcctccccgctccaacaacggtggcaaggacgtcatccgtggtcgcgtgaatcacgtgacggccgaggacgtgctgacaactccagacgtcatcgttggtacgttcctcgttcattccatccctgctacaattttgttcgactctggagcctcccactcgtttatatctgtgccattcgtggggaaaaatcagttgggggtagaaaggcttagaaaccctctgctcatcaccacccctggaggggttatgacagcaaagtattatagccctgccgttcctatagaaattcagggaattccttttccctcggatctgattctgttagacacaaagaacttggatgtgattcttgggatgaattggttggcacaattccaaggagtagtggattgcgcgaggcgcactgtcactctgtaccgaggaccggaacagccggttgttttctttgcacctccaacctctgtcagaagttcagaactgcatcaggtaggtctgtcagaaatccccatagtcagagagttcggagacgtgtttccggaagaactacctggtatgccgcccaagcgagagattgagttccggatagatcttgctccaggaaccactcctctgtacaagcgaccctaccgtatggcagcaaatgagctagccgaagttaagaaacagttggaagaattgaaagaaaaggggtatatacgtccgagtacttccccatggggtgctcctgtgatttttgtagagaagaaagacaaaacgaaaaggatgtgcgttgactacagagctctcaatgaagtcaccatcaaaaacaagtaccctcttccccggatcgatgatctgttcgatcagcttaaaggtgccaccgtattctccaagattgatcttcgttccggatatcaccaactacgtattcgtgaagaagatattccgaagaccgcattcactacgcgatatggactgtatgaattcacggtgatgtcgttcggtttgaccaatgctcctgccttcttcatgaacttaatgaataaagtgttcatggaatacttggacaagtttgttgtggtttttatcgatgacattctgatatactcacaatcagaagaagaccatcagcaccatctccgtctggtgttgggaaagttgcgggaacatcaattgtatgccaagcttagcaagtgtgagttctggttgtccgaagtcaaattcttggggcacgtgatatctgctaaaggagttgctgtggatcccgaaacagtgaccgccgtcaccgattggaagcaacccaagacagtcactcagattcgcagtttcttgggtttggcaggatactatcggagattcatcgagaacttctccaaaatcgctcgacccatgacacagttgttgaagaaagaagagaagttcgtgtggagcccgcaatgcgagaaggcgttccaaactctcaaagaaaagctggtttcctcgccagtgttaatcttgccggatactcgcaaggatttcatggtgtactgtgatgcttcgcgccaaggattggggtgcgtgctcatgcaggacggtcatgtggtagcctatgcttcacgccagctacgacctcatgaaggcaactaccctacacatgacttggagttagcagcggtggttcatgctctaaaaatctggcggcactatctcattgggaaccgctgtgaaatatatactgatcacaagagcttgaaatacatcttcactcagtcagatctgaaccttcggcaaaggagatggttagaactcatcaaggattatgatgtgggaatacactatcatcctggtaaggccaacgtggttgccgacgctctaagtcgaaagagccattgcaacactctcaacgtccgaggcattccgcccgagcttaatcaacagatggaagccctgaacctaagcatagttggtcgcggattcttggccgcgttagaagcaaagcccaccttgctcgatcaaatccgcgaggctcagaagaatgatccggacatgcatggactcctcaagaatatgaaacaaggtaaagccgctggtttcacagaggatgaacacggaactctatggaacggaaagcgggtatgcgttccagatagcagagaacttaaacagctgatacttcgggaagctcacgaaagtccttattccattcacccgggcagtaccaagatgtacttagacttgaaggagaaatactggtgggtcagcatgaagcgggaaatcgcagagtttgtggctctatgtgatgtgtgccagcgtgtcaaggcagaacaccagcgaccggccggactcctccaacctctccaagtgccagaatggaaatgggatgaaattgggatggatttcatcaccggacttccaaaaacccaaggtggatatgattctatatgggtaatagtggatcgattaaccaaggtggctcgattcattcctgtgaagaccacctatggagggaataaactagcggagctctacttcgctaggatcgtgagtctccacggtgttcccaagaaaatcgtgtctgataggggaagccaattcacctctcacttttggaagaagctccaagaagagctgggtactcgattgaatttcagcaccgcatatcacccgcagacagatggacagaccgagcgtctgaatcagattctagaagatatgctccgcgcatgtgtcctagatttcgggaagacttgggataagagtctcccctatgccgagttctcctacaataacagctatcaagccagcatacaaatggcaccttatgaagcgttgtacgggcgcaaatgccggacaccgctattgtgggaccaagttggagaaagccaagtgttcgggactgacatcctaagagaagccgaagctaaagtcagaatcattcgggaaaatctaaaggtggcacagtcccggcagaaaagttatgcagataaccgtcgccgtgatctggaattcgcagtggatgattttgtgtatcttcgggtcacgccattgcgaggtgtgcacaggtttcagacaaaagggaagctcgcacctcggtatgtgggtcccttccgtatcactgctcgacgcggagaagttgcttaccagctggagttgcccgcctccttgggcaacgtgcatgatgtgttccatgtgtcgcaactcaagaaatgtcttcgagtgccatccgagcaggccgactcagagcaaattgaagttcgcgaagacttgacctatgtggagaggccagtgaaaatcctggacaccatggagcgcaggaccaggaaccgggtaatccgtttttgcaaggttcagtggagcaaccacgccgaagaagaagctacttgggagcgcgaagacgagctgaaggcagcccatcccggtctcttcgccagttcttccgaatctcggggtcgagattccgtttaa

SEQ ID NO: 14221 - DNA, 4779 bp, Oryza sativa
  Clone ID: TFbOSC401831j.C1.o2.fg
atgtcatggcacagggccggtgtcctgctgctaggggctcagtcctgcctgcctgtcccgggggttccggccgtaggtgggattgggtcggtactcttgtctatggctaggatgggttggaaactatgtcacgtcttccgtctgtataccgtggtgatggccggcagcgtcacccgtcgtggtttggacatgactggcttcgtcttggagctgcggggtatgtgcgtggtcttggggtatccacatggagtggactaccaggccaggccgcttccagagcaggagggtgaggatgcagagccccacgctggttgggaggttactgcagtgatcctctctggctctcccgagcggacttcgctggcagtcaccgcgggcggagattccttccccgccgcttgccaaaacgccgctctcctcgccatcggcactcttcaccagcgctacccggacgagttgcagcactcgccctaccgctaccaccctcgtcgcggaggagcccgcgactacgccaccttccgagatgctggctcggaggatgacgctcccatcgtgcacctggcgcgcatggtggaggcgtacgacgcggctcgtatcgatttccatcagatggtgcgccgtgggatggtcgagaacaacatgaagatcctggagctgcgtcaggagaacctgcagctcaagaaggacctagacgcagtggaggcgcagctgcatcagctcaagatcgcccagggagaggactgccgtcccaagcgccgccgtgtctgccgcagccagaagatcaccgcccgcaagagcacctccaggcccgagcttgttcgtcagtccctggcgtggacctgcttcgtcgagacccctcgtgccgagcccgcgcccgtggttccccaggagggggaagcctccggcgttggtagcacggaggatgcgttgttgctcaccttccgtcctgggccgtcgcagcgcgatgaggagaaagtcatcttcgccgcccaccagctgcaagggcccgcatctctatggtgggaccacttccaagctacgcagccagaggggcaacctatcacttgggctcgcttcaccgccgctttccggaggacccatgtgcccgctggagtcgtggctcttaagaagagggagttccgagagttgaagcaaggcaaccgctccgtgatggagtatttgcatgagttcaacaatctggcccgttatgccccagaggatgtgcgggaagatgaggagaagcaagagaagttcttggcaggaatggaccctgagctgtccgtccgtctagtctccggggactatccggatttccaacgtctggtggacaagagcatccgcttggaagccaagcacaaggaactggagtcgcacaagcgccgcttggcgaacttccgcaatcaacagggtgctaaccaaagggtccgctacaccaatccctacccagggggatcctcctcgcagccgcagcaacagcatcaacaacctcgctccgcgcctcgacctcaattcgtgcctggacaaggccgcagggacgcttcaggtccgcagcgtctgtgcttcaactgcttcgagcccgggcactttgcggataaatgcccaaagccgaggcgtcagcaaggccaagcgcctccccgctccaacaatggtgggaaggatgtcattcggggtcgtgtgaaccacgtgacggccgaggacgtgctgacaactccagacgtcatcgttgacaccaagaacttggatgtgatccttgggatgaattggttggctcaattccaaggagtagtggattgcgcgagacgcactgtcactctgtaccgagggccggaacaaccggttgtcttctttgcacccccaacctctgtcaaaagttcagaacttcatgagataggactgtcagaaatccccatagtcagagagttcggagacgtgtttccggaagaactacctggtatgccgcccaagcgagagattgagttccggatagatcttgctccaggaaccactcctctgtacaagcgaccctaccgtatggcagcaaatgaactggccgaagttaagaaacagttggaagagttgaaagaaaaggggtatatacgtccgagtacttctccctggggtgctcctgtgatttttgtagagaagaaagacaagacgaagaggatgtgcgttgactacagagctctcaatgaagtcaccatcaagaacaagtatcctcttccccggatcgatgatctattcgatcaactcaaaggtgccactgtattctccaagatcgatcttcgttctggatatcaccaattacgtattcgtgaagaagatattccgaagaccgcattcaccacgcgatacggactgtatgaattcacggtgatgtcgttcggtttaaccaatgcacctgccttcttcatcaacttaatgaacaaagtgttcatggaatacttggataagtttgttgtggttttcattgatgacattctgatatactcacaatcagaggaagaccatcagcaccatctccgcctggtgttgggaaagttgcgggaacatcaattgtatgccaagcttagcaagtgtgagttctggttgaccgaagtcaaattcttagggcatgtgatatctgctaaaggagttgctgtggaccccgaagcagtgaccgccgtcaccgattggaagcaacccaagacagtcacccaaattcgcagtttcttaggtttggcaggatactaccagaggttcatcgagaacttctccaaaatcgctcgacccatgacacaattgttgaagaaagaagagaaatttgtgtggagcccgcaatgcgagaaggcattccaaactctcaaggaaaagctggtttcctcgccggtgttaatcttgccggatacccgcaaggatttcatggtgtactgtgatgcttcgcgccaaggattggggtgcgtgctcatgcaggatggtcatgtagtggcctatgcctcccgccagctacgggctcatgagggcaactaccctacccatgatttggagttagcagcggtggttcatgctctaaaaatctggcggcactatctcattgggaatcgctgtgaaatatatactgatcataagagtttgaaatacatcttcacccagtcagatctgaatcttcggcaaaggagatggttagaactcatcaaggattatgatgtgggaattcactatcatcctggtaaggccaacgtggttgccgacgctctaagtcgaaaaagccattgccacgctcttaacgtccgtggcattccacccgaacttaatcaacagatggaagccctgaacctaagcatagttagtcgcggatttttggctgcgttggaagccaagcccaccttgctcgatcaaatccgcgaggctcagaagaatgatccggacatgcatggactcctcaagaatatgaaacagggtaaagccgctggtttcacagaggatgaacacggaaccttatggaacggaaatcgggaagctcacgaaagtccctattccattcacccgggcagtacgaagatgtacttagacttgaaggagaaatactggtgggttagcatgaagcgggaaattgcagagttcgtggccctatgtgatgtgtgccagcgtgtcaaggcagagcaccaacgaccggccggacttctccaacctctccaagtaccagaatggaaatgggatgaaattgggatggatttcatcaccggacttccaaaaacccaaggtggatatgattctatatgggtagttgtggatcgattaaccaaggtagctcgatttattcctgtgaagaccacctatggagggaacaaactagccgagctctacttcgctaggatcgtgagtctccatggcgttcccaagaaaatcgtatctgataggggaagccaattcacctctcacttttggaagaagctccaagaagagctgggtacccgattaaatttcagcaccgcgtatcacccgcagacagatggacagaccgagcgtctaaatcagatcctagaagatatgcttcgcgcatgtgttctagatttcgggaagacctgggataagagtctcccctatgccgagttctcctacaacaacagctaccaagccagcatacaaatggcaccttatgaagcgttgtatgggcgcaagtgccggacaccactattgtgggaccaagttggagaaagccaagtgttcgggactgatatcctgagagaagctgaagctaaagtcagaatcattcgggataatctaaaggtggcacagtcccggcagaaaagttatgcagataaccgtcgctgtgacctggaattcgcagtgggtgactttgtgtatcttcgagtcacgccattgcgaggtgtacacaggtttcagacaaagggaaagctcgcacctcggtatgtgggtcctttccgtatcattgcccggcgcggagaagtcgcttaccagctggagctgcccgcctccttgggcaacgtgcacgatgtgtttcatgcgtcgcaactcaagaaatgtctccgagtgccatccgagcaggccgactcagagcaaattgaagttcgcgaagacttgacctacgtggagaggccagtgaaaatcctggacaccatggagcgcaggaccaggaaccgggtaatccgtttttgcaaggtccagtggagcaaccacgccgaagaagaagctacctgggagcgtgaagatgagctgaaggcagcccatcccgatctcttcgccagtccctccgaatctcggggtcgagattccgtttaa

SEQ ID NO: 14222 - DNA, 3288 bp, Oryza sativa
  Clone ID: TFbOSC401832j.C1.o10.fg
atggtgatggccggcagcgtcacccgtcgtggtttggacatgactggcttcgtcttggagctgcggggcatgtgcgtggtcctggggtatccacatggagtggactaccaggccaggccgcttccggatcaggagggtgacgacgcggagccccacgctggttgggaggtcaccgcagtgatcctctctggctctcccgagcggacttcgctggcagtcaccgcgggtggagactccttccccgccgcttgccagaacgccgctctcctcgccatcggcacccttcaccagcgctacccggacgagttgcagcactcgccctaccgctaccaccctcgtcgcggaggagcctgcgactacgccaccttccgggatgctagctcggaggatgacgctaccatcgtgcacctggcgcgcatggtggaggcgtacgacgcggctcgtatcgacttccatcagatggtgcgtcgcgggatggtcaagagcaatctgatgatcctggagctgcgtcaggagaacctgcagctcaagaagaacctcgacgcagtggaggcgcagctgcatcagctcaagatcacccagggagagatctgccgccccaagcgtcgccgtgtctgccgcagccagaagatcaccgcccgcaagagcacctccaggcccgagcttgttcgtcagtccctggcgtggacttgcttcgtcgagacccctcgtgccgagcctgcgcccgtggttccccaggagggggaagccttcggcgttggtagcacggaggctccttctctgtttgctggttctgtgtggggttttcagatggtgacgaccaggagaaacgctgctaccggtgatggcaatcaacctgaaggcagcaaccacaaccaccaaggcaacccacctccacctcctcctcctccgccaccaccaccaccagacaccaacgccattctcacccaaatcctcgcccagcaagccaacatgatgaatgctttcctccaccacctccaaaatccgccacaacagaatgctccaccaccacctccccaacactctaaactcgccgagttcctccgcatccgcccacctaccttctctagctccaacaaccccgtggatgcgttggattggttgcatgccgtggggaagaagttagacacggtgcagtgcagcgatgaggagaaagtcgtcttcgccgcccaccagctgcagggacccgcatctctatggtgggaccatttccaggctacgcagccagaggggcaacctattacttgggctcgcttcaccgccgctttccgaaggacccatgtgcccgctggagtcgtggcacttaagaaaagagaattccgagagttgaagcaaggcaaccgctccgtgatggagtatttgcacgagttcaacaacttggcccgttacgccccagaggatgtgcgggaagatgaggagaagcaagagaagttcttggcaggaatggaccctgagctgtccgtccgtctagtctctggggattatccggattttcaacgactggtggacaagagcatccgcttggaagccaagcacaaggaactggagtcgcacaagcgccgcttggcaaatttccgcaatcagcagggtgctaaccagagggtccgctacaccaatccctatccagggggatcctcctcgcagcagcaacaacagcagcagcaacctcgctccgcgcctcgacctcaattcgtgtctggtcaaggccgcagggacgcttcaggtccgcagcgtctgtgcttcaactgcttcgagcccgggcactttgcggataaatgcccaaagccaaggcgtcagcaaggccaagcgcctccccgctccaacaacggcgggaaggatgtcattcggggtcgtgtgaatcacgtgacggccgaggacgtgctgacaactccggacgtcatcgttggtacgttcctcgtgcattccatccctgctaccattttgttcgactctggagcttcccactcgtttatatctgtgccgttcgtggggagaaatcagttgggggtagaaaggcttagaaaccctctgctcatcaccacccctggaggggttatgacagcaaagtattatagccctgccgtccctatagaaattcaggggattccttttccctcggatctgattctgctagacaccaagaatttggatgtgattcttgggatgaattggttggctcaattccaaggagtagtggattgcgcgagacgcactgttactctgtaccgagggccggaacaaccagttgttttctttgcacccccaaccaaggtagctcgatttattcctgtgaagaccacctatggagggaacaaactagcggagctctacttcgctaggatcgtgagtctccatggcgttcccaagaaaatcgtatctgataggggaagccaattcacctctcacttttggaagaagctccaagaagagctgggtactcgattaaatttcagcaccgcctatcacccgcagacagatgggcagaccgagcgtctaaatcagatcctagaagacatgcttcgtgcatgtgtactagatttcgggaagacctgggataagagtctcccctatgccgagttctcctacaataacagctatcaagccagcatacaaatggcaccttatgaagcgttgtacgggcgcaaatggcggacaccgctattgtgggaccaagttggagaaagccaagtgttcgggactgatatcctgagagaagctgaagctaaagtcagaatcattcgggataatctaaaggtggcacagtcccggcagaaaagttatgcagataaccgtcgccgtgacttggaattcgcagtggatgactttgtgtaccttcgggtcacgccattgcgaggtgtacacaggtttcagacgaaagggaagctcgcacctcggtatgtgggtcctttccgtatcgttgctcgacgcggagaagtcgcttaccagttggagctgcccgcctccttgggcaacgtgcatgatgtgttccatgtgtcgcaactcaagaaatgccttcgagtgccatccgagcaggccgactcagagcaaattgaagttcgtgaagatttgacctacgtggagaggccagtgaaaatcctggacaccatggagcgcaggaccaggaaccgggtaatccgtttttgcaaggtccagtggagcaatcacgccgaagaagaagctacttgggagcgtgaagacgagctgaaggcagcccatcccggtctcttcgccagttcttccgaatctcggggtcgagattccgtttaa

SEQ ID NO: 14223 - DNA, 2427 bp, Oryza sativa
  Clone ID: TFbOSC401838j.C1.o1.fg
atggtgacgaccaggagaaatgcggttaccggtgatggcaaccaacccgaaggcagcaaccacaaccaccaaggcaacccacctccacctcctcctcctcctccaccaccaccaccagacaccaacgccattctcacccaaatcctcgcccagcaggccaacatgatgactgctttcctccaccacctccaaaatccgccacaacagaatgccccaccaccacctccccaacactctaaactcgccgagttcctccgcatccgcccacctaccttctctagctccaacaaccccgtggatgcgttggattggttgcatgccgtggggaaaaagctagacactgtgcagtgcagcgatgaggagaaagtcatcttcgccgcccatcagctgcagggacccgcatctctatggtgggaccatttccaggctacgcagccagagggacagcctattacttgggctcgcttcaccgccgcttttcggaggacccatgtgcccgctggagtcgtggcccttaagaaaagggaattccgagagttgaagcaaggcaaccgctccgtgatggagtatttgcatgagttcaacaacctggcccgttacgctccggaggatgtgcgggaagatgaggagaagcaagagaagttcctggcaggaatggaccccgagctgtccgtccgtctagtctctggggattatccggatttccaacgtctggtggacaagagcatccgcttggaagccaagcacaaggaactggagtcgcacaagcgccgcttggcgaatttccgcaaccaacagggtgctaaccaaagggtccgctacaccaatccctatccagggggatcctcctcgcagcagcaacagcagcagcagcaacctcgctccgcgcctcgacctcaattcgtggtgcgcgtcccacagccgcagcaacagcagaatcaacaagggactcgtgcgccccgtcctcctacgcaaactgtgcagcctggtcaaggccgcagggacgctcaaggtcagcagcgtctgtgcttcaactgcttcgagcccgggcactttgcggataaatgcccgaagccaaggcgtcagcaaggccaagcgcctccccgccccaacaacggtgggaaggatgtcattcggggtcgtgtgaaccacgtgatggccgaggacgtgctgacaactccagacgtcatcgttgtgaccgccgtcaccgattggaagcaacccaagacagttactcaagtccgcagtttcttaggtttggcaggatactaccggagcgtgtcaaggcagagcaccaacgaccggccggacttctccaacctctccaagtaccagaatggaaatgggatgaaattgggatggatttcatcaccggacttccaaaaacccaaggtagctcgatttattcctgtgaagaccacctatggagggaacaagctagccgagctctacttcgctaggatcgcgggcccgcccgccaccctcgctgacaggtggggtccacctgtcatcccctacctcgcgccgctcccgccgcccgcccgtgccctagcgccgccgccgccgccgaatccgccgcatcccgccgtccccgcgcgccataaagagggggaaatcactccccgcgattccctctccctttccccccgtttttccctctctctctccctcggattcgctcggatttactcccgcaatcctcgccggcgcaatcaatggcggccgagatttccgcggccgattccttcctctccggccgccctctctccctcccgacgctatataatcgttcctcgtgcttcgctcctccgtttccgccactcgccgctcactctccccgtcggattcgtgcccgcgccgtcttcctctctctccgccgtcgccgccgagctccggttcgccgtcgtcgtcgctccggacctcctcccgactcggcgtcacctccttcggcttcgccgcgtcctcgtcgacctcgtccgctcctccgtttcggtcgccgactgtcggagcgccgccgtcctcgtcgatccgaaccgcgccgccgccttcctccgctccgggttgtcgtttccgccgtcatcgtcgacccggggtgagccgaggaccgttgtttcacttcccccttccctcccctctctcggccgccgctccgtcgcgccggaggtcgccgccggcgaccatcggggcgcgggcgcgccgcctcccgtcggccgtgccggcgaggccgccttcgggcgcgccccgcggctgccaggtgggcccggccgtcagccgcccgcgcccgcgggtgcggctgacgcgtgggacccacggcgccggtcggcggcagccgcgtgcacccggtccaccgtggaccgagaggctggcgcgtgggccccactcccgtggacccggtccgcgcgccctctctcccggctgacgcaataa

SEQ ID NO: 14224 - DNA, 3735 bp, Oryza sativa
  Clone ID: TFbOSC401845j.C1.o3.gm
atggttatgccgatggtgacgaccaggagaagtgctgccaccggtgatggcaaccaacccgaaggcagcaaccaccaccaccagggcagcccacctccacctccaccaccaccaccagacaccaacgccattctcacccaaatcctcgcccagcaggccaacatgatgactgctttcctccaccacctccaaaatccgccacaacataatgctccaccaccacctccccaacactctaaactcgccgagttcctccgcatccgcccacctaccttctctagctccaacaaccccgtggatgcgttggattggttgcatgtcgtggggaaaaagctagacactgtgcagtgcagcgatgaggagaaagtcatcttcgccgcccaccagctgcaggggcccgcatctttatggtgggaccatttccaggctacgcagccagaggggcaacctattacttgggctcgcttcaccgccgctttccggagaacccatgtgcccgccggagtcatggcccttaagaaaagggaattccgagagttgaagcaaggcaaccgctccgtgatggagtatttgcatgagttcaacaacctggcccgttacgccccggaggatgtgcgggaagatgaggagaagcaagagaagttcttggcaggaatggaccctgagctgtccgtccgtctagtctccggggactatccggatttccaacgtctggtggacaagagcatccgcttggaagccaagcacaaggaactggagtcgcacaagcgccgcttggcaaatttccgcaatcaacagggtgctaaccaaagggtccgctacaccaatccctatccagggggatcctcctcgcagcagcaacaacagcagcagcaacctcgctccgcgcctcgacctcaattcgtggtgcgcgtcccacagccgcagcagcagcagaatcaacaagggactcgtgcgccccgtcctcctacgccaactgtgcagcctggtcaaggccgcagggacgctcaaggtccgcagcgtctgtgcttcaactgcttcgagcccgggcactttgcggataaatgcccaaagccgaggcgtcagcaaggccaagcgcctccccgctccaacaacggtgggaaggatgtcattcggggtcgggtgaaccacgtgacggccgaggacgtgctgacaactccagacgtcatcgttggtacgttcctcattcattccatccctgctaccattctgttcgactctggagcttcccactcgtttatatctgtgccattcgtggggagaaatcagttgggggtagaaaggcttaggaaccctctgctcatcaccacccctggaggggttatgacagcaaagtattatagccctgccgtccccatagaaattcaggggattccttttccctcggatctgattctgctagacaccaagaacttggatataggactgttagaaatccccatcgtcagagagttcggagacgtgtttccggaagaactacccgaggaagaccatcagcaccatctccgtctggtattgggaaagttgcgggaacatcaattgtatgccaaacttagcaagtgtgagttctggttgtccgaagtcaaattcttagggcacgtgatatctgctaaaggagttgctgtggaccccgaaacagtgaccgccgtcactgattggaagcaacccaagacagtcactcaagtccgcagtttcttaggtttggcaggatactaccggaggttcatcgagaacttctccaaaatcgctcgacccatgacacagttgttgaagaaagaagagaaatttgtgtggaggccgcaatgcgagaaggcgttcaaaactctcaaagaaaggctggatggtcatgtggtggcctatgcctcacgccagctacggcctcatgaaggcaactaccctacccatgatttggagttagctgcggtggttcatgctctaaaaatctggcggcactatctcattgggaatcgctgtgaaatatatactgatcataagagtttgaaatacatcttcactcagtcggacctgaatcttcggcaaaggagatggttagaactcatcaaggattacgatgtgggaattcactatcatcctggtaaggccaacgtggtcgctgacgccctaagtcgaaagagccattgcaacactcttaacgtccgcggcattccacccgaacttaatcaacagatggaagccctgaacctaagcatagttggtcgcggattcttggctgcgttggaagccaagcctaccttgctcgatcgaatccgcgaggctcagaagaacgatccggacatgcatggactcctcaagaatatgaaacagggtaaagccgctggtttcacagaggatgaacacggaaccctatggaacggaaatcgagtatgcgttccagataacagagaacttaaacagctgatacttcaggaagcccacgaaagtccttattccatccaccctggcagtacgaagatgtacttagacttgaaggagaaatactggtgggttagtatgaagcgggaaattgcagagttcgtggccctttgtgatgtgtgccagcgtgtcaaggcagagcaccaacgaccggccggacttctccaacctctccaagtacctgaatggaaatgggatgaaattgggatggattttatcaccggacttccaaagacccaaggtggatatgattctatatgggtagtggtggatcgattaaccaaggtagctcgattcattcctgtgaagaccacctatggagggaacaaactagccgagctctacttcgctaggatcgtgagtctccatggcgttcccaagaaaatcgtatctgataggggaagccaattcacctctcacttttggaagaagctccaagaagagctgggtacccgattaaacttcagcaccgcataccacccgcagacagatgggcagaccgagcgtctaaatcagatcctagaagatatgcttcgcgcatgtgtcctggatttcgggaagacctgggataagagtctcccctatgccgagttctcctacaataacagctatcaagccagcatacaaatggcaccttatgaagcgttgtatgggcgcaaatgccggacaccgctcttgtgggatcaagttggggaaagccaagtgttcgggactgatatcttgagagaagctgaagctaaagtcagaaccattcgggataatctaaaggtggcacagtcccggcagaaaagttatgcagataaccgtcgccgtaacctggaattcgcagtggacgattttgtgtaccttcgggtcacgccattgcggggtgtacacaggtttcagacaaaagggaagctcgcacctcggtatgtgggtcctttccgtatcgttgcccgacgcggagaagtcgcttaccaattggagctgcccgcctccttgggcaacgtgcatgatgtgttccatgtgtcgcaactcaagaaatgccttcgagtgccatccgagcaggccgactcagagcaaattgaagttcgcgaagacttgacctacgtggagaggccagtgaaaatcctggacaccatggagcgcaggaccaggaaccgggtaatccgtttttgcaaggtccagtggagcaaccacgccgaagaagaagctacctgggagcgtgaaaacgagctgaaggcagcccatcctgatctcttcgccagttcttccgaatctcggggtcgagattccgtttaa

SEQ ID NO: 14225 - DNA, 5406 bp, Oryza sativa
  Clone ID: TFbOSC401848j.C1.o1.fg
atgtcatggcacagggccggtgtcctgctgctaggggctcagtcctgcctgcctgtcccgggggttccggccgtaggtgggattgggtcggtactcttgtctatggctaggatgggttggaaactatgtcacgtcttccgtccgtataccgtggtgatggccggcagcatcagccgtcgtggtctggacctgactggtttcgtcttggagctgcggggcatgtgcgttgtcctggggtatccgcatggagtggactaccagggcaggccgctcccggagcaggagggtgacgacgcagagccccacgctgcttgggaggtcactacagtgatcctcactggctcacccgagaggacttcgttggcagtcaccgcgggtggagattctttctccgccgcttgccagaacgccgctctcctcgccatcggcactcttcaccagcgctacccggacgagttgcagcactcgccctaccgctaccaccctcgtcgcggaggagcccgcgactacgccaccttccgggatgctagctcggaggatgacgctaccatcatgcacctggcgcgcatggtggaggcgtacgacgcggctcgtatcgacttccatcagatggtgcgccgtgggatggtcgagaacaacatgaagatcctggaactgcgtcaggagaatctgcagctgaagaaggacctagacacagtggaggcgcagctgcatcagctcaagatcgcccagggagaggtctgtcgccccaagcgccgccgcgtctgccgcagccagaagatcaccgcccgcaagagcacctccaggcccgagcttgttcgtcagtccctggcgtggacctgcttcgtggagacccctcgtgccgagcccgcgcctgtggttccccaggagggggaagccttcggcgttggtagcacggaggatgcgctgttgctcaccttccgtcctggcccgtcgcagcggagaagtgctaataccggtgatggcaaccaacctgagggcagcaaccacaacaaccatggcagcccacctccacctcctcctccgcctccaccaccaccaccagacaccaacgccattctcacccaaatcctcgcccagcaggccaacatgatggctgctttcctccaccacatccaaaatccgccacaacataatgctccaccaccacccccacaacactctaaactcgccgagttcctccgcatccgtccaccaaccttctctagctccaataaccccgtggatgcgttggattggttgcatgccgtggggaaaaagctagacactgtgcagtgcagcgatgaggagaaagctacgcagccagaggggcagcctattacttgggcccgcttcaccgccgctttccggaggacccatgtgcccgccggagtcatggcccttaagaaaagggaattccgagagttgaagcaaggcaaccgctccgtgatggagtatttgcatgagttcaacaacctggcccggtacgccccggaggatgtacgggaagatgaggaaaagcaggagaagttcttggcaggaatggaccctgagttgtccgtgcgtctagtctccggtgactatccggatttccaacgtctggtggacaagagcatccgcttggaagccaagcacaaggaactggagtcgcacaagcgccgcttggcaaatttccgcaatcaacagggtgctaaccaaagggtccgctacaccaatccctatccagggggatcgtcctcgcagcagcaacagcagcaacaacctcgctccgcaccccgacctcaattcatggtgcgcgtcccacagccgcagcaacagcagagtcaacaagggactcgtgcgccccgtcctcctatgccagccgtgcagcctggtcaaggccgcagggacgttcaaggtccgcagcgtctatgcttcaactgcttcgagcccgggcactttgcggataaatgcccgaagccgaggcgccagcaaggccaagcgcctccccgctccaacaacggtggtaaggatgtcattcggggtcgtgtgaaccacgtgacggccgaggacgtgctgacaactccagacgtcatcgttggtacgttcctcattcattccatccctgctaccattttgttcgactctggagcttcccactcgtttatatctgtgccattcgtggggagaaatcagttgggggtagaaaggcttaggaaccctctgctcatcaccacccctggaggggttatgacagcaaagtattatagtcctgccgtccctatagaaattcaggggattccttttccctcggatctgattcttctagacaccaagaacttggatgtgatccttgggatgaattggttggctcaattccaaggagtagtggattgtgcaagacgcactgtcactctgtaccgagagccggaacaaccggttgttttctttgcacccccaacctctgtcagtagtttagaactttatcagataggactgtcagaaatccccatcgtcagggagttcggagatgtgtttccggaagaactacccggtatgccgcccaagcgagagattgagttccggatagatcttgctccaggaaccactcctctgtacaagcgaccctaccgtatggcagcaaatgaactggccgaagttaagaaacagttggaagagttgaaagaaaaggggtatatacgtccgagtacttccccctggggtgctcctgtgatttttgtggagaagaaagacaagacgaagaggatgtgcgttgactacagagctctcaatgaagtcaccatcaaaaacaagtaccctcttccccggatcgatgatctgttcgatcagcttaaaggtgccactgtattctccaagattgatcttcgttccggatatcaccaattacgtattcgtgaagaagatattcctaagaccgcattcaccacgcgatacggactgtatgaattcacggtaatgtcgttcggtttaaccaatgcacctgccttcttcatgaacttaatgaacaaagtgttcatggaatacttggataggtttgttgtggtgttcattgatgacattctggtgtactcacaatcagaggaagaccatcagcaccatctccgtctggtgttgggaaagttgcgggaacatcaattgtatgccaaacttagcaagtgtgagttctggttgtctgaagtcaaattcttagggcacgtgatatctgctaaaggagttgctgtggaccccgaaacagtgaccgctgtcactgattggaagcaacccaagacagtcactcaaattcgcagtttcttaggtttggcgggatactaccggaggttcatcgagaacttctccaaaatcgctcgacccatgacacagttgttgaagaaagaagagaaatttgtgtggagcccgcaatgcgagaaggcgttccaaactctcaaagaaaagctggtttcctcgccggtgttaatcttgccggatactcgcaaggacttcatggtgtattgtgacgcttcgcgccaaggattggggtgcgtgctcatgcaggacggtcatgtggtggcctatgcctcacgccagctacggcctcatgaaggcaactaccctacccatgatttggagttagccgcggtggttcatgctctaaaaatctggcggcactatctcattgggaatcgctgtgaaatatatactgatcataagagtttgaaatacatcttcacccagtcggatctgaatcttcggcagaggagatggttagaactcatcaaggattatgatgtgggaattcactatcatcctggtaaggccaacgtggtcgccgacgctctaagtcgaaaaagccattacaacactcttgacgtccgtggcattccacccgaacttagtcaacagatggaagccctgaacctaagcatagttggtcgtggattcttggctacgctggaagccaagcccaccttgctcgatcaaatccgcgaggctcagaagaacgacccagacatgcatggactcctcaagaatatgaaacagggtaaagccgctggtttcacagaggatgaacatggaaccctatggaacggaaatcggatatgcgttccagataacagagaacttaaacagctgatacttcaggaagctcatgaaagtccttattccatccaccctggcagtatgaagatgtacttagacttgaaggagaaatactggtgggttagtatgaagcgggaaattgcagagttcgtggccctttgtgatgtgtgccagcgtgtcaaggcagagcaccaacgaccggccggacttctccaacctctccaagtaccagaatggaaatgggatgaaattgggatggatttcatcaccggacttccaaaaacccaaggtggatatgattctatatgggtagttgtggatcgattaaccaaggtagctcgatttattcctgtgaagaccacctatggaggaaacaaactagccgagctctacttcgctaggattgtgagtctccatggcgttcctaagaaaatcgtatctgataggggaagccaattcacctctcacttttggaagaagctccaagaagagctgggtacccgattaaatttcagcaccgcgtatcacccgcagacggatggacagaccgagcgtctaaatcagatcctagaagatatgcttcgcgcatgtgtcctagatttcgggaagacctgggataagagtctcccctatgccgagttctcctacaataacagctaccaagccagtatacaaatggcaccttatgaagcgttgtatgggcgcaaatgccggacaccgctcttgtgggaccaagttggggaaagtcaagtgttcaggactgatatcctgagagaagctgaagcgaaggtcagaaccattcgggataatctaaaggtggcacagtcccggcagaaaagttatgcagataaccgtcgccgtaacctggaattcgcagtggacgattttgtgtaccttcgggtcacgccattgcgaggtgtacacaggtttcagacaaaagggaagctcgcacctcggttcatgggtcctttccgtatcattgctcggcgcggagaagtcgcttaccagttggagctgcccgcctccttgggcaacgtgcatgatgtgttccatgtgtcgcaactcaagaaatgtcttcgagtgccatccgagcaggccgactcagagcaaattgaagttcgcgaagacttgacctacgtggagaggccagtgaaaatcctggacaccatggagcgcaggaccaggaaccgggtaatccgtttttgcaaggtccaatggagcaaccacgccgaggaagaagctacctgggagcgtgaagacgagctgaaagcagcccatcccgatctcttcgcaagttcttccgaatctcggggtcgagattccgtttaa

SEQ ID NO: 14226 - DNA, 5412 bp, Oryza sativa
  Clone ID: TFbOSC401855j.C1.o4.fg
atggatgaagtcgggggtcgatggacattctccagggcaaatgaaggctacacgagctgcggcccgatggccggcagcgttacccgtcgtggtttggacatgactggcttcgtcttggagttgcggggcatgtgcgtggttttgggatatccacatggagtggattaccaggccaggccgctcccggagcaggagggtgaggatgcagagcctcacgctggttgggaggtcactgcagtgatcctctccggctctcccgagcggacttcgctggcagtcaccgcgggtggggactccttccccgccgcttgccagaacgccgctctcctcgccatcggcactcttcaccagcgctacccggacgagttgcagcactcgccctaccgctaccaccctcgtcgcggaggagcccgcgacttcgccaccttccgagacgccagctcggaggatgacgctaccgtcgtgcatctggcacgcatggtggaggcgtacgacgcggctcgtatcgacttccaccagatggtgcgtcgtggcatggtggagaacaacatgaagatcctggagctgcgtcaggagaatctgcagctcaagaaggacctcgacgcgttggagacgcagcttcatcagctcaagatcgcccagggagagatcagccgtcccaagcgtcgccgcgtctgccgcagccagaagatcaccgcccgcaagagcacctccaggcccgagcttgttcgtcagtccctggcgtggacctgcttcgtcgagacccctcgtgccgagcctgcgcccgtggttccccaggagggggaagcctccggcgttggtagctcggagggtgcgctgttgctcaccttccgtcctggcccgtcgcagtgctctccttctctgtttgctggttctgtgtggggtttccagatggtgacgaccaggagaaatgttaacaccggtgaaggcaaccaacccgagggcagcaaccccaacccccaaggcaatccacctccaccaccaccaccagacaccaacgccattctcacccaaatcctcgcccaacaagccaacatgatgaatgctttcctccaccacctccaaaatccgccacaacagaatgctccaccaccacctccccaacactctaaactcgccgagttcctccgcatccgcccacctaccttctccagctccaacaaccccgtggatgcgttggattggttgcatgccgtggggaagaagttagacacggtgcagtgcagtgatgaggagaaagtcatcttcgccgcccaccagctgcaggggcccgcatctctatggtgggaccatttccaggccacgcagccagaagggcaacctattacttggactcgcttcaccgccgctttccggaaaacccatgtgcccgccggagtcgtggctcttaagaaaagggaattccgggagttgaagcaaggcaaccgctccgtgatggagtatttgcatgagttcaacaatctagcccgttatgccccggaggatgtgcgggaagatgaggagaagcaagagaagttcttggcaggaatggaccccgagctgtccgttcgtctagtctctggggactatccggatttccaacgtctggtggacaagagcatccgcttggaggccaagcacaaggaactggagtcgcacaagcgccgcttggcgaatttccgcaatcagcagggtgctaaccagagggtccgctacaccaatccctacccagggggatcctcctcgcagcagcagcaacagcagcaacctcgctcagcgccccgacctcaattcgtggtgcgcgtcccacagcagcaacagcagcagaatcagcaagggactcgtgcaccccgtcctcctacgccagctgtgcagcccgttcaaggccgcagggacgctcaaggtccgcagcgtctgtgcttcaactgcttcgagcccggacactttgcggataaatgcccaaagccaaggcgtcagcaaggccaagcgcctccccgctccaacaacggtggcaaggacgtcatccgtggtcgtgtgaatcacgtgacggccgaggacgtgctgacaactccagacgtcatcgttggtacgttcctcgtccaatccatccctgctactattttgttcgactctggagcttcccactcgtttatatctgtgccattcgtggggagaaatcagttgggggtagaaaggcttagaaaccctctgctcatcaccacccctggaggggttatgacagcaaagtattatagccctgccgttcctatagaaattcaggggattccttttccctcggatctgattctgctagacacaaagaacttggatgtgatccttgggatgaattggttggctcaattccaaggagtagtggattgcgcgaggcgcactgtcactctgtaccgagggccagaacaaccggttgttttctttgcacctccaaccgctgtcagaagttcagaacttcatcagatagaactgtcagaaatccccatagtcagagagttcggagatgtgtttccggaagaactacctggtatgccgcccaagcgagagattgagttccggatagatcttgctccaggaaccactcctctgtacaagcgaccctaccgtatggcagcaaatgaactggccgaagtaaagaaacagttggaagagttgaaagaaaaggggtacatacgtccgagtacttccccatggggtgctcctgtgatttttgtagagaagaaagacaagacgaagaggatgtgcgtcgactacagagctctcaatgaagtcaccatcaaaatcaagtaccctcttccccggatcgatgatctgttcgatcagcttaaaggtgccaccgtattctccaagattgatcttcgttccggatatcaccaattacgtattcgtgaagaagatattccgaagaccgcattcactacgcgatatggactgtatgaattcacggtgatgtcgttcggcttaaccaatgctcctgccttcttcatgaacttgatgaacaaagtgttcatggaatacttggataagttcgttgtggttttcattgatgacattctgatatactcacaatcagaggaagaccatcagcaccatctccgtctggtgttgggaaagttgcgggaacatcaattgtatgccaagcttagcaagtgtgagttctggttgtccgaagtcaaattcttggggcacgtgatatctgctaaaggagttgctgtggaccccgaaacagtgaccgccgtcaccgattggaagcaacccaagacagtcactcagattcgcagtttcttgggtttggcaggatactatcggagattcatcgagaacttctccaaaatcgctcgacccatgacacagttgttgaagaaagaagagaagtttgtgtggagcccgcaatgcgagaaggcgttccaaactctcaaggaaaagctggtttcctcgccagtgttaatcttgccggatactcgcaaggagttcatggtgtattgtgatgcttcgcgccaaggattggggtgcgtgctcatgcaggacggtcatgtggtagcctatgcctcacgtcagctacgacctcatgaaggcaactaccctacgcatgacttggagttagcagcggtggttcatgctctaaaaatctggcggcactatctcattgggaaccgctgtgaaatatatactgatcataagagtttgaaatacatcttcacccagtcggatctgaatcttcggcaaaggagatggttagaactcatcaaggattatgatgtgggaattcactatcaccctggtaaggccaatgtggttgccgacgctctaagtcgaaagagccactgcaacactctcaatgtccgaggcattccacccgagcttaatcaacagatggaagccctgaacctaagcatagttggtcgcggattcttggctgcgttagaagccaagcccaccttgctcgatcaaatccgcgaggctcagaagaatgatccggacatgcatggactcctcaagaatatgaaacagggtaaagccgctggtttcacagaggatgaacacggaaccttatggaacggaaagcgggtatgcgttccagatagcagagaacttaaacagctgatacttcaggaagctcacgaaagtccttattccattcacccgggcagtaccaagatgtacttagacttgaaggagaaatactggtgggtcagcatgaagcgggaaattgcagagtttgtggccctatgtgatgtgtgccagcgtgtcaaggcagaacaccaacgaccggccggacttctccaacctctccaagtgccggaatggaaatgggatgaaattgggatggatttcatcaccggccttccaaaaacccaaggtgggtatgattctatatgggtaatagtggatcgattaaccaaggtagctcgatttattcctgtgaagaccacctatggagggaacaaactagcggagctctacttcgctaggatcgtgagtctccatggcattcccaagaaaatcgtatctgataggggaagccaattcacctctcacttttggaagaagctccaagaagagctgggtactcgattgaattttagcaccgcctatcacccgcagacagatggacagaccgagcgtctaaatcagatcctagaagatatgctccgcgcatgtgtactagatttcgggaagacttgggataagagtctcccctatgccgagttctcctacaataacagctaccaagccagcatacaaatggcaccctatgaagcgttgtacgggcgcaaatgccggacaccgctattgtgggaccaagttggagaaagccaagtgttcgggactgatatcctgagagaagctgaagctaaagtcagaatcattcgggataatctaaaggtggcacagtctcggcagaaaagttatgcagataaccgtcgccgtgatctggaattcgcagtggatgactttgtgtaccttcgggtcacgccattgcgaggtgtgcacaggtttcagacaaaagggaagctcgcacctcggtatgtgggtcccttccgtatcatcgctcgacgcggagaagttgcttaccagctggagttgcccgcctccttgggtaacgtgcatgatgtgttccatgtgtcgcaactcaagaaatgtcttcgagtgccatccgagcaggccgactcagagcaaattgaagttcgcgaagacctgacgtatgtggagaagccagtgaaaatcctggacaccatggagcgcaggaccaggaaccgggtaatccgtttttgcaaggtccagtggagcaaccacgccgaagaagaagctacttgggagcgcgaagacgagctgaaggcagcccatcccgatctcttcgccagttcttccgaatctcggggtcgagattccgtttaa

SEQ ID NO: 14227 - DNA, 4113 bp, Oryza sativa
  Clone ID: TFbOSC401859j.C1.o2.fg
atgggttgggaactatgtcatgtcctccgtccgtatgccgtggtgatggccgccaacctcaaccgtcgtggtctggatctgactggctttgctttggagctgcggggcatgtgcgttgtcctgggatatccgcatggagtggactaccagggcaagaggcttccggagcaggatggtgacgatgcggagccccgcgccgcttgggaggtcactgcgatgatcctcaccggctcccctaagaggacttcgctggccgtcaccgcgggtagggactccttccccgccacctgccagaacgctgcactcctcgccatcggcactcttcaccagcgctacccggacgagttgcagcactcgccctaccgctactaccctcgtcgtggaggagcccgcgactacgccaccttccaggatgctagctcggaggatgacgctaccatcatgcatctggcgcgcatggtagaggcgtacgacgcggcccgtatcgacttctaccgcatggcgcgccgtggcctggtcgagaacaacatgaagatcctggagctgcgtcaagagaatctgcagttgaaggacttggacgctatggaggcgcagctgtgtcagctcaagattgctcagggggagatctgccgccccaagcgccgccgcaatccgccgcaacacaatgctccaccaccgccaccaccacccccacagcactccaagcttgccgagttcctccgcattcgcccacctaccttctctagctccaataaccacgtggatgccttggattggttgcatgccgttgggaaaaagttggacaccgtccagtgcaatgataaggagaaagttatcttcgtaacccatcagctgcaggggcccgcatcgctatggtgggaccatttccaggctacgcagccagaaggacagccaatcacctgggcccgcttcaccgccgctttccagaggacccatgtgccagctggggtcgtagcccttaagaagagggaatttcgggagttgaagcaaggcaaccgctctgttatggagtatttgcatgagttcaacaacttggcccggtatgccccggaggatgttcgtaaagatgaagaaaaacaggagaagtttctggcagggatggaccctgaactttctgtgcgtctggtctctggggactatcccgatttccagcgcctggtggacaagagcattcgcctggaagccaagcacaaggaactggagtcgcacaagcgtcgcttggcgaatttccgtaatcaacagggggctaaccaaaggatccgctacaccaatccctatctagggggatcctcctcacagcagcagcagcagcagcctcgccccgtgccacgccctcagtatgtggttcgtgtcccacagccgcagcagcaacggcagaatcaacaagggaaccgtgcaccccgacctcctgcaccggctatgcagcctggtcaaggtcgcaaggatgctcaaggccagcagcgtctgtgcttcaactgtttcgagcctgggcatttcgccgataaatgcccaaagccgaggcgtcagcaaggcccagcgccaaagccgaggcgtcagccgaggcgtcagcaaggcccagcgccacccggccccaacaacggtggtaaggatgccacccggggtcgtgtgaatcacgttactgcggaggatgtcctgacaactccagatgtcatcctcgatacgttcttcattcattccatccccgctaccattttgttggactctggagcttcccactcatttatatctgtgcaattcgtggggagaaatcaactaagggtagcaaagcttaggagctctctgctcatcaccacccctggaggggctatgacagcaaagtattatagcccgaccatacctatagagatccagggaatttcttttccctcggatctgatccttcttgacaccaaggacttggatgtgatcctcgggaagaattggcctgatcaaccggttgtcttctttgcgcacccaactcccaccggcaactcagtacttcatcagctgggactgtcagaaatacccgttgccagcaagttcagtgatgtgtttccggaagagctacccggtatgccaccaaagcgggagattgagttcaggatagatcttgctccaggaaccactcccatgtacaagcgaccctaccgtatggcagcgaatgaactggccgaagtaaagaagcagttggaagggttgaaagagaaggggtacatacggccgagcacttctccctggggtgctcccgtgatttttgtagaaaagaaagacaagacaaagaggatgtgcgttgactaccgagctctcaatgaagtcactatcaaaaacaagtaccctcttccccggatcgatgatctattcgatcaactcaaaggtgcctctgtcttttccaagattgaccttcgttccgggtatcatcaattgcgtatccgtgaagaagatatccctaagactgccttcaccacgcggtatggattgtatgaattcacggtgatgtcattcggcttgaccaacgctcctgccttcttcatgaatctaatgaacaaggtgtttatggagtatttggataagttcgttgtggtctttattgatgacatactggtgtactcacagtccgagaaagaacatcagcagcatctccgtctggtattgggaaagcttcgagaacatcagttgtatgccaagctcagcaagtgtgaattctggttgtccgaagtcaagttcttagggcatgtaatatctgctaaaggagtcgctgtggctcccgagacagtaacagctgtcaccgattggaagcaacccaagacggtcacccaggtccacagtttcttgggtttagcagggtactatcggaggttcatcgagaatttctccaaaattgccaggcccatgacgcagttgcggaaggaagaaaaatttgtgtggagtccgcagtgtgagagagcatttcaaactctcaaggaaaagttggtttcctcaccagtgttaatcttacctgatacccgcaaggatttcctggtgtactgtgaagcttcacgccaaggattggggtgtgtgttaatgcaagaaggtcatgtggtagcttatgcttcacgccagctacgaccccatgaaggcaactatcctacccatgatttggaattggccgcggtgagaagatggttagagctcatcaaagactatgatgtgggaatccattatcaccctggcaaggccaacgtggtggccgacgcgctgagtcggaaaggccactgcaacgctctttgtgtccgcggcattccaccggaacttaatcaacagttggaagccctgaacctaagtgtcgttagccatggattcctggctgcactagaagcaaagcccaccttgcttgatcacatacgcaaggctcagaagaatgatccggatatacaggagatcctcaagaatatgaagcagggtaaagccactggcttcacggaagatgaacacggaaccttatggaatggaaatcgtgtatgcgttccggacaacaaggaacttaaacagttgatacttcaggaagctcttatgctccgtgcctgtgttctggattttgggaggacctgggacaagagtctcccctatgctgaattctcctacaataacagctaccaggccagcatacaaatggcaccctatgaagcgttgtatggacgcaaatgccggactccgctgttgtgggaccaagttggagaaagccaagtgttcgggactgatatcctgagagaagctgaggctaaagtcagaaccattcgggataacttaaaagtggcccagtctcggcagaaaatggatgattttgtgtatcttcgggtcacgccacagcggggagtgcacaggtttcagacaaaagggaagcttgcacctaggtatgtgggacctttccgcatcatcgctcgacgcggagaagtcgcttaccagttggagctgcctacatccttgggcaatgtgcacgatgtgttccacgtgtcgcagctcaagaaatgccttcgagtgccatccgagcaagccgattcagagcagattgatgttcgagaagcctgtgaagattctggacacaatggagcgtag

SEQ ID NO: 14228 - DNA, 5271 bp, Oryza sativa
  Clone ID: TFbOSC402412j.C1.o1.fg
atggacatctccagggcaaatgaaggctacacgagctgcggcccggtagtcgagatgtcatggcacagggccggtgtcctgctgctaggggctcagtcctgcctgcctatcccggaggttccggccgtaggtgggattgggtcggtactcttgtctatggctaggatgggttggaaactatgtcacgtcttccgtctgtataccgtggtgatggccggcagcgtcacccgtcgtggtttggacatgactggcttcgtcttggagctgcggggcatgtgcgtggtcctggggtatccacatggagtggactaccaggccaggccgcttccggagcaggagggtgacgatgcagagccccacgctggttgggaggtcactgcagtgatcctctctggctctcccgagcggacttcgctggcagtcaccgcgggtggagattccttccccgccgcttgccagagcgccgctctcctcgccatcggcactcttcaccagcgctacccggacgagttgcagcactcgccctaccgctaccaccctcgccgcggaggagcccgcgactacgccaccttccgggatgctagctcagaggatgacgctaccatcgtgcacctggcgcgcatggtggaggcgtacgacgcggctcgtatcgacttccatcagatggtgcgccgtgggatggtcgagaacaacatgaagatcctggagctgcgtcaagagaacctgcagctcaagaaggacctagacgcggtggaggcgcagctgcatcagctcaagatcgcccagggagaggtctgccgccccaagcgccgccgtgtctgccgcagccagaagatcaccgcccgcaagagcacctccaggcccgagcttgttcgtcagtccctggcgtggacttgcttcgtcgagatccctcgtgccgagcccgcgcccgtggttccccaggagggggaagcctccggcgttggtagcacggaggatgcgctgttgctcaccttccgtcctggcccgtcgcagcggagaagtgctaacaccggtgatggcaaccaacctgaaggcagcaaccaccaccaccagggcagcccacctccacctcctcctccgcctccaccaccaccaccagacaccaacgccattctcacccaaatcctcgcccagcaggccaacatgatgactgctttcctccaccacctccaaaatccgccacaacataatgctccaccaccacccccacaacactctaaactcgccgagttcctccgcatccgcccacctaccttctctagctccaacaaccccgtggacgcgttggattggttgcatgccgtggggaaaaagctagacactgtgcagtgcagcgatgaggagaaagtcatcttcgccgcccaccagctgcagggacccgcatctctatggtgggaccatttccaggctacgcagccagaagggcaacctattacttgggcccgtttcaccgccgctttccggagaacccatgtgcccgccggagtcgtggcccttaagaaaagagaattccgagagttgaagcaaggcaaccgctccgtgatggagtatttgcatgagttcaacaacttggcccgttacgccccggaggatgtgcgggaagatgaggagaagcaagagaagttcttggcaggaatggaccctgagctgtccgtccgtctagtctccggggactatccggatttccaacggggatcctcctcgcagcagcaacaacagcagcagcaacctcgctccgcgcctcgacctcaattcgtggtgcgcgtcccacagccgcagcagcagcagaatcaacaagggactcgtgcgccccgtcctcctacgccaactgtgcagcctggtcaaggccgtagggacgctcaaggtccgcagcgtctgtgcttcaactgcttcgagcccgggcactttgcggataaatgcccaaagccgaggcgtcagcaaggccaagcgcctccccgctccaaccacggtgggaaggatgtcattcggggtcgggtgaaccacgtgacggccgaggacgtgctgacaactccagacgtcatcgttggtacgttcctcattcattccatccctgctaccattctgttcgactctggagcatcccactcgtttatatctgtgccattcgtggggagaaatcagttgggggtagaaaggcttaggaaccctctgctcatcaccacccctggaggggttatgacagcaaagtattatagtcctgccgtccctatagaaattcaggggattccttttccctcggatctgattctgctagacaccaagaacttggatgtgatccttgggatgaattggttggctcaattccaaggagtagtggattgtgcgagacgcactgtcactctgtaccgagggccggaacaaccggttgttttctttgcacccccaacctctgtcagtagttcagaacttcatcagataggactgtcagaaatccccatcgtcagagagttcggagacgtgtttccggaagaactacccggtatgccgcccaaacgagagattgagttccggatagatcttgctccaggaaccactcctctgtacaagcgaccctaccgtatggcagcaaatgaactggccgaagtcaagaaacagttggaagagttgaaagaaaaggggtatatacgtccgagtacttccccctggggtgctcctgtgatttttgtggagaagaaagacaagacgaagaggatgtgcgttgactacagagctctcaatgaagtcaccatcaaaaacaagtaccctcttccccggatcgatgatctgttcgatcagcttaaaggtgccactgtattctccatgattgatcttcgttccggatatcaccaattacgtattcgtgaagaagatattccgaagaccgcattcaccacgcgatacggactgtatgaattcacggtgatgtcatttggtttaaccaatgcacctgccttcttcatgaacttaatgaacaaagtgttcatggaatacttggataagtttgttgtggttttcattgatgacattctgatatactcacaatccgaggaagaccatcagcaccatctccgtctggtgttgggaaagttgcgggaacatcaattgtatgccaaacttagcaagtgtgagttctggttgtccgaagtcaaattcttagggcacgtgatatctgctaaaggagttgctgtggaccccgaaacagtgaccgccgtcactgattggaagcaacccaagacagtcactcaagtccgcagtttcttaggtttggcaggatactaccggaggttcatcgagaacttctccaaaatcgctcgacccatgacacagttgttgaagaaagaagagaaatttgtgtggagcccgcaatgcgagaaggcgttcaaaactctcaaagaaaagctggtttcctcgccagtgttaatcttgccggatactcgcaaggatttcatggtgtattgtgatgcttcgcgccaaggattggggtgcgtgctcatgcaggatggtcatgtggtggcctatgcctcacgccagctacggcctcatgaaggcaactaccctacccatgatttggagttagctgcggtggttcatgctctaaaaatctggcggcactatctcattgggaatcgttgtgaaatatatactgatcataagagtttgaaatacatcttcactcagtccgacctgaatcttcggcaaaggagatggttagaactcatcaaggattatgatgtgggaattcactatcatcctggtaaggccaacgtggtcgccgacgctctaagtcgaaaaagccattgcaacactcttaacgtccgtggcattccactcgaacttagtcaacagatggaagccctgaacctaagcatagttggtcgcggattcttggctgcgttggaagccaagcctaccttgctcgatcaaatccgcgaggctcagaagaacgatccggacatgcatggactcctcaagaatatgaaacagggtaaagccgctggtttcacagaggatgaacacggaaccctatggaacggaaatcgagtatgcgttccagataacagagaacttaaacagctgatactacaggaagctcacgaaagtccttattccatccaccctggcagtacgaagatgtacttagacttgaaggagaaatactggtgggttagtatgaagcgggaaattgcagagttcgtggccctttgtgatgtgtgccagcgtgtcaaggcagagcaccaacgaccggccggacttctccaacctctccaagtacctgaatggaaatgggatgaaattgggatggatttcatcaccggacttccaaagacccaaggtggatatgattctatatgggtagttgtggatcgattaaccaaggtagctcgatttattcctgtgaagaccacctatggagggaacaaactagccgagctctacttcgctaggatcgtgagtctccatggcgttcccaagaaaatcgtatctgataggggaagccaattcacctctcacttttggaagaagcttcaagaagagctgggtacccggttaaacttcagctccgcataccacccgcagacagatgggcagaccgagcgtctaaatcagatcctagaagatatgcttcgcgcgtgtgtcctggatttcgggaagacctgggataagagtctcccctatgccgagttctcctacaataacagctatcaagccagcatacaaatggcaccttataagcgttgtatgggcgcaaatccgaacacgctcttgtggatcaagttggggaaagccaagtgttcggtggacgattttgtataccttcgggtcacgccattgcggggtgtacacaggtttcggacaaaagggaagctcgcacctcggtatgtgggtcctttccgtatcgttgcccgacgcagagaagtcgcttaccaattggagctgcccgcctccttgggcaacgtgcacgatgtgctccatgtgtcgcaactcaagaaatgccttcgagtgccatccgagcaagccgactcagagcaaattgaagttcgcgaagacttgacctacgtggagaggccagtgaaaatcctggacaccatggagcgcaggaccaggaaccgggtaatccatttttgcaaggtccagtggagcaaccacgtcgaagaagaagctacctgggagcgtgaagacgagctgaaggcagcccatcccgatctcttcaccagttcttctgaatctcggagtcgagattccttttaa

SEQ ID NO: 14229 - DNA, 5550 bp, Oryza sativa
  Clone ID: TFbOSC402669j.C1.o3.fg
atggaggtggatgaagtcgggggtcgatggacattctccagggcaaatgaaggctacaygagctgcggcccggtagtcgagatgtcatggcacagggccggtgtcctgctgctaggggctcagtcctgtctgcctgtcccggggrttccgrccgtaggcgggattgggtcggtactcttgtctatggctaggatgggttggaaactatgtcacgtcttccgtctgtataccgtggtgatggccggcagcgtcacccgtcgtggtttggacatgactggcttcgtcttggagctgcgaggcatgtgcgtggtcttggggtatccacatggagtggactaccaggccaggccgcttccggatcaggagggtgatgacgcggagccccacgctggttgggaggtcactgcagtgatcctctctggctctcccgagcggacttcgctggcagtcaccgcgggtggagattccttccccgccgcttgccagaacgccgctctcctcgccatcggcactcttcaccagcgctacccggacgagttgcagcactcgccctaccgctaccaccctcgtcgcggaggagcctgcgaccacgccaccttccgggatgctagctcggaggatgacgctaccatcgtgcacctggcgcgcatggtggaggcgtacgacgcggctcgtatcgacttccaccagatggtgcgccgcgggatggttgagaacaacatgaagatcctggagctgcgtcaggagaacctgcagctcaagaaggacctagacacggtggaggcgcagctgcatcagcttaagatcgcccagggagaggtctgccgccccaagcgtcgccgcatctgccgcagccagaagatcaccgcccgcaagagcacctccaggcccgagcttgttcgtcagtccctggcgtggacctgcttcgtcgagacccctcgtgccgagcccgcgcccgtggttccccaggagggggaagcctccggcgttggtagcacggagggtgcgctgttgctcaccttccgccctggcccgtcgcagcggagaaatgctaacaccggtgatggcaaccaacctgaaggcagcaaccacaaccaccaaggcaacccacctccacctcctcctccgcctccgccaccaccaccagacaccaacgccattctcacccaaatcctcgcccagcaagccaacatgatgactgctttcctccaccacctccaaaatccgccacaacagaatgctccaccaccacctccccaacactctaaactcgccgagttcctccgcatccgtccacctaccttctctagctccaacaaccccgtggatgcgttggattggttgcatgccgtggggaaaaagctagacacggtgcagtgcagcgacgaggagaaagtcatcttcgccgcccaccaactgcaggggcccgcatctctctggtgggaccacttccaggctacgcagccagagggacagcctattacttgggcccgcttcaccgccgctttccggagaacccatgtgcccgccggagtcgtggccctcaagaaaagggaattccgagagttgaagcaaggcaaccgctccgtgatggagtatttgcatgagttcaacaatctggcccgttacgctccggaggatgtgcgggaagatgaggagaagcaagagaagttcctggcaggaatggaccccgagctgtccgtccgtctagtctcgggggactatccggattttcaacgactggtggacaagagcatccgcttggaagccaagcacaaggagctggagtcgcacaagcgccgcttggcgaatttccgcaatcaacagggtgctaaccaaagggtccgctacaccaatccctatccggggggatcctcctcgcagcagcaacaacagcagcagcaacctcgctccgcgcctcgacctcaattcgtggtgcgcgtcccacagccgcagcagcagcagaatcaacaagggactcgtgcgccccgtcctcccacgccaactgtgcagcctggtcaaggccgcagggacgctcaaggtcagcagcgtctgtgcttcaactgcttcgagcccgggcactttgcggataaatgcccgaagccaaggcgtcagcaaggccaagcgcctccccgctccaacaacggcgggaaggatgtcattcggggtcgtgtgaatcacgtgacggccgaggacgtgctgacaactccagacgtcatcgttggtacgttcctcgttcattccatccctgctaccattttgttcgactctggagcttcccactcgtttatatctgtgccattcgtggggagaaatcagttgggggtagaaaggcttaggaaccctctgctcatcaccacccctggaggggttatgacagcaaagtattatagtcctgccgtcccgatagaaattcaggggattccttttccctcggatctgattctgctagacaccaagaatttggatgtgattcttgggatgaattggttggctcaattccaaggagtagtggattgcgcgagacgcactgtcactctgtaccgagggccggaacaaccggttgttttctttgcacccccaacctctgtcagaagttcagaactgcatcagatagaactgtcagaaatccccatcgtcagggagttcggagatgtgtttccggaagaactacccggtatgccgcccaagcgagagattgagttccggatagatcttgctccaggaaccactcctctgcacaagcgaccctaccgtatggcagcaaatgaactggccgaagtaaagaaacagttggaagtgttgaaagaaaaggggtatatacgtccgagtacttccccatggggtgctcctgtgatttttgtagagaagaaagacaagacgaagaggatgtgcgtcgactacagagctctcaatgaagtcaccatcaaaaacaagtaccctcttccccggatcgatgatctgttcgatcagcttaaaggtgccactgtattctccaagattgatcttcgttccggatatcaccaattacgtattcgtaaagaagatattccgaagaccgcattcaccacgcgatacgggctgtatgaattcacggtgatgtcattcggtctaaccaatgcacctgctttcttcatgaacttaatgaacaaagtgttcatggaatacttggataagtttgttgtggttttcattgatgacattctgatatactcacaatcagaggaagaccatcagcaccatctccgtctggtgttgggaaagttgcgggaacatcaattgtatgccaagcttagcaagtgtgagttctggttgtccgaagtcaaattcttggggcacgtgatatctgctaaaggagttgctgtggaccccgaaacagtgaccgccgtcaccgattggaagcaacccaagacagttactcaagtccgtagtttcttaggtttggcaggatactaccggagattcatcgagaacttctccaaaatcgctcgacccatgacacagttgttgaagaaagaagagaaatttgtgtggagcccgcaatgcgagaaggcgtttcaaactctcaaggaaaagctggtttcctcgccagtgttaatcttgccggatactcgcaaggacttcatggtgtattgtgacgcgtcgcgccaaggactggggtgcgtgctcatgcaggacggtcatgtggtagcctatgcctcatgtcagctacgacctcatgaaggcaactaccctacccatgatttggagttagccgcggtggttcatgctctaaaaatctggcggcactatcacattgggaatcgctgtgaaatatataccgaccataagagtttgaagtacatcttcacccagtcggatctgaatcttcggcaaaggagatggttagaactcatcaaggactatgatgtgggaattcactatcatcctggtaaggccaacgtggttgctgacgctctaagtcgaaagagccattgcaacactcttaacgtccgtggcattccacctgaacttagtcaacagatggaagccctgaacctaagcatagttggtcgtgggttcttggctgcgttagaagccaagcctaccttgctcgatcaaatccgcgaggctcagaagaatgatccggacatgcatggactcctcaagaatatgaaacagggtaaagccactggtttcacagaggatgaacacggaaccctatggaacggaaagcgggtatgcgttccagataacagagaacttaaacagctgatacttcaggaagctcacgaaagtccttattccattcacccgggcagtacaaagatgtacttagacttgaaggagaaatactggtgggttagcatgaagcgggaaattgcagagtttgtggccctatgtgatgtgtgccagcgtgtcaaggcagagcaccaacgaccggccggacttctccaacctctccaagtaccagaatggaaatgggatgaaattgggatggatttcatcaccggacttccaaaaacccaaggcggatatgattctatatgggtagttgtggatcgattaaccaaggtagctcgatttattcctgtaaagaccacctatggagggaacaagctagccgagctctacttcgctaggatcgtgagtctccatggcgttcccaagaaaatcgtatctgataggggaagccaattcacctcgcacttttggaagaagctccaagaagagctgggtactcgattgaatttcagcaccgcctatcacccgcagacagatggacagaccgaacgtctaaatcagatcctagaagatatgctccgcgcatgtgtactagatttcgggaagacctgggataagagtctcccctatgccgagttctcctacaataacagttatcaagccagcatacaaatggcaccttatgaagcgttgtacgggcgcaaatgccggacaccgctcttgtgggaccaagttggagaaagccaagtgttcgggactgatatcctgagagaagctgaagctaaagtcagaatcattcgggataatctaaaggtggcacagtcccggcagaaaagttatgcagataaccgtcgccgtgacctggaattcgcagtgggtgattttgtataccttcgggtcacgctattgcgaggtgtacacaggtttcagacaaaagggaagctcgcacctcggtatgtgggtcctttccgtatcaatgctcggcgcggagaagtcgcttaccagttggagctgcccgcctccttgggcaacgtgcatgatgtgttccatgtgtcgcaactcaagaaatgccttcgagtgccatccgagcaggccgactcagagcagattgaagttcgcgaagatttgacctacgtggagaggccaatgaaaatcctggacaccatggagcgcaggaccaggaaccgggtaatccgtttttgcaaggtccagtggagcaaccacgcagaagaagaagctacttgggagcgtgaagacgagctgaaggcagcccatcccgatctcttcgccagttcttccgaatctcggggtcgagattccgtttaa

SEQ ID NO: 14230 - DNA, 5304 bp, Oryza sativa
  Clone ID: TFbOSC404680j.C1.o3.gm
atggtgacgaccaggagaaccgctgtcaccggtgatggcaatcaacccgaaggcagcaaccccaaccaccaaggcaacccacctccgcctcctcctccgcctccaccaccaccaccagacaccaacgccattctcacccagatcctcgcccagcaggccaacatgatgaccgctttcctccaccacctccaaaatccgccacaacagaatgctccaccaccacctccccaacactctaaactcgccgaattcctccgcatccgtccacccaccttctctagctccaacaaccccgtggacgcgttggattggttgcatgccgtggggaagaagctggacactgtgcagtgcagtgatgaagagaaagtcatcttcgccgcccaccagctgcaggggcccgcatctctatggtgggaccatttccaggctacgcagccagaggggcagccgattacttgggcccgcttcaccgccgctttccggagaacccatgtgcccgccggagtcgtggctcttaagaagagggagttccgagagttgaagcaaggcaaccgctccgtgatggagtatttgcatgagttcaacaacctggcccggtacgctccggaggatgtgcgggaagatgaggagaagcaggagaagttcttggcaggaatggaccccgagctgtctgtccgcctagtctctggggactatccggattttcaacgattggtggacaagagcatccgcttggaagccaagcacaaggagctggagtcgcacaagcgccgcttggcgaacttccgcaatcagcagggtgctaaccaaagggtccgctacaccaatccctacccagggggatcctcctcacagcagccgcagcagcaacaacctcgctccgcgcctcgacctcaattcgtggtgcgcgtcccacagccgcagcagcagcagaatcaacaagggactcgtgcgccccgtcctcccacgccagctgtgcagcctggtcaaggccgcagggacgctcaaggtcagcagcgtctgtgcttcaactgcttcgagcccgggcactttgcggataaatgcccgaagccaagacgtcagcaaggccaagcgcctccccgccccaacaacggtggcaaggacgtcattcggggtcgtgtgaaccacgtgacggccgaggacgtgctgacaactccagacgtcatcgttgggctgtcagaaatccccatagtcagagagttcggagacgtgtttccggaagaactacccggtatgccgcccaagcgagagattgagttccgaatagatcttgctccaggaaccactcctttgcacaagcgaccctatcgtatggcagcaaatgaactggccgaagtaaagaaacagttggaagagttgaaagaaaaggggtatatacgtccgagtacttccccatggggtgctcctgtgatttttgtggagaagaaagacaagacgaagaggatgtgcgtcgactacagagctctcaatgaagtcaccatcaagaacaagtatcctcttccccggatcgatgatctgttcgatcaacttaaaggtgccactgtattctccaagattgatcttcgttccggatatcaccaattacgtatccgtgaggaagatattccgaagaccgcattcaccacgcgatacgggttgtatgaattcacggtgatgtcgttcggtctaaccaatgcgcctgccttcttcatgaacttaatgaacaaagtgttcatggaatacttggataagtttgttgtggttttcattgatgacattctgatatactcacaatcagaggaagaccatcagcaccatctccgtctggtgttgggaaagttgcgggaacatcaattgtatgccaaacttagcaagtgtgagttctggttgtccgaagtcaaattcttagggcacgtgatatctgctaaaggagttgctgtggaccctgaaacagtgaccgccgtcaccgattggaagcaacccaagacagttactcaagtccgcagtttcttaggtttggcaggatactaccggaggttcatcgagaacttctccaaaatcgctcgacccatgacgcagttgttgaagaaagaagagaaatttgtgtggagcccgcaatgcgagaaggcgttccaaactctcaaagaaaagctggacggtcatgtggtagcctatgcctcacgccaactacgacctcatgaaggcaactaccctacacatgacttggagttagcagcggtggttcatgctctaaaaatctggcggcactatctcattggcaatcgctgtgaaatatatactgatcataagagtttgaaatacatcttcacccagtcagatctgaatcttcggcaaaggagatggttagaactcatcaaggattatgatgtgggaattcactatcatcctggtaaggccaacgtggttgccgacgctctaagtcggaagagccattgcaacactcttaacgtccgtggcatcccacccgagcttagtcaacagatggaagccctgaacctaagcatagttggtcgtggattcttggctgcgttggaagccaagcctaccctgctcgatcaaatccgcgaggctcaaaagaatgatccagacatgcatggactcctcaagaatatgaaacagggtaaagccgctggtttcacggaggatgaacacggaaccctatggaacggaaagcggagtttgtggccctatgtgatgtgtgccagcgtgtcaaggcagaacaccaacgaccggccggtcttctccaacctctccaagtaccagaatggaaatgggatgaaattgggatggatttcatcaccggacttccaaaaacccaaggtggatatgattccatatggcaccgcgtatcacccgcagacagatggacagaccgagcgtctcaatcagatcctcgaagatatgcttcgcgcatgtgtcctagatttcgggaagacttgggataagagtctcccctatgccgagttctcctacaataacagctaccaagccagcatacaaatggcaccgtatgaagcattgtatgggcgcaagtgccggacaccgctattgtgggaccaagttggagaaagccaagtgttcgggactgatatcctgagagaagctgaagctaaagccgactcagagcaaattgaagttcgcgaagatttgacctacgtggagaggccaatgaaaatcctggacaccatggagcgcaggaccaggaaccgggcgggcccgcccgccactctcgctgacgggtgggacccacctgtcatctccttcctcgcgccgcgcccgccgcccgcccgtgccctagcgccgccgccgccgcggattccgccgcatcccgccgtccccgcgcgcattaaagagggggaaatcactccccgtgattccctctcccgtttccccctcttttccctctctctctccctcggattcgttcgatttgaatcccgcaatcgtcgccggcgtcttcaatggcggccgagatctccgcggccgattcctccctctccggccgcgttctccccctcccgttgctatatattcgttccccgagctccgctcttccgtttccgccgctcgccgctcgctctcgccgtcggattcgtgctcgcgccgtgcacctctctctccgccgtcgccgtcgacctccggttcgccgccgacgtcgctccgggcttcctcccgactcggcgtcacctccatcggcttcgccgcgttgtcgccgaccccgtccgccccttcgcctcgcccgccgaccgccggagctccgtcgtcctcgccgtcccgaaccgcgccgccgccttcctccgcttcggccgccgtttccgtcgtcgttgtagtcccggggtgagccgtggactgccgttcgctttcccccttcccttctccctctcgggtgccgctccgccgcgccgttggtcgccggcggcgaccatcggggcgcgggtgcgccgcctcccgtcggccgtgccggcgaggccgccttcggggcgcgccccgcggctgccaggtgggcccggccgtcagccgcccgcgcccgcgggtgcggctgacgcgtgggacccacggcgccgaccgccgccagccgcgtgctcccggtccaccgtggaccgagaggctgacgcgtgggccccacctcccgtggacccgatggctgatcgcgatgaggaacagatactgtacgatacaatcgcggagggaagcagccagtattggaacgaagaagaggggaacaaggatccaaaccagtacttgaacgaggaagggaatgtggagagggatgcggaggggaaccaggaggggaacgtgcagagggatgcggaggggaacgaggaggaagaggctagtggaagacaaacacgagggaaaggggtgattccttggaagattggattcaaggaggacatccacacgtacaggagtcggatgaggagcaagagagataccgaggcgaagattgcagatcttgagtacagggtatcgagctacgagctcagcatgcaagaggaggtggcaagccgcgcctcaacggggcaggtaggatcacagagcatggacgccatgcaaacattggacgaaaccacctgcctcgttgatgatatcactcagcggacaccatgtgagctgtatattcccttcaagaacttatcaataaaggtggcgtcgggcatggccatcccaatggacccatcggggacttaccactgcaggctgattccagcaggatactccaaggtcgaagttgagttggtggaaggcgctacatcatcctccctgggcgacaagcggcgtcttgtgcaccatctcctccggctccgccatctcctcctcaggctcctacaccgactcctccgcaggcttctacaccgactcctccgcaagctcctcgtccggcttcttccaagtcaagggcccccgaagctccaccacctgcccccacaggcaacaaagaaggcaaaagttgacactgcaaaaaacaaggacctagggtacgattgcacgcaagaggagcttgacgcttatgtggcattagaagtcaggagacaattgaagcctcgaagtccagaaaagaagattcctatagttccaagtgtcaggaacttcttcaggggtatgtctgcacctgccaaagaggccataaagctatcggactatgagcgaacacttaagaaagcatcttctgaaaagtccaaaccagtccctcagcttggagagcaaccaaaccaggagatcgagccgttggtgacggtgaagattttggaatacaagaatttattaatgacaccgggctaa

SEQ ID NO: 14231 - DNA, 5376 bp, Oryza sativa
  Clone ID: TFbOSC404798j.C1.o16.fg
atggatgaagtcgggggtcgatggacattctccagggcaaatgaaggctacacgagctgcggcccgatggccggtagcgtcacccgtcgtggtttggacatgactggcttcgtcttggagctgcggggcatgtgcgtggtcttagggtacccacatggagtggactaccaggccaggccgcttccggatcaggagggagacgacgcggagccccacgctggttgggaggtcactgctgtgatcctctctggctctcccgagcggacttcgctggcagtcaccgcgggtggagattccttccccgccgcttgccagaacgccgctctcctcgccatcggcactcttcaccagcgctacccggacgagttgcagcactcgccctaccgctaccaccctcgccgcggaggagcctgcgactacgccaccttccgggatgctagctcggaggatgacgctaccatcgtgcacctagcgcgcatggtggaggcgtacgacgcggctcgtatcgacttccatcagatggtgcgccgcgggatggtcgagaacaacatgaagatcctggagctgcgtcaagagaacctgcagctcaagaaggacctcgacgcggtggaggcgcagctgcatcagctcaagatcgcccagggagagatctgccgccccaagcgtcgccgcgtctgccgcagccagaagatcaccgcccgcaagagcacctccaggcccgagcttgttcgtcagtccctggcgtggacttgcttcgtcgagacccctcgtgccgagcccgcgcccgtggttccccaggagggggaagcctccggtgttggtagcacggaggtcgtgtggggcatggttatgccgatggtgacgaccaggagaaatgctgttaccggtgatggcaaccaacccgaaggcagcaaccacaaccaccaaggcaatccacctccacctcctcctccgcctccaccaccaccaccagacaccaacgccattctcacccaaatcctcgcccagcaagccaacatgatgaccgctttcctccaccacctccaaaatccgccacaacagaatgctccaccaccacctccccaacactctaaactcgccgagttcctccgcatccgcccacctaccttctctagttccaacaatcccgtggatgcgttggattggttgcatgccgtggggaaaaagctagacacggtgcagtgcagcgatgaggagaaagtcgtcttcgccgcccatcagctgcaggggcccgcatctctctggtgggaccatttccaggctacgcaaccagaggggcaacctattacttgggctcgcttcaccgccgctttccggagaacccatgtgcccgctggagtcgtggcacttaagaaaagagaattccgagagttgaagcaaggcaaccgctccgtgatggagtatttgcatgagttcaataatctggcccgttacgctccggaggatgtgcgggaagatgaggagaagcaagagaagttcttggcaggaatggaccccgagctgtccgtccgtctagtctctggggactatccggattttcaacgtctggtggacaagagcatccgcttggaagccaagcacaaggaactggagtcacacaagcgccgcttggcgaatttccgcaatcaacagggtgctaaccagagggtccgctacaccaatccctatccagggggatcctcctcgcagcagcaacaacagcagcagcaacctcgctccgcgcctcgacctcaattcgtggtgcgcatcccacagccgcagcagcagcagaatcagcaagggactcgtgcgccccgtcctcctacgccaactgtgcagtctggtcaaggccgcagggacgctcaaggtcagcagcgtctgtgcttcaactgcttcgagcccgggcactttgcggataaatgcccgaagccaaggcgtcagcaaggccaagcgcctccccgctccaacaacggcgggaaggatgtcattcggggtcgtgtgaatcacgtgacggccgaggacgtgctgacaactccagacgtcatcgttggtacgttcctcgttcattccatccctgctacaattttgttcgactctggagcttcccactcgtttatatctgtgccattcgtggggagaaatcagttgggggtagaaaggcttaggaaccctctgctcatcaccacccctggaggggttatgacagcaaagtattatagtcctgccgtccctatagaaattcaggggattcctttttcctcggatctgattctgctagacaccaagaatttggatgtgatccttgggatgaattggttggctcaattccaaggagtagtggattgcgcgagacgcactgtcactctgtaccgagggccggaacaaccggttgttttctttgcacccccaacctctgtcagaagttcaggacttcatcagataggactgtcagaaattcccatcgtcagagagttcggagacgtgtttccggaagaactacctggtatgccgcctaagcgagagattgagttccggatagatcttgctccaggaaccactcctctgtacaagcgaccgtaccgtatggcagcaaatgaactggccgaagtaaagagacagttggaagagctgaaagaaaaggggtacatacgtccgagtacttccccatggggtgctcctgtgatttttgtagagaagaaagacaagacgaagaggatgtgcgtcgactacagagctctcaatgaggtcaccatcaaaaacaagtaccctcttccccggatagatgatctgttcgatcagcttaaaggtgccactgtattctccaagattgatcttcgttccggatatcaccaattacgtattcgtgaagaagatattccgaagaccgcattcaccacgcgatacggactgtatgaattcacggtgatgtcgttcggtttgaccaatgcacctgccttcttcatgaacttaatgaacaaagtgttcatggaatacttggataagtttgttgtggttttcattgatgacattctgatatactcacaatcagaggaagaccatcagcaccatctccgtctggtgttgggaaagttgcgggaacatcaattgtatgccaaacttagcaagtgtgagttctggttgtccgaagtcaaattcttagggcacgtgatatctgctaaaggagttgctgtggaccccgaaacagtgaccgccgtcaccgattggaagcaacccaagacagtcactcaagtccgcagtttcttaggtttggcaggatactatcggagattcatcgagaacttctccaaaatcgctcgacccatgacacagttgttgaagaaagaagagaaatttgtgtggagcccgcaatgcgagaaggcgtttcaaactctcaaagaaaagctggtttcctcgccggtgttaatcttgccggatactcgcaaggatttcatggtgtattgtgacgcttcgcgccaaggattggggtgcatgctcatgcaggacggtcatgtggtagcctatgcctcacgtcagctacgacctcatgaaggcaactaccctacacatgacttggagttagccgcggtggttcatgctctaaaaatctggcggcactatctcattgggaatcgctgtgaaatatataccgatcataagagtttgaaatacatcttcacccagtcggatctgaatcttcggcaaaggagatggttagaactcatcaaggactatgatgtgggaattcactatcatcctggtaaggccaacgtggttgccgacgctctaagtcgaaagagccattgcaacactcttaacgtccgtggcattccacccgaacttagtcaacagatggaagccctgaacctaagcatagttggtcgtggattcttggctgcgttggaagccaagcctatcttgctcgatcaaatccgcgaggctcagaagaacgatccggacatgcatggactcctcaagaatatgaaacagggtaaagccgctggtttcacagaggatgaacacggaaccctatggaacggaaagcgggtatgcgttccacataacagagaacttaaacagctgatacttcaggaagctcacgaaagtccttattccatccaccctggcagtacaaagatgtacttagacttgaaggagaaatactggtgggttagcatgaagcgggagattgcagagtttgtggccctatgtgatgtgtgccagcgtgtcaaagcagagcaccagcgaccggccggacttctccaacctctccaagtaccagaatggaaatgggatgaaattgggatggatttcatcaccggacttccaaaaacccaaggcggatatgattcaatatgggtagttgtggatcggttaaccaaggtagctcgattcattcctgtgaagaccacctatggagagaacaaactagcggagctctacttcgctaggatcgtgagtctccatggcgttcccaagaaaatcgtatctgataggggaagccaattcacctctcacttttggaagaaactccaagaagagctgggtacccgattaaatttcagcaccgcataccacccgcagacagatgggcagaccgagcgtctaaatcagatcctagaagatatgcttcgcgcatgtgtcctagatttcgggaagacctgggataagagtctcccctatgccgagttctcctacaataacagttatcaagccagcatacaaatggcaccttatgaagcgttgtacgggcgcaaatgccggacaccgctattgtgggaccaagttggagaaagccaagtgttcgggactgatatcctgagagaagctgaagctaaagtcagaatcattcgggataatctaaaggtggcacagtcccggcagaaaagttatgcagataaccgtcgccgtgacctggaattcgcagtggatgattttgtgtatcttcgggtcacgccattgcgaggtgtacacaggtttcagacgaaagagaagctcgcacctcggtatgtgggtcctttccgtatcgttgctcgacgcggagaagtcgcttaccagttggagctgcccgcctccttgggcaacgtgcatgatgtgttccatgtgtcgcaactcaagaaatgcctccgagttccatccgagcaggccgactcagagcaaattgaagttcgcgaagatttgacctacgtggagaggccagtgaaaatcctggacaccatggagcgcaggaccaggaaccgggtaatccgtttttgcaaggtccagtggagcaaccacgccgaagaagaagctacttgggagcgtgaagacgagctgaaggcagcccatcccgatctcttcgccagttcttccgaatctcggggtcgagattccgtttaa

SEQ ID NO: 14232 - DNA, 1218 bp, Oryza sativa
  Clone ID: TFbOSC405314j.C1.o2.fg
atgatgaccgctttcctccaccacctccaaaatccgccacaacagaatgctccaccaccacctccccaacactctaaactcgccgagttcctccgcatccgcccacctaccttctccagctccaacaaccccgtggatgctttggattggttgcatgccgtggggaagaagttagacacggtgcagtgcagcgatgaggagaaagtcgtcttcgccgcccaccagctgcggggacccgcatctctatggtgggaccatttccaggctacgcagccaggggagcaacctattacttgggctcgcttcaccgccgctttccggagaacccatgtgcccgctggagtcgtggctcttaagaaaagggaattccgagagttgaagcaaggcaaccgctccgtgatggagtatttgcacgagttcaacaacttggcccgttacgccccagaggatgtgcgggaagatgaggagaagcaagagaagttcctggcaggaatggaccccgagctgtccgtccgcctagtctctggggactatccggattttcaacgattggtggacaagagcatccgcttggaagccaagcacaaggagctggaatcgcacaagcgccgcttggcgaatttccgcaatcaacagggtgctaaccagagggttcgctacaccaatccctatccagggggatcctcctcgcagcagcaacaacagcagcagcaacctcgctccgcgcctcgacctcaattcgtggtgcgcgtcccacagccgcagcagcagcagaatcagcaagggactcgtgcgccccgtcctcttacgccaacggtgcagcctggtcaaggccgcagggacgcttcaggtccgcagcgtctgtgcttcaactgcttcgagcccgggcactttgcggataaatgcccaaagccaaggcgtcagcaaggccaagcgcctccccgctccaacaacggcgggaaggatgtcattcggggtcgtgtgaatcacgtgacggccgaggacgtgctgacaactccggacgtcatcgttgagaagaaagacaagacgaagaggatgtgcgtcgactacagagctctcaatgaagtcaccatcaagaacaagtaccctcttccccggatcgatgatctgttcgaccaactcaaaggaagaccatcaacaccatctccgtctggtgttgggaaagttgcgggaacatcaattgtatgccaagcttag

SEQ ID NO: 14233 - DNA, 2130 bp, Oryza sativa
  Clone ID: TFbOSC405532j.C1.o2.fg
atgtcatggcacagggccggtgtcctgctgctaggggctcagtcctgcctgcctgtcccgggggttccggccatggccggcagcgtcacccgtcgcggtttggacatgactggtttcgtcttggagctgcggggcatgtgcgttgtcctggggtatccacatggagtggactaccagggcaggccgcttccggagcaggagggtgacgatggagagccccacgctgcttgggaggtcactgcagtgatcctcgctggctctcccgagcggacttcgctggcagtcaccgcgggtggagattctttccccgccgctagccagagcgccgctctcctcgccatcggcactcttcaccagcgctacccggacgagttgcagcactcgccctaccgctaccaccctcgccgcggaggagcccgcgactacgccaccttccgggatgctagctcggaggatgacgctaccatcgtgcacctggcgcgcatggtggaggcgtacgacgcggctcgtatcgacttccatcagatggtgcgccgtgggatggtcgagaacaacttgaagatcctggagctgcgtcaggagaacctgcagctcaagaaggacctagacgcggtggaggcgcagctgcatcagctcaagatcgcccagggagaggtctgccgccccaagcgtcgccgcgtctgccgcagccagaagatcaccgcccgcaagagcacctccaggcccgagcttgttcgtcagtccctggcgtggacttgcttcgtcgagacccctcgtgccgagcctgcgcccgtggttccccaggagggggaagcctccggcgttggtagcacggaggatgcgctgttgctcaccttccgtcctggcccgtcgcagcggaggagtgctaacaccggtgatggcaaccagcctgaaggaagcaaccaccaccaccagggcagcccacctccacctcctcctccgcctccaccaccaccaccagataccaacgccattctcacccaaatcctcgcccagcaggccaacatgatgactgctttcctccaccacctccaaaatccgccacaacataatgctccaccaccacccccacaacactctaaactcgccgagttcctccgcatccgcccacctaccttctctagctccaataaccccgtggatgcgttggattggttgcatgccgtggggaaaaagctagacactgtgcagtgcagcgatgaggagaaagtcatcttcgccgcccaccagctgcaggggcccgcatctctatggtgggaccatttccaggctacgcagccagaggggcaacctattacatgggcccgtttcaccgccgctttccggagaacccatgtgcccgccggagtcgtggcccttaagaaaagggaattccgagagttgaagcaaggcaaccgctccgtgatggagtatttgcatgagttcaacaacctggcccgttacgccccggaggatgtgcgggaagatgaggagaagcaagagaagttcttggcaggaatggaccctgagctgtccgtccgtctagtctccggggactatccggatttccaacgtctggtggacaaaagcatccgcttggaagccaagcacaaggaactggagtcgcacaagcgccgcttggcgaatttccgcaatcaacagggtgctaaccaaaggatccgctacaccaatccctatccagggggatcttcctcgcagcagcaacaacagcagcagcaacctcgcttcgcgcctcgacctcaattcgtggtgcgcgtcccacagccgcagcagcagcagaatcaacaagggactcgtgcgccccgtcctcctacgccaactgtgcaacctggtcaaggccgcagggacgctcaaggtccgcaacgtctgtgcttcaactgcttcgagcccgggcactttgcggataaatgcccaaagctgaggcgtcagcaaggccaagcgccttcccgctccaacaacggtgagaaggatgtcatttggggtcgggtgaaccacgtgacagccgaggacgtgctgacaactccagacgtcatcgtcgggagttcggagacgtgtttccggaagaactacccggtatgccgcccaaacgagagattgagttccggatag

SEQ ID NO: 14234 - DNA, 5430 bp, Oryza sativa
  Clone ID: TFbOSC405754j.C1.o5.fg
atggatgaagtcgggggtcgatggacattctccagggcaaatgaaggctacacgagctgcggcccgatggccggcagcgtcacccgtcgtggtttggacatgactggcttcgtcttggagctgcggggcatgtgcgtggtcttggggtatccacatggagtggattaccaggccaggccgctcccggagcaggagggtgaggatgcagagcctcacgctggttgggaggtcactgcagtgatcctctccggctctcccgagcggacttcgctggcagtcaccgcgggtggggattccttccccgccgcttgccagaacgccgctctcctcgccatcggcacccttcaccagcgctacccggacgagttgcagcactcgccctaccgctaccaccctcgtcgcggaggagcccgcgactacgccaccttccgagacgccagctcggaggatgacgctaccgtcgtgcatctggcacgcatggtggaggcgtacgacgcggctcgtatcgacttccaccagatggtgcgccgtggcatggtcgagaacaacctgaagatcttggagctgcgtcaggagaatctgcagctcaagaaggacctcgacgcgttggaggcgcagctgcatcagctcaagatcgcccagggagaggacagccgccccaagcgtcgccgcgtctgtcgcagccagaagatcaccgcccgcaagagcacctccaggcccgagcttgttcgtcagtccctggcgtggacctgcttcgtcgagacccctcgtgccgagcctgcgcccgtggttccccaggagggggaagcctccggcgttggtagctcggagggtgcgctgttgctcaccttccgtcctggcccgtcgcagcgctctccttctctgtttgctggttctgtgtggggttttcagatggtgacgaccaggagaaatgttaacaccggtgaaggcaaccaacccgaaggcagcaaccccaaccaccaaggcaatccacctccacctccacctccgcctccaccaccaccaccagacaccaacgccattctcacccaaatcctcgcccaacaagccaacatgatgaatgctttcctccaccacctccaaaacccgccacaacagaatgctccaccaccccctccccaacactccaaactcgccgaattcctccgtatccgcccacccaccttctctagctccaacaatcccgtggatgcgttggactggttgcatgccgtggggaagaagctagacacggtgcagtgcagtgatgaggagaaagtcgtcttcgccgcccatcagctgcagggacccgcatctctatggtgggaccatttccaggctgcgcagccagaggggcagccgattacttgggctcgcttcaccgccgctttccggagaacccatgtgcccgctggagtcgtggctcttaagaaaagggaattccgggagttgaagcaaggcaaccgctccgtgatggagtatttgcatgagttcaacaatctagcccgttatgccccggaggatgtgcgggaagatgaggagaagcaggagaagttcttggcgggaatggaccctgagctgtccgtccgtctagtctctggggactatcctgattttcaacgactggtggacaagagcatccgcttggaagccaagcacaaggagctggaatcgcacaagcgccgcttggcgaatttccgcagtcagcagggtgctaaccagagggtccgctacaccaatccctatccagggggatcctcctcgcagcagcagcagcagcagcaacctcgcccagcgcctcgacctcaattcgtggtgcgcgtcccacagccgcagcagcaacagaatcagcaagggactcgtgcgccccgtcctcctacgccagctgtgcagcctggtcaaggccgcagggacgctcaaggtcagcagcgtctgtgcttcaactgcttcgagcccgggcactttgcggataaatgcccgaagccaaggcgtcagcaaggccaagcgcctccccgctccaacaacggcgggaaggatgtcattcggggccgtgtgaatcatgtgacggccgaggacgtgctgacaactccagacgtcatcgttggtacgttcctcgttcattccatccctgctaccattttgttcgactctggagcttcccactcgtttatatctgtgccattcgtggggagaaatcagttgggggtagaaaggcttagaaaccctctgctcatcaccacccctggcggggttatgacagcaaagtattatagccctgccgtccctatagaaattcaggggattccttttccctcggatctgattcttctagacaccaagaatttggatgtgatccttgggatggattggttggctcaattccaaggagtagtggattgcgcgaggcgcactgtcactctgtaccgagggccagaacaaccggttgttttctttgcacctccaacctctgtcagaagttcagaacttcatcagataggtctgtcagaaatccccatcgtcagagagttcggagacgtgtttccggaagaactacctggtatgccgcccaagcgagagattgagttccggatagatcttgttccaggaaccactcctctgcacaagcgaccctaccgtatggcagcaaatgaactggccgaagttaagaaacagttggaagagttgaaagaaaaggggtatatacgtccgagtacttccccatggggtgctcctgtgattttcgtagagaagaaagacaagacgaagaggatgtgcgtcgactacagagctctcaatgaagtcaccatcaaaaacaagtaccctcttccccggatcgatgatctgttcgatcagcttaaaggtgccactgtattctccaagattgatcttcgttccggatatcaccaattacgtattcgtgaagaagatattccgaagaccgcattcactacgcgatatggactgtatgaattcacggtgatgtcgttcggcttaaccaatgctcctgccttcttcatgaacttaatgaacaaagtgttcatggaatacttggataagttcgttgtggttttcatcgatgacattctgatatactcacaatcagaggaagaccatcagcaccatctccgtctggtgttgggaaagttgcgggaacatcaattgtatgccaagcttagcaagtgtgagttctggttgtccgaagtcaaattcttggggcacgtgatatctgctaaaggagttgctgtggaccccgaaacagtgaccgccgtcaccgattggaagcaacccaagacagtcactcagattcgcagtttcttaggtttggcaggatattaccggagattcattgagaacttctccaaaatcgctcgacccatgacacagttgttgaagaaagaagagaaatttgtgtggagcccgcaatgcgagaaggcgtttcaaactctcaaagaaaagctggtttcctcgccagtattaatcttgccggatactcgcaaggatttcatggtgtattgtgatgcttcgcgccaaggattggggtgcgtgctcatgcaggacggtcatgtggtagcctatgcctcacgtcagctacgacctcatgaaggcaactaccctacacatgacttggagttagccgcagtagttcatgctctaaaaatctggcggcactatctcattgggaatcgctgcgaaatatatactgatcataagagtttgaaatacatcttcactcagtcggacctgaatcttcggcaaaggagatggttagaactcatcaaggattatgatgtgggaattcactatcatcctggtaaggctaacgtggttgccgacgctctaagtcgaaaaggccattgcaacgctctcaacgtccgtagcattccgcccgagcttaatcaacagatggaagccctgaacctaagcatagttggtcgcggattcttggctgcgttggaagccaagcccaccttgctcgatcaaatccgcgaggctcagaagaatgatccggacatgcatggactcctcaagaatatgaaacaaggtaaagccgcaggtttcacagaggatgaacacggaaccttatggaacggaaagcgggtatgcgttccagatagcagagaacttaaacagctgatacttcaggaagctcacgaaagtccttattccattcacccgggcagtaccaagatgtacttagacttgaaggagaaatactggtgggtcagcatgaagcgggaaattgcagagtttgtggctctatgtgatgtgtgccagcgtgtcaaggcagaacaccagcgaccggccggacttctccaacctctccaagtgccggagtggaaatgggatgaaattgggatggatttcatcaccggacttccaaaaacccaaggtgggtatgattctatatgggtaatagtggatcgattaaccaaggtagctcgattcattcctgtgaagaccacctatggagggaataaactagcggagctctacttcgctaggatcgtgagtctccatggcgttcccaagaaaatcgtatctgataggggaagccaattcacctctcacttttggaagaagctccaagaagagcttggtacccgactaaatttcagcaccgcatatcacccgcagacagatggacagaccgaacgtctaaatcagatcctagaagatatgctccgcgcatgtgtcctagatttcgggaagacctgggataagagtctcccctatgccgagttctcctacaataacagctatcaagccagcatacaaatggcaccatatgaagcgttgtacgggcgcaaatgccggacaccactattgtgggaccaagttggggaaagccaagtgttcgggactgatatcctgagagaagctgaagctaaagtcagaatcattcgggataatctaaaggtggcacagtctcggcagaaaagttatgcagataaccgtcgccgtgatctggaattcgcagtggatgactttgtgtatcttcgggtcacgccattgcgaggggtgcacaggtttcggacaaaagggaagctcgcacctcggtatgtgggtccctttcgtatcactgctcgacgcggagaagtcgcctaccagctggagttgcccgcctccttgggcaacgtgcatgatgtgttccatgtgtcgcaactcaagaaatgtcttcgagtgccatccgagcaggccgactcagagcaaattgaagttcgcgaagacttgacctacgtggagaggccagtaaaaatcctggacgccatggagcgcagaaccaggaaccgggtaatccgtttttgcaaggtccagtggagcaaccacgccgaagaagaagctacttgggagcgcgaagacgagctgaaggcagcccatcccgatctcttcgccagttcttccgaatctcggggtcgagattccgtttaa

SEQ ID NO: 14235 - DNA, 5274 bp, Oryza sativa
  Clone ID: TFbOSC408104j.C1.o1.fg
atggatgaagtcgggggtcgatggacattctccagggcaaatgaaggctacacgagctgcggcccgatggccggcagcgtcacccgtcgtggtttggacatgattggcttcgtcttggagctgcggggcatgtgcgtggtcttggggtatccacatggagtggattaccaggccaggccgctcccggagcaggagggtgaggatgcagagcctcacgctggttgggaggtcactgtagtgatcctctccggctctcccgagcggacttcgctggcagtcaccgcgggcggagactccttccccgccgcttgccagaacgccgctctcctcgccatcggcacccttcaccagcgctacccggacgagttgcagcactcgccctaccgctaccaccctcgtcgcggaggagcccgcgacttcgccaccttccgagatgctagctcggaggatgacgccaccgtcgtgcatctggcacgcatggtggaggcatacgacgcagctcgtattgacttccatcagatggtgcgtcgtggcatggtggagaacaacatgaagatcctggagctgcggcaggagaacctgcagctcaagaaggacctcgacgcgttggaggcgcagctgcatcagctcaagatcgcccagggagaggacagccgtcccaagcgtcgccgcgtctgccgcagccagaagatcaccgcccgcaagagcacctccaggcccgagcttgttcgtcagtccctggcgtggacctgcttcgtcgagacccctcgtgccgagcctgcgcccgtggttccccaggagggggaagcctccggcgttggtagctcggaggctccttctctgtttgctggttctgtgtggggttttcagatggtgacgaccaggagaaatgttaacaccggtgaaggcaaccaacccgagggcagcaaccccaacccccaaggcaacccacctccaccaccaccaccagacaccaacgccattctcacccaaatcctcgcccaacaagccaacatgatgaatgctttcctccaccacctccagaatccacctcaacagaatgctccaccaccccctccccaacactctaaactcgccgagttcctccgcatccgcccacctaccttttctagctccaacaaccccgtggatgcgttggattggttgcatgccgtggggaaaaagctagacacggtgcagtgcagcgatgaggagaaagtcgtcttcgccgcccatcagctgcagggacccgcatctctctggtgggaccacttccaggctacgcagccagagggacaaccgattacttgggctcgcttcaccgccgctttccggagaacccatgtgcccgccggagtcgtggctctcaagaagagggaattccgagagttgaagcaaggcaaccgctccgtgatggagtatttgcacgagttcaacaatctggcccggtacgcccctgaggatgtgcgggaagatgaggagaagcaagagaagttcttggcaggaatggaccctgagctgtccgtccgtctagtctctggggactatcctgattttcaacgactggtggacaagagcatccgcttggaagccaagcacaaggagctggaatcgcacaagcgccgcttggcgaatttccgcaatcaacagggtgctaaccagagggttcgctacaccaatccctacccagggggatcctcctcgcagcaacagcagcagcaaccccgcccagcgccccgacctcaattcgtggtgcgcgtcccacagccgcagcagcaacagaatcaacaagggactcgtgcgccccgtcctcctacgccagctgggcagcccgttcaaggccgcagggacgcttcaggtccgcagcgtctgtgcttcaactgcttcgagcccgggcactttgcggacaaatgcccgaagccaaggcgtcagcaaggccaagcgcctccccgccccaacaacggtggccagggcgtcatccgtggtcgtgtgaatcacgtgacggccgaggacgtgctgacaactcccgacgtcatcgttggtacgttcctcgttcattccatccctgctacaattttgttcgactctggagcttcccactcgtttatatctgtgccattcgtggggagaaatcagttgggggtagaaaggcttagaaaccctctgctcatcaccacccctggaggggttatgacagcaaagtattatagccctgccgtccctatagaaattcaggggattccttttccctcggatctgattctgctagataccaagaacttggatgtgatccttgggatgaattggttggcccaattccaaggggtagtggattgcgcgaggcgcactgtcactctgtaccgaggaccagaacaaccggttgttttctttgcacccccaacctctgtcagaagttcagaacttcatcagatagaactgtcagaaatccccgtagtcagagagttcggagacgtgtttccggaagaactacctggtatgccgcccaagcgagagattgagttccggatagatcttgctccaggaaccactcctctgtacaagcgaccctaccgtatggcagcaaatgaactggccgaagttaagaaacagttggaagagttgaaagaaaaggggtatatacgtccgagtacttccccatggggtgctcctgtgatttttgtggagaagaaagacaaaacgaagaggatgtgcgttgactacagagctctcaatgaagtcaccatcaaaaacaagtaccctcttccccggatcgatgatctgttcgatcaactcaaaggtgccactgtattctccaagattgatctccgttccggatatcaccaattacgtattcgtgaagaagatattccgaagaccgcattcaccacgcgatacgggctgtatgaattcacggtgatgtcgttcggcttaaccaatgctcctgccttcttcatgaacttgatgaacaaagtgttcatggaatacttggataagttcgttgtggttttcattgatgacattctgatatactcccaatcagaggaagaccatcagcaccatctccgtcaggtgttgggaaagttgcgggaacatcaattgtatgccaagcttagcaagtgtgagttctggttgtccgaagtcaaattcttagggcacgtgatatcttcaaaaggagttgctgtggatcccgaaacagtgaccgccgtcaccgattggaagcaacccaagacagttactcaagtccgcagtttcttaggtttggcaggatactatcggagattcatcgagaacttctccaagatcgcccgacccatgacacagttgttgaagaaagaagagaaatttgtgtggagcccgcaatgcgagaaggcgttccaaactctcaaagaaaagctggtttcctcgccagtgttaatcttgccggatactcgcaaggatttcatggtgtattgtgatgcttcgcgccaaggattggggtgcgtgctcatgcaggacggtcatgtggtagcctatgcctcacgccagctacgtcctcatgaaggcaactaccctacgcatgacttggaattagccgcagtggttcatgctctaaaaatctggcggcactatctcattgggaatcgctgtgaaatctatactgatcacaagagcttgaaatacatcttcacccagtcggatctgaatcttcggcaaaggagatggttagaactcatcaaggattatgatgtgggaatacactatcatcctggtaaggctaacgtggttgccgacgctctaagtcggaagagccattgcaatactctcaacgtccgaggcattccacccgagcttaatcaacagatggaagccctgaacctaaacatagttggtcgtggatgtttggccgcgttggaagccaagcccaccttgctcgatcaaatccgcgaggctcagaagaatgatccggacatgcatggactcctcaagaatatgaaacagggtaaagccgctggtttcacagaggatgaacacggaaccttatggaacggaaagcgggtatgcgttccagatagcagagaacttaaacagctgatacttcaggaagctcacgaaagtccttattccattcacccgggcagtaccaagatgtacttagacttgaaggagaaatactggtgggtcagcatgaagcgggaaattgcagagtttgtggctctatgtgatgtgtgccagcgtgtcaaggcagagcaccagcgaccggctggacttctccagcctctccaagtgccggaatggaaatgggatgaaattgggatggatttcatccccggccttccaaaaacccaaggtggatatgattctatatgggtaatagtggatcgattaaccaaggtagctcgattcattcctgtgaagaccacctatggagggaataaactagcggagctctacttcgctagggtcgtgagtctccatggcgttcccaagaaaatcgtatctgataggggaagccaattcacctctcacttttggaagaagctccaagaagagcttggtacccgactaaatttcagcaccgcgtatcacccgcagacagatggacagaccgagcgtctaaatcagatcttagaagatatgcttcgcgcatgtgtcctggacttcgggaagacttgggataagagtctcccctatgccgagttctcctacaataacagttatcaagccagcatacaaatggcaccttatgaagcgctgtatgggcgcaaatgccggacaccactcttgtgggaccaagctggagaaagccaagtgttcgggactgatatcctgagagaagctgaagctaaagtcagaatcattcgggataatctaaaggtggcacagtctcggcagaaaagttatgcagataaccgtcgccgtgatctggaattcgcagtggatgactttgtgtatcttcgggtcacgccattgcgaggtgtgcacaggtttcagacaaaagggaagctcgcgcctcggtatgtgggtcccttccgtatcatcgctcgacgcggagaagtcgcctaccagctggagttgcccgcctccttgggcaacgtgcatgatgtgttccatgtgtcgcaactcaagaaatgccttcgagtgccatccgagcaggccgactcagagcaaattgaagttcgcgaagatttaacgtatgtggagaagccagtgaaaatcctggacaccatggagcgcaggaccaggaaccgggtaatccgtttttgcaaggtccagtggagcaaccacgccgaataa

SEQ ID NO: 14236 - DNA, 2683 bp, Oryza sativa
  Clone ID: TFbOSC408351j.C1.o6.fg
tcaagtccagaccacgacggttgatgctgccggccatctacaaacaaaaacaaaagagaaaagcaacattttaaagcctggtcaaggccgcagagacgttcaaggtcagcagcgtctgtgcttcaactgcttcgagcccgggcactttgcggataaatgcccaaagccgaggcgccagcaaggccaagcgcctccccgccccaacaacggtggtaaggatgtcattcggggtcgtgtgaaccacgtgactgccgaggatgtgctgacaactccagacgtcatcgttggagtagtggattgcgcaagacgcactgtcactctgtaccgagggccggaacaaccggttgttttctttgcacccccaacctctgtcggcagttcagaacttcatcagataggactgtcagaaatccccatcgtcagtgagttcggagatgtgtttccggaagaactacccggtatgccgcccaagcgagagattgagttctggatagatcttgctccaggaaccactcctctgtacaagcgaccctaccgtatggcagcaaatgaactggccgaagtcaagaaacagttggaagagttaaaagaaaaggggtacatatggccgagcacttccccctggggtgctcctgtgatttttgtggagaagaaagacaagacaaagaggatgtgcgttgactacagagctctcaatgaagttactatcaaaaaacaacttaaaggtgccacggtattctccaagattgatcttcgctccggatatcaccaattgcgtatccgtgaagaagatatcccgaagaccgtattcaccacgcgttatggactgtatgaattcacggtgatgtcgttcgggctaaccaatgctcctgccttcttcatgaacttaatgaacaaagtgttcatggtatacttggataagtttgttgtggttttcattgacgacattctggtgtactcacaatcagaggaagaccatcagcaacatctccgtctggtgttgggaaagttgcgggaacatcaattgtatgccaagcttagcaagtgtgagttctggttgtccaaagtcaaattcttagggcacgtgatatctgctaaaggagttgctgtggaccccgaaacagtgaccgccgtcacagattggaagcaacccaagacagttacccaggttcgcaactttttgggtttggcaggatactaccggaggttcatcgagaacttctccaaaatcgctcgacccatgacacagttgttgaagaaagaagaaaaatttgtgtggagcccgcaatgcgagaaggcgttccaaactttcaaggaaaagctggtttccccgccagttttaatcttaccggatactcgcaaggacttcatggtgtactgtgatgcttcgcgccaaggattggggtgcgtgcttatgcaggaaggtcatgtggtagcctatgcctcatgtcagctatggcctcatgaaggcaactaccctacccatgatttggagttggccgctgtgggtaaagccgctggtttcacagaagatgaacacggaaccctatggaacggaaatcgggtatgcgttccgaacgacaaggaacttaaacagttgatacttcaggaagctcacgaaagtccctattccatccaccctggcagtacgaagatgtgcttagacttgaaagaaaaatattggtgggttagtataaagcgggaaattgcagagttcgtggccctttgtgatgtgtgccagcgtgtcaaggcagagcaccaacgaccggccggacttctccaacctctacaggtaccagaatggaaatgggttgaaattgggatgaatttcatcaccggacttccaaaaacccaaggctgttatgactctatatgggtagtcgtggaccgactaaccaaggtagctcggttcattcccgtgaagaccacctatggagggaacaaactagctgaactctacttcgctaggatcgtgagtctccatggcgttcctaagaaaattgtatctgataggggaagccaattcacctctcatttctggaagaagctccaagaagagttggattttgggaagacatgggataagagtctcccctacgccgagttctcctacaataacagctaccaagccagcatacagatggcacagtacgaagcgttgtatggccgcaaatgccggacaccactattgtgggaccaagtcggggaaagccaagtgttcgggaccgacatcttgagagaagctgaagcgaaggtcaggaccattcgggagaatctaaaggtagcccagtctcggcagaagagttatgcagacaaccgacgccgtgacctggaattcgcagtggatgactttgtgtttctccgggtcacgccgttgcgaggcgtacactggtttcagacgaaagggaagctcgcacctcggtttgtgggtcctttccgtatcattgctcgacgcggagaagtcgcttaccagttagagctgcccgcctccttgggcaacgtgcatgatgtgttccatgtgtcgcaactcaagaaatgccttcgagtgccgtccgagcaggccgactcagagaagattgaagttcgcgaagacttgacctacgtggagagaccagtgaaaatcctggacaccatggagcgcaggaccaggaaccaggtaatccgtttttgcaaggtccaatga

SEQ ID NO: 14237 - DNA, 4617 bp, Oryza sativa
  Clone ID: TFbOSC408405j.C1.o4.fg
atgtcatggcacagggccggtgtcctgctgctaggggttcagtcctgcctgcctgtcccgggggttccggccgtaggtgggattgggtcggtactcttgtctatggctaggatgggttggaaactatgtcacgtctttcgtctgtataccgtggtgatgttgacgaccaggagaagtgctgctaccggtgatggcaaccaacccgaaggcagcaaccaccaccaccagggcagcccacctccacctcctcctccgcctccaccaccaccaccagacaccaacgccattctcacccaaatcctcgcccagcaggccaacatgatgactgctttcctccaccacctccaaaattcgccacaacataatgctccaccaccacctccccaacactctaaactcgccgagttcctccgcatccgcccacctaccttctctagctccaacaaccccgtggatgcgttggattggttgcatgccgtggggaaaaagctagacactgtgcagtgcagcgatgaggagaaagctacgcagccagaggggcaacctattacttgggctcgcttcaccgccgctttccggagaacccatgtgcccgccggagtcatggcccttaagaaaagggaattccgagagttgaagcaaggcaaccgctccgtgatggagtatttgcatgagttcaacaacctggcccgttacgccccggaggatgtgcgggaagatgaggagaagcaagagaagttcttggcaggaatggaccctgagctgtccgtccgtctagtctccggggactatccggatttccaacgtctggtggacaagagcatccgcttggaagccaagcacaaggaactggagtcgcacaagcgccgcttggcgaatttccgcaatcaacagggtgctaaccaaagggtccgctacaccaatccctatccagggggatcctcctcgcagcagcaacaacagcagcagcaacctcgctccgcgcctcgacctcaattcgtggtgcgcgtcccacagccgcagcagcagcagaatcaacaagggactcgtgcgccccgtcctcctacgccaactgtgcagcctggtcaaggccgcagggacgctcaaggtccgcagcgtctgtgcttcaactgcttcgagcccgggcactttgcggataaatgcccaaagccgaggcgtcagcaaggccaagcgcctccccgctccaacaacggtgggaaggatgtcattcggggtcgggtgaaccacgtgacggccgaggacgtgctgacaactccagacgtcatcgttggtacgttcctcattcattccatccctgctaccattctgttcgactctggagcttcccactcgtttatatctgtgccattcgtggggagaaatcagttgggggtagaaaggcttaggaaccctctgctcatcaccacccctggaggggttatgacagcaaagtattatagccctgccgtccccatagaaattcaggggattccttttccctcggatctgattctgctagacaccaagaacttggatgtgatccttgggatgaattggttggctcaattccaaggagtagtggattgtgcgagacgcactgtcactctgtaccgagggccggaacaaccggttgttttctttgcacccccaacctctgtcagtagttccgaacttcatcagataggactgtcagaaatccccattgtcagagagttcggagacgtgtttccggaagaactacccggtatgccgcccaaacgacagattgagttccggatagatcttgctccaggaaccacacctctgtacaagcgaccctaccgtatggcagcaaatgaactggctgaagttaagaaacagttggaagagttgaaagaaaaggggtatatacgtccgagtacttccccctggggtgctcctgtgatttttgtggagaagaaagacaagacgaagaggatgtgcgttgactacagagctctcaatgaagtcaccatcaaaaacaagtaccctcttccccggatcgatgatctgttcgatcagcttaaaggtgccactgtattctccaagatcgatcttcgttccggatatcaccaattacgtattcgtgatgaagatattccgaagaccgcattcaccacgcgatacggactgtatgaattcacggtgatgtcgttcggtttaaccaatgcacctgcctttttcatgaacttaatgaacaaagtgttcatggaatacttggataagtttgttgtggttttcattgatgacattctggtatactcacaatcagaggaagaccatcagcaccatctccgtctggtattgggaaagttgcgggaacatcaattgtatgccaaacttagcaagtgtgagttctggttgtccgaagtcaaattcttagggcacgtgatatctgctaaaggagttgctgtggaccccgaaacagtgaccgccgtcattgattggaaacaacccaagatagtcactcaagtccgcagtttcttaggtttggcaggatactaccggaggttcatcgagaacttctccaaaatcgctcgacccatgacacagttgttgaagaaagaagagaaatttgtgtggagcccgcaatgcgagaaggcgttcaaaactctcaaagaatggctggtttcctcgccagtgttaatcttgccggatactcgcaaggacttcatggtgtattgtgacgcttcgcgccaaggattggggtgcgtgctcatgcaggatggtcatgtggtggcctatgcctcacgccagctacggcctcatgaaggcaactaccctacccatgatttggagttagctgcggtggttcatgctctaaaaatctggcggcactatctcattgggaatcgctgtgaaatatatactgatcataagagtttgaaatacatcttcactcagtcggacctgaatcttcggcaaaggagatggttagaactcatcaaggattacgatgtgggaattcactatcatcctggtaaggccaacgtggtcgctgacgccctaagtcgaaagagccattgcaacactcttaacgtccgcggcattccacccgaacttaatcaacagatggaagccctgaacctaagcatagttggtcgcggattcttggctgcgttggaagccaagcctaccttgctcgatcgaatccgcgaggctcagaagaacgatccggacatgcatggactcctcaagaatatgaaacagggtaaagccgctggtttcacagaggatgaacacggaaccctatggaacggaaatcgagtatgcgttccagataacagagaacttaaacagctgatacttcaggaagcccacgaaagtccttattccatccaccctggcagtacgaagatgtacttagacttgaaggagaaatactggtgggttagtatgaagcgggaaattgcagagttcgtggccctttgtgatgtgtgccagcgtgtcaaggcagagcaccaacgaccggccggacttctccaacctctccaagtacctgaatggaaatgggatgaaattgggatggattttatcaccggacttccaaagacccaaggtggatatgattctatatgggtagtggtggatcgattaaccaaggtagctcgattcattcctgtgaagaccacctatggagggaacaaactagccgagctctacttcgcaaggatcgtgagtctccatggcgttcccaagaaaatcgtatctgataggggaagccaattcacctctcacttttggaagaagctccaagaagagctgggtacccgattaaacttcagcaccgcataccacccgcagacagatgggcagaccgagcgtctaaatcagatcctagaagatatgcttcgcgcatgtgtcctggatttcgggaagacctgggataagagtctcccctatgccgagttctcctacaataacagctatcaagccagcatacaaatggcaccttatgaagcgttgtatgggcgcaaatgccggacaccgctcttgtgggatcaagttggggaaagccaagtattcgggactgatatcctgagagaagctgaagctaaagtcagaaccattcgggataatctaaaggtggcacagtcccggcagaaaagttatgcagataaccgtcgccgtaacctggaattcgcagtggacgattttgtgtaccttcgggtcacgccattgcggggtgtacacaggtttcagacaaaagggaagctcgcacctcggtatgtgggtcctttccgtatcgttgcccgacgcggagaagtcgcttaccaattggacctgcccgcctccttgggcaacgtgcatgatgtgttccatgtgtcgcaactcaagaaatgccttcgagtgccatctgcgcaggccgactcagagcaaattgaagttcgcgaagacttgacctacgtggagaggccagtgaaaatcctggacaccatggagcgcaggaccaggaaccgggtaatccgtttttgcaaggtccagtggagcaaccacgccgaagaagaagctacctgggagcgtgaagacgagctgaaggcagcccatcctgatctcttcgccagttcttccgaatctcggggtcgagattccgtttaa

SEQ ID NO: 14238 - DNA, 5142 bp, Oryza sativa
  Clone ID: TFbOSC409045j.C1.o3.fg
atgtcgtggcacagggccggtgtcctgctgctaggggctcagtcctgcctgcctgtcccgggggttccggccgtaggtgggattgggtcggtactcttgtctatggctaggatgggttggaaactatgtcatgtcttccgtccgtataccatggtgatggccggcagcgttagtcgtcgtggtctggacatgactggtttcgtcttggagctgcggggtatgtgcgttgtcctggggtatccgcatggagtggactaccagggcaggccgctcccggagcaggagggtgacgatgcagagccccacgctgcttgggagcgctacccggacgagctgcagcactcgccctaccgctaccaccctcgtcgcggaggagcccgcgactacgccaccttctgggatgctagctcagaggatgacgctaccatcatgcacctggcgcgcatggtggaggcgtacgacgcggctcgtatcgacttccatcagatggtgcgccgtgggatggtcgagaacgacctgaagatcctggagctgcgtcaggagaatctgcagctgaagaaggacctagacgcagtggaggcacagctgcatcagctcaagatcacccagggagaggtctgtcgccccaagcgtcgccgcgtctgccgcagccagaagatcaccgcccgcaagagcacctccaggcccgagcttgttcgtcagtccctggcgtggacttgcttcgtggagacccctcgtgccgagcccgcgcccgtggttcctcaggagggggaagcctccggcgtcggtagcacggaggatgcgctgttgctcaccttccgtcctggcccgtcgcagtggagaaatgctgccaccagtgatggcaaccaacctgaaggcagcaaccacaacaaccatggcagcccacctccacctcctccaccgcctccaccaccaccaccagacaccaacgccattctcacccaaatcctcgcccagcaggccaacatgatggctgctttcctccaccacatccaaaatccgccacaacataatgctccaccaccacccccacaacactctaaactcgccgagttcctacgcatccgtccacctaccttctctagctccaacaaccccgtggatgcgttggattggttgcatgccgtggggaaaaagctagacactgtgcagtgcagcgatgaggagaaagtcgtcttcgccgcccaccaactgcagggacccgcatctctatggtgggatcatttccaggctacgcagccagaggggcagcctattacttgggcccgcttcaccgccgccttccggaggacccatgtgcccgccggagtcatggcccttaagaaaagggagttccgagagttgaagcaaggcaaccgctccgtgatggagtatttgcatgagtttaacaacttggcccggtacgccccggaggatgtgcgggaagatgaggagaagcaagagaagttcttggcaggaatggacccggagctgtctgtccgtctagtctccggtgactatccggatttccaacgtctggtggaaaagagcatccgcttggaagccaagcacaaggaactggagtcgcacaagcgtcgcttggcgaatttccgcaaccaacagggtgctaaccaaaggatccgctacaccaatccctatccagggggatcttcctcgcagcagcagcaacctcgctccgcgcctcgacctcaattcgtggtgcgcgtcccacagccgcagcaacagcagagccagcaagggacccgtgcgccccgtcctcctacgccagccgcgcagtctggacaaggccgcagggacgttcaaggtccgcagcgtctgtgcttcaactgcttcgagcccgggcactttgcggataaatgcccgaagccgaggcgccagcaaggccaagcgcctccccgctccaacaacggtggtaaggatgtcattcggggtcgtgtgaaccacgtgacggccgaggacgtgctgacaactccagacgtcatcgttggtacgttcctcatccattccatccctgctaccattttgttcgactctggagcttcccacttgtttatatctgtgccattcgtggggagaaatcagttgggggtagaaaggcttaggaaccctctactcatcaccacccctggaggggttatgacagcaaagtattatagtcctgccgtccctatagaaattcaggggattccttttccctcggatctgattcttctagacaccaagaacttggatgtgatccttgggatgaattggttggctcaattccaaggagtagtggattgtgcaagacgcactgtcactctgtaccgagggccggaacaaccggttgttttctttgcacccccaacctctgtcagtagttcagaacttcatcagataggactgtcagaaatccccattgtcagagagttcggagacgtgtttccggaagaactacccggtatgccgcccaagcgagagattgagttccggatagatcttgctctaggaaccactcctctgtacaagcgaccctaccgtatggcagcaaatgaactggccgaagttaagaaacagttggaagagttgaaagaaaaggggtatatacgtccgagtacttcctcctggggtgctcctgtgatttttgtggagaagaaagacaagacgaagaggatgtgcgttcactacagagctctcaatgaagtcaccatcaaaaacaagtaccctcttccccggatcgatgatctgttcgatcagcttaaaggtgccacggtattctccaagattgatcttcgttctggatatcaccagttgcgcatccgtgaagaagatattccgaagaccgcattcaccacgcgatacggactgtatgaattcacggtgatgtcgttcggtttaaccaatgctcctgccttcttcatgaacttaatgaacaaagtgttcatggaatacttggataagtttgttgtggttttcattgatgacattctgaagcaacccaagacagtcactcaaattcgcagtttcttaggtttggcaggatactaccggaggttcatcgagaacttctccaaaatcgctcgacccatgacacagttgttgaagaaagaggagaaatttgtgtggagcccgcaatgcgagaaggcgttcaaaactctcaaagaaaagctggtttcctcgccagtgttaatcttgccggatactcgcaaggacttcatggtgtattgtgacgcttcgcgccaaggattggggtgcgtgctcatgcaggacggtcatgtggtggcctatgcctcacgccagctacggcctcatgaaggcaactaccctacccatgatttggagttagccgcggtggttcatgctctaaaaatctggcggcactatctcattgggaatcgctgtgaaatatatactgatcataagagtttgaaatacatcttcacccagtcggatctgaatcttcggcagaggagatggttagaactcatcaagaattatgatgtgggaattcactatcatcctggtaaggccaacgtggtcgccgacgctctaagtcgaaaaagccattgcaacactcttaacgtccgtggcattccacccgaacttaatcaacagatggaagccctgaatctaagcatagtgggtcgcggattcttggctgcgttggaagccaagcccaccttgctcgatcaaatccgcgaggctcagaagaacgatccggacatgcatggactcctcaagaatatgaaacagggtaaagccgctggtttcacagaggatgaacacggaaccctatggaacagaaatcgggtatgcgttccagataacagagaacttaaacagctgatacttcaggaagctcacgaaagtccttattccatccaccctggcagtacgaagatgtacttagacttgaaggagaaatactggtgggttagtatgaagcgggaaattgcagagttcgtggccctttgtgatgtgtgccagcgtgtcaaggcagagcaccaacgaccggccggacttctccaacctctccaagtaccagaatggaaatgggatgaaattgggatggatttcatcaccggacttccaaaaacccaaggtggatatgattctatatgggtagttgtggatcgattaaccaaggtagctcgatttattcctgtgaaggccacctatggagggaacaaactagccgagctctacttcgctaggatcgtgagtctccatggcgttcctaagaaaattgtatccgataggggaagccaattcacctctcacttttggaagaagctccaagaagagctgggtacccgattaaatttcagcaccgcgtatcacccgcagacagatggacagaccgagcgtctaaatcagatcctagaagatatgcttcgcgcatgtgtcctagatttcgggaagacctgggataagagtctcccctatgccgagttctcctacaataacagctaccaagccagcatacaaatggcaccttatgaagcgttgtatgggcgcaaatgccggacaccgctattgtgggaccaagttggggaaagccaagtgttcgggaccgatatcctgagagaagctgaagctaaagtcagaaccattcgggataatctaaaggtggcccggtctcggcagaagagttatgcagacaaccgacgccgtgacctagaattcgcagtggatgactttgtgtatcttcgggtcacgcccttgcgaggtgtacacaggtttcagacaaaggggaagctcgcacctcggtttgtgggtcctttccgtatcattgctcggcgcggagaagtcgcttaccagttggagctgcccgcctccttgggcaacgtgcatgatgtgttccatgtgtcgcaactcaagaaatgtcttcgagtgccatccgagcaggccgactcagagcaaattgaagttcgcgaagacttgacctacgtggagaggccagtgaaaatcctggacaccatggagcgaaggaccaggaaccgggtaatccgtttttgcaaggtccaatggagcaaccacgccgaggaagaagctacttgggagcgtgaagacgagctgaaggcagcccatcccgatctcttcgtcagttcttccgaatctcggggtcgagattccgtttaa

SEQ ID NO: 14239 - DNA, 1647 bp, Oryza sativa
  Clone ID: TFbOSC410295j.C1.o1.hg
atgatgactgctttcctccaccacctccaaaatccgccacaacagaatgctccaccaccacccccacaacactctaaactcgccgagttcctccgcatccgtccacctaccttctctagctccaacaaccccgtggatgtgttggattggttgcatgccgtggggaaaaagctagacaccgtgcagtgcagcgatgaggagaaagtcatcttcgccgcccaccaactgcaggggcccgcatttctatggtgggaccatttccaggctacgcagccagaggggcaacctattacttgggcccgtttcaccgccgctttccagagaacccatgtgcccgccggagtcgtggcccttaagaaaagagaattccgagagttgaagcaaggcaactgctccgtgatggagtatttgcatgagttcaacaacctggcccgttacgccccggaggatgtgcgggaagatgaggagaagcaagagaagttcttggcaggaatggaccctgagctgtccgtccgtctagtctccggggactatccggatttccaacgtctggtggacaagagcatccgcttggaagccaagcacaaggaactggagtcgcacaagcgccgcttggcgaatttccgcaatcaacagggtgctaaccaaagggtccgctacaccaatccctatccagggggatcctcctcgcagcagcaacaacagcagcagcaacctcgctccgcgcctcgacctcaattcgtggtgcgcgtcccacagccgcagcagcagcagaatcaacaagggactcgtgcgccccgtcctcctacgccagccgtgcagcctggtcaaggccgcagggacgctcaaggtcagcagcgtctgtgcttcaactgcttcgagcccgggcactttgcggataaatgcccaaagccgaggcgtcagcaaggccaagcgcctccccgctccaacaacggtgggaaggatgtcattcggggtcgtgtgaaccatgtgacggccgaggacgtgctgacaactccagacgtcatcgtcggtacgttcctcattcattccatccctgctaccattttgttcaactctggagcttcccactcgtttatatctgtgccattcgtggggagaaatcagttgggggtagaaaggcttaggaaccctctgctcatcaccacccctggaggggttatgacagcaaagtattatagccctgccgtccctatagaaattcaggggattccttttccctcggatctgattctgctagacaccaagaacttggatgtgatccttgggatgaattggttggctcaattccaaggagtagtggattgtgcaagacgcactgtcactctgtaccgagggccggaacaaccggttgttttctttgcacccccaacctctgtcagtagttcagaacttcatcagataggactgtcagaaatccccatcgtcagagagttcggagacgtgtttccggaagaactactcggtatgccgcccaagcgagagattgagttccggatagatcttgctccaggaaccactcctcggtacaagcgaccctaccgtatggcagcaaatgaactggctcaaaactgggattctacttgccactggctagctttgatcaggtcatcaaggtatatataa

SEQ ID NO: 14240 - DNA, 5118 bp, Oryza sativa
  Clone ID: TFbOSC411279j.C1.o18.fg
atgtcatggcacagggccggtgtcctgctgctgggggctcagtcctgcctgcctgtcccgggggttccggccgtaggtgggattgggtcggtactcttgtctatgcctaggatgggttggaaactatgtcacgtcttccgtctgtataccgtggtgatggccggcagcgtcacccgtcgtggtttggatatgactggcttcgtcttggagctgcggggcatgtgcgtggtcttggggtatccacatggagtggactaccaggccaggccgcttccggagcaggagggtgacgatgcagagccccacgctggttgggaggtcactgtagtgatcctctctggctctcccgagcggacttcgctggcagtcaccgcgggtggagattccttccccgccgcttgccagaacgccgctctcctcgccatcggcactcttcaccagcgctacccggacgagttgcagcactcgccctaccgctaccaccctcgtcgcggaggagcccgcgactacgccaccttccgggatgctagctcggaggatgacgctaccatcgtgcacctggcgcgcatggtggaggcgtacgacgcggctcgaatcgacttccatcagatggtgcgtcgcgggatggtcgagaacaacttgaagatcctggagctgcgtcaggagaacctgcagctcaagaaggacctagacgcggtggaggcgcagctgcatcagctcaagatcgcccagggagaggtctgccgccccaagcgtcgccgcgtctgccgcagccagaagatcaccgcccgcaagagcacctccaggcccgagcttgttcgtcagtccctggcgtggacttgcttcgtcgagacccctcgtgccgagcccgtgcccgtggttccccaggagggggaagcctccggcgttggtagcacggaggatgcgctgttgctcaccttccgtcctggcccgtcgcagcggagaagtgctaacaccggtgctggcaaccaacccgaaggcagcaaccacaaccacgagggcaacccacctccacctcctcctccgcctccaccaccaccaccagataccaacgccattctcacccaaatcctcgcccagcaagccaacatgatgactgctttcctccaccacctccaaaatccgccacaacataatgctccaccaccacctccccaacactctaaacacgccgagttcctccgcatccgtccacctaccttctctagttccaacaaccccatggatgcgttggattggttgcatgccgtggggaaaaagctagacactgtgcagtgcagcgatgaggagaaagtcatcttcgccgcccaccaactgcaggggcccgcatctctatggtgggaccatttccaggctgcgcagccagaggggcaacctattacttgggctcgcttcactgccgctttccggaggacccatgtgcccgccggagtcgtggcccttaagaaaagagaattccgagagttaaagcaaggcaaccgctccgtgatggagtatttgcatgagttcaacaacctggcccgttatgccccggaggatgtgcgggaagatgaggagaagcaagagaagttcttggcaggaatggaccctgagctgtccgtccgtatagtctctggggactatccggatttccaacgtctggtggacaagagcattcgcttggaagccaagcacaaggaactggagtcgcacaagcgccgcttggcgaatttccgcaatcaacagggtgctaaccaaaggccgcagcagcagcagaatcaacaagggactcgtgcgccccgtcctcctacgccagccgtgcagcctggtcaaggccgcagggacgctcaaggtcagcagcgtctgtgcttcaactgcttcgagcccgggcactttgcggataaatgcccgaagccaaggcgtcagcaaggccaagcgcctccccgctccgacaacggtggtaaggatgtcattcggggtcgtgtgaatcacgtgacggccgaggacgtgctgacaactccagacgtcattgttggtacgttcctcatacattccatccctgctaccattttgttcgactctggagcttcccactcgtttatatctgtgccattcgtggggagaaatcagttgggggtagaaaggcttaggaaccctctgctcatcaccacccctggaggggttatgacagcaaagtattatagccctgccgtccctatagaaattcagggggttccttttcccacggatctgattctgctagacaccaagaacttggatgtgatccttgggatgaattggttggctcaattccaaggagtagtggattgcgcgagacgcactgtcactctgtaccgagggccggaacaaccggttgttttctttgcacccccaacctctgtcagaagttcagaacttcatcagataggactgtcagaaatccccatagtcagggagttcggagatgtgtttccggaagaactacccggtatgccgcccaagcgagagattgagttccgaatagatcttgctccaggaaccactcctctgtacaagcgaccctaccgtatggccgcaaatgaactggccgaagtaaagaaacagttggaagagttgaaagaaaaggggtacatacgtccgagtacttccccctggggtgctcctgtgatttttgtggagaagaaagacaagacgaagaggatgtgcgttgactacagagctctcaatgaagtcaccatcaaaaacaagtaccctcttccccggatcgatgatctgttcgatcagcttaaagaggaagaccatcagcaccatctccgtctggtgttgggaaagttgcgggaacatcaattgtatgccaaacttagcaagtgtgagttctggttgtccgaagtcaaattcttagggcacgtgatatctgctaaaggagttgctgtggaccccgaaacagtgaccgccgtcaccgattggaagcaacccaagacagtcacccaaattcgcagtttcttaggtttggcaggatactaccggagattcatcgagaacttctccaaaatcgctcgacccatgacacagttgctgaagaaagaagagaaatttgtgtggagcccgcaatgcgagaaggcgttccaaactctcaaagaaaagctggtttcctcgccggtgttaatcttgccggatactcacaaggatttcatggtgtattgcgacgcttcgcgccaaggattggggtgcgtgctcatgcaggacggtcatgtggtggcctatgcctcacgccagctacggcctcatgaaggcaactaccctacccatgatttggagttagcagcggtggttcatgctctaaaaatctggcggcactatctcattgggaatcgctgtgaaatatatacggatcataagagtttgaaatacatcttcactcagtcggacctgaatcttcggcagaggagatggttagaactcatcaaggattatgatgtgggaattcactatcatcctggtaaggccaacgtggttgccgacgctctaagtcgaaaaagccattgcaacactcttaacgtccgtggcattccacccgaacttaatcaacagatggaagccctgaacctaagcatagttagtcgtggattcttggctacgctggaagccaagcccaccttgctcgatcaaatccgcgaggctcagaagaacgacccggacatgcatggactcctcaagaatatgaaacagggtaaagccgctggtttcacagaggatgaacacggaaccctatggaacggaaatcgggtatgcgttccagataacagagaacttaaacagttgatacttcaggaagctcacgagagcccttattccattcacccgggcagtacaaatatgtacttagacttgaaggagaaatactggtgggttagcatgaagcgggaaattgcagagtttgtggccctatgtgatgtgtgccagcgtgtcaaggcagagcaccaacgaccggccggacttctccaacctctccaagtaccagaatggaaatgggatgaaattgggatggatttcatcaccggacttccaaaaacccaaggcggatatgattctatatgggtagttgtggatcgattaaccaaggtagctcgatttattcctgtgaagaccacctatggagggaacaaactagccgagctctacttcgctaggatcgtgagtctccatggcgttcccaagaaaatcgtatctgataggggaagccaattcacctctcatttctggaagaaactccaagaagagttgggaacccgattaaatttcagcaccgcgtatcacccgcagacagatggacagaccgagcgtctaaatcagatcctagaagatatgcttcgcgcatgtgtcctagatttcgggaagacctgggataagagtctcccctatgccgagttctcctacaataacagttatcaagccagcatacaaatggcaccttatgaagcgttgtacgggcgcaaatgccggacaccactattgtgggaccaagttggagaaagccaagtgttcgggattgatatcctgagagaagctgaagctaaagtcagaaccattcgggataatctaaaggtggcccagtctcggcagaaaagttatgcggataaccgacgccgtgatctagaattcgcagtggatgactttgtgtatcttcgggtcacgccattgcgaggtgtacacaggtttcagacaaaggggaagctcgcacctcggtatgtgggtcctttccgtatcattgctcggcgcggagaagtcgcttaccagctggagctgcccgcctccttgggcaacgtgcatgatgtgtttcatgtgtctcaactcaagaaatgtcttcgagtgccattcgagcaggccgactcagagcaaattgaagttcgcaaagatttgacctacgtggagaggccagtgaaaatcctggacaccatggagcgcaggaccaggaaccgggtaatccgtttttgcaaggtccagtggagcaaccacgccgaagaagaagctacttgggagcgtgaagacgagctgaaggcagcccatcccgatctcttcgccagttcttccgaatctcggggtcgagattccgtttaa

SEQ ID NO: 14241 - DNA, 5432 bp, Oryza sativa
  Clone ID: TFbOSC411279j.C1.o19.fg
ataaaatatggaaatggttggcctggttggcttgggacgagctgaacccaggttcgggttgccagttcggtccgaatcatcgtaggcctgggttaaggcagatggccggcagcgttacccgtcgtggtttgcacatgactggcttcgtcttggagctgcgaggcatgtgcgtggtcttggggtatccacatggagtggattaccaggccaggccgctcccggagcaggagggtgaggatgcagagcctcacgctggttgggaggtcactgcagtgatcctctccggctctcccgagcggacttcgctggcagtcaccgcgggtggagattccttccccgccgcttgccagaacgccgctctcctcgccatcggcacccttcaccagcgctacccggacgagttgcagcactcgccctaccgctaccaccctcgtcgcggaggagcccgcgactacgccaccttccgagacgccagttcggaggatgacgctaccgtcgtgcatctggcacgcatggtggaggcgtacgacgcggctcgtatcgacttccatcagatggtgcgccgtggcatggtggagaacaacatgaagatcctggagctgcgccaagagaatctgcagctcaagaaggacctcgacgcgttggaggcgcagctgcatcagctcaagatcgcccagggagaggacagccgtcccaagcgtcgccgcgtctgccgcagccagaagatcaccgcccgcaagagcacctccaggcccgagcttgttcgtcagtccctggcgtggacctgcttcgtcgagacccctcgtgccgagcctgcgcccgtggttccccaggagggggaagcctccggcgttggtagctcggaggttttaatcgtcagctctccttctctgtttgctggttctgtgaggggttttcagatggtgacgaccaggagaaatgttaacaccggtgaaggcaaccaacccgagggcagcaaccccaaccaccaaggcaatccacctccaccttcgcctccaccaccaccaccagacactaacgccattctcacccaaatcctcgcccagcaagctaacctgatgaatgctttcctccaccacctccaaaacccgccacaacacaatgctccaccaccccctccccaacactccaaactcgccgaattcctccgtatccgcccacccaccttctctagctccaacaaccccgtggatgcgttggattggttgcatgccgtggggaagaagttagacactgtgcagtgcagtgacgaagagaaagtcatcttcgccgcccatcagctgcaggggcccgcatctctatggtgggaccatttccaggccacgcagccagaagggcaacctattacttggactcgcttcaccgccgctttccggagaacccatgtgcccgccggagtcgtggctcttaagaaaagggaatttcgggagttgaagcaaggcaaccgctccgtgatggagtatttgcatgagttccacaatctagcccgttatgccccggaggatgtgcgggaagatgaggagaaacaagagaagttcttggcaggaatggaccctgagctgtccgttcgtctagtctctggggactatcctgattttcaacgactggtggacaagagcatccgcttggaagccaagcacaaggagctggaatcgcacaagcgccgcttggcgaatttccgcaatcagcagggtgctaaccagagggtccgctacaccaatccctacccagggggatcctcctcacagcagcagcagcagcagcaacctcgctccgcgcctcgacctcaattcgtggtgcgcgtcccacagcagcaacagcagcagaatcagcaggggactcgtgcgccccgtcctcctacgccaactgtgcagcccgttcaaggccgcagggacgctcaaggtcagcagcgtctgtgcttcaactgcttcgagcccgggcactttgcggataaatgcccgaagccaaggcgtcagcaaggccaagcgcctccccgctccaacaacggcgggaaggatgtccttcggggccgtgtgaatcacgtgacggccgaggacgtgctgacaactccagacgtcatcgttggtacgttcctcgttcattccatccctgctaccattttgttcgactctggagcttcccactcgtttatatctgtgccattcgtggggaaaagtcagttgggggtagaaaggcttagaaaccctctgctcatcaccacccctggaggggttatgacagcaaagtactatagccctgccgtccctatagaaattcaggggattccttttccctcggatctgattctgctagacaccaagaatttggatgtgattctagggatgaattggttggcccaattccaaggggtagtggattgcgcgagacgcactgtcactctgtaccgaggaccagagcaaccggttgttttctttgcacctccaacctctgtcagaagttcagaactgcatcagataggtctgtcagaaatccccatagtcagagagttcggagacgtgtttccggaagaactacctggtatgccgcccaagcgagagattgagttccggatagatcttgctccaggaaccactcctctgcacaagcgaccctaccgtatggcagcaaatgaactagccgaagtaaagacacagttggaagaattgaaagaagaggggtacatacgtccgagtacttccccatggggtgctcctgtgatctttgtagagaagaaagacaagacgaagaggatgtgcgttgactacagagctctcaatgaagtcaccatcaaaaacaagtaccctcttccccggatcgatgatctgttcgatcagcttaaaggtgccactgtattctccaagattgatcttcgttccggatatcaccaattacgtattcgtgaagaagatattccgaagaccgcattcactacgcgatacgggctgtatgaattcacggtgatgtcgttcggcttgaccaatgctcctgccttcttcatgaacttaatgaacaaagtgttcatggaatacttggacaagtttgttgtggttttcatcgatgacattctgatatactcacaatcagaggaagaccatcagcaccatctccgtctggtattgggaaagttgcgggaacatcaattgtatgccaagcttagcaagtgtgagttctggttgtccgaagtcaaatttttggggcacgtgatatctgctaaaggagttgctgtggaccccgaaacagtgaccgccgtcaccgattggaagcaacccaagacagtcactcagattcgcagtttcttgggtttggcaggatactaccggaggttcatcgagaacttctccaaaatcgctcgacccatgacacagttgttgaagaaagaagagaagtttgtgtggagcccgcaatgcgagaaggcgttccaaactctcaaagaaaagctggtttcctcgccagtgttaatcttgccggatactcgcaaggatttcatggtgtactgtgatgcttcgcgccaaggattggggtgcgtgctcatgcaggacggtcatgtggtagcctatgcctcacgccagctacgacctcatgaaggcaactaccctacacatgacttggagttagcagcggtggttcatgctttaaaaatctggcggcactatctcattgggaaccgctgtgaaatatatactgatcataagagtttgaaatacatcttcactcagtcagatctgaaccttcggcaaaggagatggttagaactcatcaaggattatgatgtgggaattcactatcaccctggtaaggctaacgtggttgccgacgctctaagtcggaagagccattgcaatactctcaacgtccgaggcattccacccgagcttaatcaacagatggaagccctgaacctaaacatagttggtcgtggatttttggccgcgctagaagcccagcccaccttgctcgatcaaatccgcgaggctcagaagaatgatccggacatgcgtggactcctcaagaatatgaaacagggtaaagccgctggtttcacagaggatgaacacggaaccttatggaacggaaagcgggtatgcgttccggatagcagagaacttaaacagctgatacttcaggaagctcacgaaagtccttattccattcacccgggcagtaccaagatgtacttagatttgaaggagaaatactggtgggttagcatgaagcgggaaattgcagagtttgtggctctatgtgatgtgtgccagcgtgtcaaggcagaacaccaacgaccggccggacttctccaacctctccaagtgccagaatggaaatgggatgaaattgggatggatttcatcaccggccttccaaaaacccaaggtgggtatgattctatatgggtaatagtggatcgattaaccaaggtagctcgattcattcctgtgaagaccacctatggagggaataaactagcggagctctacttcgctaggatcgtgagtctccatggcgttcccaagaaaatcgtatctgataggggaagccaattcacctctcacttttggaagaagctccaagaagagcttggtacccgactaaatttcagcaccgcatatcacccgcagacagatggacagaccgagcgtctaaatcagatcctagaagatatgctccgcgcatgtgtcctagatttcgggaagacttgggataagagtctcccctatgccgagttctcctacaataacagctaccaagccagcatacaaatggcaccatatgaagcgttgtacgggcgcaaatgccggacaccgctcctgtgggaccaagttggggaaagccaagtgttcgggactgatatcctgagagaagctgcagctaaagtcagaatcattcgggataatctaaaggtggcacagtctcggcagaaaagttatgcagataaccgtcgccgtgatctggaattcgcagtggatgactttgtgtatcttcgggtcacgccattgcgaggtgtgcacaggtttcagacaaaagggaagctcgcacctcggtatgtgggtcccttccgtatcatcgctcgacgcggagaagtcgcttaccagctggagttgcccgcctccttgggcaacgtgcatgatgtgtttcatgtgtctcaactcaagaaatgtcttcgagtgccatccgagcaggccgactcagagcaaattgaagttcgcgaagacttgacctatgtggagaagccagtgaaaatcctggacgccatggagcgcaggaccaggaaccgagtaatccgtttttgcaaggtccagtggagcaaccacgccgaagaagaagctacttgggagcgtgaaggcgagctgaaggcagcccatcccgatctcttcgccagttcttccgaatctcggggtcgagattccgtttaa

SEQ ID NO: 14242 - DNA, 5972 bp, Oryza sativa
  Clone ID: TFbOSC413096j.C1.o1.np
atggcggccggatcttccgcgcccgtttccccctcatccggccgccctctctcactcccaaccctatataaacactccccgtgcctccctccaccgtttccgccactcgccgctccctctctccgccggaatcgagctcgcgccgtcgctctctctctccgccgtcaccgccgagctccggtctgccgccgtcgtcgccccggaccttcttccgcttcggcgccgcctccttcggtttcaccgcaacctcgccgacctcgtccacccctccgtttcgcccgccgacagccggaacgccgccgtccccgtctacccgagccgcgccgccgccttcctccgctccggtcgccgttcccgtcgtcgccgtcgacccggggtgagctgtggaccgccgattcgtttcccccttccctcccctctctcgggcgccgctctaccgcgccggtggtcaccggcggcgaccatcgggggcgcgggtgcgccgcctcccgtcggctgtgccggcgtggccgccttcgggcgcgccccgcggctgccatgtggggcccggccgtcagccgcccgcgccctcgggtgcggctgacgcgtgggacccacggcgccggccggtgtgagccgggtgcacccggtccaccatggacccacctcggccatataaggaccggtcttcgggcctctgttgcaaagcactaccgtacttccacatgtctagtggggcaaatgaaggctacacgagctgcggcccggtagtcgagatgtcatggcacagggccggtgtcctgctgctaggggctcagtcctgcctacctgtcccgggggttccgggcgtaggtgggattgggtcgatgtacacctctgatcagagtataatctattcgaatagccgcgccctcggttatgggcaagccgagcaatgtacccaaatggccggcagcgtcagccgtcgtggtctggacctgactggtttcgtcttggagctgcggggcatgtgcgttgtcctggggtatccgcatggagtggactaccagggcaggccgctcccggagcaggagggtgacgatgcagagccccacgctgcttgggaggttactgcagtgatcctcactggctcacccgagaggacttcgttggcagtcaccgcaggtggagattctttctccgccgcttgccagagcgccgctctcctcgccatcagcactcttcaccagcgctacccggacgagctgcagcactcgccctaccgctaccaccctcgtcgcggaggagcccgcgactacgccaccttccgggatgctagctcggaggatgacgctaccatcatgcacctggcgcgcatggtggaggcgtacgacgcggctcgtatcgacttccatcagatggtgcgccatgggatggtcgagaacaacctgaagatcctgaagctgcgtcaggagaatctgcagctgaagaaggacctagacgcagtggaggcgcagctgcatcagctcaagatcgcccagagagaggtctgtcgcccccagcgtcgccgcgtctgccgcagccagaagatcaccgcccgcaagagcacctccaggcccgagcttgttcgtcagtccctggcgtggacttgcttcgtggagacccctcgtgccgagcccgcgcccgtggttcctcaggagggggaagcctccggcgtcggtagcatggaggatgcgctgttgctcaccttccatggtgacgaccaggagaaatgctgccaccagtgatagcaaccaacctgaaggcagcaaccacaacaaccatggcagcccacctccacctcctccaccgcctccaccaccaccaccagacaccaacgccattctcacccaaatcctcgcccagcaggccaacatgatggctgctttcctccaccacatccaaaatccgccacaacataatgctccaccaccacccccacaacactctaaactcgccgagttcctacgcatccgtccacctaccttctctagctccaacaaccccgtggatgcgttggattggttgcatgccgtggggaaaaagttagacaccgtgcagtgcagcgatgaggagaaagtcatcttcgccgcccaccaactgcaggggcccgcatctctatggtgggaccatttccaggctacgcaactagaggggcaacctattacttgggcccgcttcaccgccgccttccggaggacccatgtgcccgccggagtcatggcccttaagaaaagggagttccgagagttgaagcaaggcaaccgctccgtgatggagtatttgcatgagttcaacaacctggcccggtacgccccggaggatgtacgggaagatgaggaaaagcaggagaagttcttggcaggaatggatcctgagctgtccgtccgtctagtctccggggactatccggatttccaacgtctggtggacaagagcatccgcttggaagccaagcacaaggaactggagtcgcacaagcgtcgcttggcgaattttcgcaaccaacagggtgctaaccaaaggatccgctacaccaatccctatccagggggatcttcctcgcagcagcagcaacctcgctccgcgcctcgacctcaattcgtggtgcgcgtcccacagccgcagcaacagcagagccagcaagggacccgtgcgccccgtcctcctacgccagccgcgcagtctggacaaggccgcagggacgttcaaggtccgcagcgtctgtgcttcaactgcttcgagcccgggcactttgcggataaatgcccgaagccgaggcgccagcaaggccaagcgcctccccactccaacaacggtggtaaggatgtcatttggggtcgtgtgaaccacgtgacggccgaggacgtgctgacaactccagacgtcatcgttggtacgttcctcatccattccatccctgctaccattttgttcgactctggagcttcccactcgtttatatctgtgccattcgtggggagaaatcagttgggggtagaaaggcttaggaaccctctactcatcaccacccctggaggggttatgacagcaaagtattatagtcctgccgtccctatagaaattcaggggattccttttccctcggatctgattcttctagacaccaagaacttggatgtgatccttgggatgaattggttggctcaattccaaggagtagtggattgtgcaagacgcactgtcactctgtaccgagggccggaataaccggttgttttctttgcacccccaacctctgtcagtagttcagaacttcatcagataggactgtcagaaatccccattgtcagagagttcggagacgtgtttccggaagaactacccggtatgccgcccaagcgagagattgagttccggatagatcttgctccaggaaccactcctctgtacaagcgaccctaccgtatggcagcaaatgaactggccgaagttaagaaacagttggaagagttgaaagaaaaggggtatatacgtctgagtacttccccctggggtgctcctgtgatttttgtggagaagaaagacaagacaaagaggatgtgcgttgactacagagctctcaatgaagtcaccatcaaaaacaagtaccctcttccccggatcgatgatctgttcgatcagcttaaaggtgccacggtattctccaagattgatcttcgttctggatatcaccagttgcgcatccgtgaagaagatattccgaagaccgcattcaccattcgatacggactgtatgaattcacggtgatgtcgttcggtttaaccaatgctcctgccttcttcatgaacttaatgaacaaagtgttcatggaatacttggataagtttgttgtggttttcattgatgacattctggtatactcacaatcagaggaagaccatcagcaccatctccgtctggtgttgggaaagttgcgggaacatcaattgtatgccaaacttagcaagtgtgagttctggttgtccgaagtcaccgattggaagcaacccaagacagtcactcaaattcgcagtttcttaggtttggcaggatactaccggaggttcatcgagaacttctccaaaatcactcgacccatgacacagttgttgaagaaagaggagaaatttgtgtggagcccgcaatgcgagaaggcgttcaaaactctcaaagaaaagctggtttcctcgccagtgttaatcttgctggatactcgcaaggacttcatggtgtattgtgacgcttcgcgccaaggattgggcgcgtgctcatgcaggacggtcatgtggtggcctatgcctcacgccagctacggcctcatgaaggcaactaccctacccatgatttggagttagccgcggtggttcatgctctaaaaatctggcggcactatctcattgggaatcgctgtgaaatatatactgatcataagagtttgaaatacatcttcacccagtcggatctgaatcttcggcagaggagatggttagaactcatcaaggattatgatgtgggaattcactatcatcctggtaaggccaacgtggtcgccgacgctctaagtcgaaaaagccattgcaacactcttaacgtccgtggcattccacccgaacttaatcaacagatggaagccctgaatctaagcatagtgggtcgcggattcttggctgcgttggaagccaagcccaccttgctcgatcaaatccgcgaggctcagaagaacgatccggacatgcatggactcctcaagaatatgaaacagggtaaagccactggtttcacagaggatgaacacggaaccctatggaacggaaatcggcgtgtcaaggcagagcaccaacgactggccggacatctccaacctctccaagtaccagaatggaaatgggatgaaattgggatggatttcatcaccggacttccaaaaacccaaggtggatatgattctatatgggtagttgtggatcgattaaccaaggtagctcgatttattcttgtgaaggccacctatggagggaacaaactagccgagctctacttcgctaggatcgtgagtctccatggcgttcctaagaaaattgtatccgataggggaagccaattcacctctcacttttggaagaagctccaagaagagctgggtacccgattaaatttcagcaccgcgtatcacccgcagacagatggacagaccgagcgtctaaatcagatcctagaagatatgcttcgcgcatgtgtcctagatttcgggaagacctgggataagagtctcccctatgccgagttctcctacaataacagctaccaagccagcatacaaatggcaccttatgaagcattgtatgggcgcaaatgtcggacaccgctattgtgggaccaagttggggaaagccaagtgttcgggaccgatatcctgagagaagctgaagctaaagtcagaaccattcgggataatctaaaggttgcccagtctcggcagaagagttatgtagacaaccgacgccgtgacctagaattcgcagtggatgactttgtgtatcttcgggtcacgcccttgcgaggtgtacacaggtttcagacaaaggggaagctcgcacctcggtttgtgggtcctttccgtatcattgcacggcgcggagaagtcgcttaccagttggagctgcctgcctccttgggcaacgtgcatgatgtgttccatgtgtcgcaactcaagaaatgtcttcgagtgccatccgagaaggccgactcagagtaaattgaagttcgcgaagacttgacctacgtggagaggccagtgaaaatcctggacaccatggagcgaaggaccaggaaccgggtaatccgttttttcaaggtccactggagcaaccacgccgaggaagaagctacttgggagcgtgaagacgagctgaaggcagcccatcccgatctcttcgtcagttcttccgaatctcggggtcgagattccgtt

SEQ ID NO: 14243 - DNA, 6041 bp, Oryza sativa
  Clone ID: TFbOSC413096j.C1.o2.np
atggcggccgggactcccgcgcctgtttccccctcctccggccaccccctccctctcttaaccctatataaaccctccccgtgcctccctccaccgtttccgccactcgccgctctctctccccgccggaatcgagctcgcgccatcgctctctctctccgccgtggccgccgagctccggtccgccgccgttgtcgccccggaccacctctcccctcggcgtcgcctccttcggcttcgccggatcctcgccgacctcgtccacccctccgtttcgcacgccgaccgccggagcaccgtcgaccccgtccacccgagccgcgccgccgccttcctccgctccggtcgtcgttcccgtcgtcgccgtcgacctggggtgagccgtggaccgccgattcgtttcccccttccctcccctctctcggccgccgctccgccgtacatatggccgccgccggcgaccataggggcgcgggcgcgccgcctcccgccgctgcgccggcgtggccgccttcgggcgcgccccgcggctgccgtgtggggcccggctgtcagccgcccacgcccttaggtgcggctgacgcgtgggacccacggcgccggccggtgagagcccgggtgcgcccggtccaccgtggtcgtacctcgggtactataaggattaagctcgggcctctgttgcaaagcactaccgtacttccacatgtctagtggggcaaatgaaggctacacgagctgcggcccggtagtcgagatgtcatggcacagggccggtgtcctgctgctgggggctcagtcctgcctacctgtcccgggggttccggccgtaggtggggttgggtcgatgtacacctctgatcagagtataatctattcgaatagccgcgccctcggttatgggcaagccgagcaatgtacccaaatggccggcagcgtcagccgtcgtggtctggacctgactagcttcgtcttggagctgcggggcatgtgcgttgccctggggtatccgcatggagtggactaccagggcaggccgctcccggagcaggagggtgatgatgcagagccccacgctgcttgggaggttactgcagtgatcctcactggctcacccgagaggacttcgttggcagtcaccgcgggtggagattctttctccgccgcttgccagaacgccgctctcctcgccatcggcactcttcaccagcgctacctggacgagttgcagcactcgccctaccgctaccaccctcgccgcggaggagcccgcgactacgccaccttccgggatgctagctcggaggatgacgctaccatcatgcacctggcgcgcatggtgtaggcgtacgacgcggctcgtatcgacttccatcagatggtgcgccctgggatggtcgagaacaacatgaagatcttggagctgcgtcaggagaatctgcagctgaagaaggacctagacgtagtggaggcgcagctgcatcagctcaagatcgcccagggagaggtctgtcgccccaagcgctgccgtgtctgccgcagccagaagatcaccgcccgcaagagtacctccaggcccgagcttgttcgtcagtccctggcgtggacttgcttcgttgagacccctcgtgccgagcccgcgcccgtggttcctcaggagggggaagcctccggcgttggtagcacggaggatgcgctgttgctcaccttccatggtgacgaccaggagaagtgctgccaccggtgatggcaaccaacctgaaggcagcaaccacaacaaccatggcagcccacctccacctcctccaccaccaccaccagacaccaacgccattctcacccaaatcctcgcccagcaggccaacatgatggctgttttcctccaccacatccaaaatccgccacatcataatgctccaccaccacccccacaacactctaaactcgccgagttcctccgcatccgtccaccaaccttctctagctccaataaccctgtggatgcgttggattggttgcatgccgtggggaaaaatctagacaccgtgcagtgcagcgatgaggagaaagtcgtcttcgccgcccaccaactgcaggggcccgcatctctatggtgggaccatttccaggctacacagccagaggggcagcctattacttgggcccgcttcaccgccgccttccggaggacccatgtgcccgccggagtcatggcccttaagaaaagggaatttcgagagttgaagcaaggcaaccgctccgtgatggagtatttgcatgagttcaacaacctggcccggtacgccccggaggatgtacgggaagatgaggaaaagcaggagaagttcttggcaggaatggatcctgagctgtccgtccgtctagtctccggggactatccggatttccaacgtctggtggacaagagcatccgcttggaagccaagcacaaggaactggagtcgcacaagcgtcgcttggcgaatttccgcaatcaacagggagctaaccaaaggatccgctacaccaatccctatccagggggatcctcctcgcagcagcaacaacagtagcagcaacctcgctccgcgccccgacctcaattcgtggtgcgcgtcccacagccgcagcaacagcagagccagcaagggacccatgcgccccgtcctcctacgccagccgcgcagtctggtcaaggccgcagggacgttcaaggtccgcagcgtttgtgcttcaactgcttcgagcccgggcactttgcggacaaatgcccaaagtcgaggcgccagcaaggccaagcgcctccccgctccaacaacggtggtaaggatgtcattcggggtcgtgtgaaccacgtgacggccgaggacgtgctgacaactccagacgtcatcgttggtacgttcctcattcattccatccctgctaccattttgttcgactctggagcttcccactcgtttatatctgtgccattcgtgggaagaaatcagttgggggtagaaaggcttaggaaccctctcctcatcaccacccctggaggggttatgacagcaaagtattatagtcctgccgtccctatagaaattcaggggattccttttccctcggatctgattcttctagacaccaagaacttggatgtgatccttgggatgaattggttggctcaattccaaggagtagtggattgcgcgagacgcactgtcactctgtaccgagggccggaacaaccggttgttttctttgcacccccaacctctgtcagtagttcagaacttcatcagataggactgtcagaaatccccatcgtcagagagtttggagacgtgtttccggaagaactacccggtatgccgcccaagcgagagattgagttccggatagatcttgctacaggaaccactcctctgtacaaacgaccctaccgtatggcagcaaatgaactggccgaagttaagaaacagttggaagagttgaaagaaaaggggtacatacgtccgagtacttccccctggggtgctcctgtgatttttgtggaaaagaaagacaagacgaagaggatgtgcgttgactacagagctctcaatgaagtcaccatcaaaaacaagtaccctcttccccggatcgatgatctgttcgatcagcttaaaggtgccacggtattctccaagattgatcttcgttccggatatcaccagttgcgcatccgtgaagaagatattccgaagaccgcattcaccacgcgatacggactgtatgaattcacggtgatgtcattcggtttaaccaatgctcctgccttcttcatgaacttaatgaacaaagtgttcatggaatacttggataagtttgttgtggttttcattgatgacattctggtatactcacaatcagaggaagaccatcagcaccatctccgtctggtattgggaaagttgcgggaacatcaattgtatgccaaacttagcaagtgtgagttctggttgtccgaagtcaagttcttagggcacgtgatatccgctaaaggagttgctgtggaccccgaaacagtgaccgccgtcactgattggaagcaacccaagacagtcactcaaattcgcagtttcttaggtttggcaggatactaccggaggttcatcgagaacttctccaaaatcgctcgacccatgacacagttgttgaagaaagaagagaaatttgtgtggagcccgcaatgcgagaaggcgttccaaactctcaaagaaaagctggtttcctcgccagtgttaatcatgccggatactcgcaaggacttcacggtgtattgtgacgcttcgcgccaaggattggggtgcgtgctcatgcaggacggtcatgtggtggcctatgcctcacgccagctacggcctcatgaaggcaactaccctacccatgatttggagttagccgcggtggttcatgctctaaaaatctggcggcactatctcattgggaatcgctgtgaaatatatactgatcataagagtttgaaatacatcttcacccagtcggatctgaatcttcggcagaggagatggttagaactcatcaaggattatgatgtgggaattcactatcatcctggtaaggccaacatggtcgccgacgctctaagtcgaaagagccattgcaacactcttaacgtccgtggcattccacccgaacttaaccaacagatggaagccctgaatctaagcatagtgggtcgtggattcttggctgcgttggaagccaagcccaccttactcgatcaaatccgcgaggctcagaagaacgacccggacatgcgtggactcctcaagaatatgaaacagggtaaagccgctggtttcacagaggatgaacacggaaccctatggaacggaaatcggcgtgtcaaggcagagcaccaacgaccggccggacttctccaacctctccaagtaccagaatggaaatgggatgaaattgggatggatttcatcaccggactttcaaaaacccaaggtggatacgattctatatgggtagttgtggatcgattaaccaaggtagctcgatttattcctgtgaagaccacctatggagggaacaaactagccgagctctacttcgctaggatcgtgagtctccatggcgttcccaagaaaatcgtatctgataggggaagccaattcacctctcacttttggaagaagctccaagaagagctgggtacccgattaaatttcagcaccacgtatcacccgcagacagatggacagaccgagcgtctaaatcagatcctagaagatatgcttcgcgcatgtgtcctagatttcgggaagacctgggataagagtctcccctatgccgagttctcctacaataacagctaccaagccagcatacaaatggcaccctatgaagcgttgtatggatgcaaatgccggacactgctattgtgggaccaagttggggaaagccaagtgttcgggactgatatcctgagagaagctaaagctaaagtcagaaccattcgggataatctaaaggtggcccagtctcggcagaagagttatgcagacaaccgacgccgtgacctggaattcgcagtggatgactttgtgtatcttcgggtcacgcccctgcgaggtgtacacaggtttcagacaaaggggaagctcgcacctcggttcgtgggtcctttccgtatcattgctcggtgcggagaagtcgcttaccagttggagctgcccgcctccttgggcaacgtgcatgatgtgttccatgtgtcgcaactcaagaaatgtcttcgagtgccatccgagcaggccgactcagagcaaattgaagttcgcgaagacttggcctacgtggagaggccagtgaaaatcctggacaccatggagcgcaggaccaggaaccgggtaatccgtttttgcaaggtccaatggagcaaccacgccgaggaagaagctacctgggagcgtgaagacgagctgaaggcagcccatcccgatctcttcgccagttcttccgaatctcggggtcgagattccgtt

SEQ ID NO: 14244 - DNA, 1260 bp, Oryza sativa
  Clone ID: TFbOSC413731j.C1.o2.fg
atgaccaggagaagtgctaacaccggtgatggcaaccaacctgaaggcagcaaccacaaccatcagggcaacccacctccacctcctcctccacctccaccaccaccaccagacaccaacgccattctcacccaaatcctcgcccagcaggccaacatgatgactgctttcctccaccacctccaaaatccgccacaacttaatgctccaccaccacccccacaacactctaaactcgccgagtttctccgcatccgcccacctaccttctctagctccaacaaccccgtggatgcgttggattggttgcatgccgtggggaaaaagctagacactgtgcagtgcagcgatgaggagaaagtcatcttcgccgcccaccagctgcagggacccgcatctctatggtgggaccatttccaggctacgcagccagagggacagcctattacatgggctcgcttcaccgccgctttccgaagaacccatgtgcccgccggagtcgtggcccttaagaaaagggaattccgagagttgaagcaaggcgaccgctccgtgatggagtatttgcacgagttcaacaacctggcccgttacgctccggaggatgtgcgggaagatgaggagaagcaagagaagttcctggcaggaatggaccctgagctgtccgtccgtctagtctccggggattatccggatttccaacgtctggtggacaagagcatccgcttggaagccaagcacaaggaactggagtcgcacaagcgccgcttggcgaatttccgcaaccaacagggtgctaaccaaagggtccgctacaccaatccctatccagggggatcctcctcgcagcagcaacaacagcagcagcaacctcgctccgcgcctcgacctcaattcgtggtgcgcgtcccacagccgcagcagcagcagaatcaacaagggactcgtgcgccccgtcctcctccaccgactgtgcagcctggtcaaggccgcagggacgctcaaggtccgcagcgtctgtgcttcaactgcttcgagcccgggcactttgcggataaatgcccgaagccaaggcgtcagcaaggccaagcgcctccccgccccaacaacggtggtaaggacgtcattcggggtcgtgtgaaccatgtgacggccgaggacgtgctgacaactccagacgtcatcgttgagagttcggagacgtgtttccggaagaactacctggtatgccgcctaagcgagagattgagttccggatag

SEQ ID NO: 14245 - DNA, 5049 bp, Oryza sativa
  Clone ID: TFbOSC416075j.C1.o2.gm
atggatgaagtcgggcgtcgatggacattctccagggcaaatgaaggctacacgagctgcggcccgatggccggcagcgtcacccgtcgtggtttggacatgactggcttcgtcttggagctgcgaggcatgtgcgtggtcttggggtatccacatggagtggattaccaggccaggccgctcccggaacaggagggtgaggatgcagagcctcacgctggttgggaggtcactgcagtgatcctctccggctctcccgagcggacttcgctggcagtcactgcggggggagactccttccccgccgcttgccagaacgccgctctcctcgccatcggcacccttcaccagcgctacccggacgagttgcagcactcgccctaccgctaccaccctcgtcgcggaggagcccgcgaccacgccaccttccgagacgccagctcggaggatgacgctaccgtcgtgcatctggcacgcatggtggaggcgtacgacgcggctcgtatcgacttccaccagatggtgcgtcgtggcatggtggagaacaacctgaagatcctggagctgcgtcaggagaacctgcagctcaagaaggacctcgacgcagtggaggcgcagctgcatcagctcaagatcgcccagggtgaggacagccgtcccaagcgtcgccgcgtctgccgcagccagaagatcaccgcccgcaagagcacctccaggcccgagcttgttcgtcagtccctggcgtggacttgcttcgtcgagacccctcgtgccgagcctgcgcccgtggttccccaggagggggaagcctccggcgttggtagctcggagggtgcgctgttgctcaccttccgccctggcccgtcgcagcgctcttcttctctgtttgctggttccgtgtggggtttccagatggtgacgaccaggagaaatgttaacaccggtgaaggcaaccaacccgagggcagcaaccccaacccccaaggcaacccacctccaccaccaccaccagataccaacgccattctcacccagatcctcgcccaacaagccaacatgatgaatgctttcctccaccacctccaaaatccgccacaacagaatgccccaccaccacctccccaacactccaaactcgccgagttcctccgcatccgcccacctaccttctctagctccaacaaccctgtggatgcgttggattggttgcatgccgtggggaagaagctagacacggtgcagtgcagtgatgaggagaaagtcgtcttcgccgcccatcagctgcaggggcccgcatctctatggtgggaccacttccaggctacgcagccacagggacagccgattacttgggcccacttcaccgccgctttccggagaacccatgtgcccgccggagtcgtggctctcaagaagagggaattccgagagttgaagcaaggcaaccgctccgtgatggagtatttgcacgagttcaacaacttggcccgttacgctccggaggatgtgcgggaagatgaggagaagcaagagaagttcttggcaggaatggaccctgagctgtccgttcgtctagtctctggggactatccggatttccaacgactggtggacaagagcatccgcttggaagccaagcacaaggagctggagtcgcacaagcgccgcttggcgaacttccgcaatcagcagggtgctaaccagagggttcgctacaccaatccctacccagggggatcctcctcgcagcagcagcagcagcagcaacctcgcccagcgcctcgacctcaattcgtggtgcgcgtcccacagccgcagcagcagcagaatcagcaagggactcgtgcgccccgtcctcctacgccagctgtgcagcccgttcaaggccgcagggacgctcaaggtcagcagcgtctgtgcttcaactgcttcgagcccgggcactttgcggataaatgcccgaagccaaggcgtcagcaaggccaagcgcctccccgctccaacaacggcgggaaggatgtcattcggggccgtgtgaatcatgtgacggccgaggacgtgctgacaactccagacgtcatcgttggtacgttcctcgttcattccatccctgctacaattttgttcgactctggagcttcccactcgtttatatctgtgccattcgtggggaaaaatcagttgggggtagaaaggcttagaaaccctctgctcatcaccacccctggcggggttatgacagcaaagtattatagccctgccgtccctatagaaattcaggggattccttttccctcggacctgattctgctagacaccaagaacttggatgtgatccttgggatgaattggttggcccaattccaagggataggtctgtcagaaatccccatagtcagagagttcggagacgtgtttccggaagaactacctggtatgccgcccaagcgagagattgagttccggatagatcttgctccaggaaccactcctctgtacaagcgaccctaccgtatggcagcaaatgaactggccgaagttaagaaacagttggaagagttgaaagaaaaggggtacatacgtccgagtacttccccatggggtgctcctgtgatttttgtagagaagaaagacaaaacgaagaggatgtgtgttgactacagagctctcaatgaagtcaccatcaaaaacaagtaccctcttccccggatcgatgatctgttcgatcagcttaaaggtgccactgtattctccaagattgatcttcgttccggatatcaccacttacgtattcgggaagaagatattccgaagaccgcattcaccacgcgatacgggctgtatgaattcacggtgatgtcgttcggtttgaccaatgcacctgccttcttcatgaacttaatgaataaagtgttcatggaatacttggataagttcgttgtggttttcatcgatgacattctgatatactcacaatcagaggaaggccatcagcaccatctccgtctggtgttgggaaagttggggaacatcaattgtatgccaagcttagcaagatattaccggagattcatcgagaacttctccaaaatcgctcgacccatgacacagttgttgaaaaaagaagagaaatttgtgtggagcccgcaatgcgagaaggcgttccaaactctcaaagaaaagctggtttcctcgccagtgttaatcttgccggatactcgcaaggacttcatggtgtattgtgatgcttcgcgccaaggattggggtgcgtgctcatgcaggacggtcatgtggtagcctatgcttcacgccaactacgtcctcatgaaggcaactaccctacacatgacttggagttagcagcggtggttcatgctctaaaaatctggcgacactatctcattgggaaccgctgtgaaatatatactgatcataagagtttgaaatacatcttcacccagtcggatctgaatcttcggcaaaggagatggttagaactcatcaaggattatgatgtgggaatacactatcatcctggtaaggccaacgtggttgccgacgctctaagtcgaaagagccactgcaacactctcaacgtccgaggcattccacccgagcttaatcaacagatggaagccctgaacctaagcatagttggtcgcggattcttggctgcgttggaagccaagcctaccttgctcgatcaaatccgcgaggctcagaagaatgatccggacatgcatggactcctcaagaatatgaaacagggtaaagccgcaggtttcacagaggatgaacacggaactctatggaacggaaagcgggagaaatactggtgggtcagcatgaagcgggaaattgcagagtttgtggctctatgtgatgtgtgccagcgtgtcaaggcagaacaccaacgaccggccggacttctccaacctctccaagtgccggaatggaaatgggatgaaattgggatggatttcgtcaccggccttccaaaaacccaaggtggatatgattctatatgggtaattgtggatcgattaaccaaggtagctcgattcattcctgtgaagaccacctacggagggaacaaactagcggagctctacttcgctaggatcgtgagtctccatggtattcccaagaaaatcgtatctgataggggaagccaattcacctctcacttttggaagaagctccaagaagagctgggtactcgattgaatttcagcaccgcctatcacccgcagacagatggacagaccgagcgtctaaatcagatcctagaagatatgctccgcgcatgtgtcctagatttcgggaagacttgggataagagtctcccctatgccgagttctcctacaataacagctatcaagccagcatacaaatggcaccctatgaagcgttgtacgggcgcaaatgccggacaccgctattgtgggaccaagttggagaaagccaagtgttcgggactgatatcctgagagaagctgaagctaaagtcagaatcattcgggataatctaaaggtggcacagtctcggcagaaaagttatgcagataaccgtcgccgcgatctggaattcgcagtggatgactttgggtatcttcgggtcacgccattgcgaggtgtgcacaggtttcagacaaaagggaagctcgcacctcggtatgtgggtcccttccgtatcatcgctcgacgtggagaagtcgcctaccagctggagttgcccgcctccttgggcaacgtgcatgatgtgttccatgtgtcgcaactcaagaaatgtctccgagtgccatccgagcaggccgactcagagcaaattgaagttcgcgaagatttgacctacgtggagaggccagtgaaaatcctggacaccatggagcgcaggaccaggaaccgggtaatccgtttttgcaaggtccagtggagcaaccacgccgaagaagaagctacttgggagcgcgaagacgagctgaaggcagcccatcccgatctcttcgccagttcttccgaatctcggggtcgagattccgtttaa

SEQ ID NO: 14246 - DNA, 5953 bp, Oryza sativa
  Clone ID: TFbOSC416252j.C1.o1.np
atggcggccggatcccccgcgccggtttccttccccgccgaccgccctctctccctcccgaccctatttaaaccctccccgctccttcctcgtccgtttctgccacttgccgcaccgtttccccgccagaatcgagctcgcgccgtcgtcctctctctcctccgtcaccgacgacctccggctggccctctccgctcgccgggaccgcctcccgcctcggcgtcgtctcctcaagcttcgccgtgccgtcgctgaccctgtccaccacctcgccgagctcgccgaccgccgaagcgccatagtccccgtccacccgagccgcgccaccgccttcctccgctccggacgcctcctttgccgtcgccgtcgacccggggtgagacgtggaccaccgcctctttcccccttcccttcccctctcttggccgccgctccgctgtgcctatggccgccgccggcgaccataggggcgcaggcgccgcctcccgccggccgcgccgacgtggccgcctccgggcgcgccgtgtggccgtcgcgtggggcccggccgttagccgcccgtgccctcgggtgcggctgatgcgtggggcctacggcgccggccggtgtgagcccgggtgcgcccggtccaccgtggacccacctcggccacataaggaccggtctttgggcctctgttgcaaagcactaccgtacttccacatgtctagtgggaggtaggagaagggcccgacatgtgggccccacatgtcggtgacccgcgtgagaggaggggcggcggcggcttgggccgaatttatgcttccgcttgttaaactctatattgtatcaacttttggtgtaccttgcctcctgggacaaggaataatacacgcacgtaaggaacgcccgttgggttatttccggtcgtgacaatgtttgtagatggccggcaacatcaaccgtcatggcctggatctgactggctttgttttggagctgcggggcatgtttgttgtcctgggatatccgcatggagtggactaccagggcaagaagcttccggagcaggatggtgacgatgcagagccccgcgccgcttgggaggtcactgcggtgatcctcaccggctctcccgagaggacttcgttggcagtcaccgcgggtggagattctttccccgccgcttgccagaacgccgcgctcctcgtcatcggcactcttcaccagcgctatttggacgagttgcggcactcgccctacagctaccaccctcgttgaggagcctgcgactacgccaccttcagggatgctagctcggaggatgacgctaccatcatgcacctggcgcgcatggtggaggcgtacgatgcggcccgtatcgacttccatcatatagtgcgccgtgggttggtcgagaacaacatgaagatcctggagctgcgtcaggagaatttgcagctgaagaaggacttggacgcagtggaggcgcagctgtgtcagctcaagattgctaagggagaggtctgccgccccaagcgccgccgcgtttgccgcaacctgaagatcaccgcccgcaagagtacctccaggcctgagcttgttcgtcagtccctagcgtggacttgctttgtggagatcccttgcgccgagtccgcgcccttggttcctcaggaggagggagcctctggcgttggtagcacggaggatgtgctgttgctcaccttccatggtgacaaccaggagaagcgctgttactggcgaaggcagtcatcccgaaggcagcaaccccaacaaccatgacagcccacctccacctcctccccaccaccaccaccgccacctgacaccaaccccatcctcacccaaatcctcgcccagcaggccaacgtgatggctgctttcctccaccacatccagaatccgccgcaacacaatgctccgcccccaccaccacccctgcagcattctaagcttgccgagttcctccgcatccgcccgcctaccttctctagcttcaacaaccctgttgatgccttggattggttgcatgccgttgggaaaaagttagacaccgtccagtgcaatgatgaggagaaagtcatcttcgccacccaccaactgcaggggcccgcatctctatggtgggaccacttccaggctacgcagccggaaggatagcctatcacctgggcccgcttcaccgccgctttccggaggacccatgtgcccgccggagtcatggcccttaagaagagggaatttcgggagttgaagcaaggcaaccgctctgtgatggagtatttgcatgagttcaataacttggcccggtacgctccagaggatgttcgtgaagatgaggaaaagcaacagaaattcctggcaggaatggaccctgaactgtctgtgcatctggtctccagggactatcctgatttccagcgcctggtggacaagagcatccacctggaagccaagcacaaggaactggagtcgcacaagcgtcgcttggcgaatttttccaatcaacagggagctaaccaaagggtccgctacacaaatccctatcctggaggatcctcctcacagcagcagcagcagcagcaacctcgccccgcgccccgacctccatacgtggtgcgcgtcccacagccgcagcagcagcagaatcagcaagggacccgtgcaccccgccctcctgcaccggccgtgcagcctggtcaaggccgcagggacgctcaaggtcaacaacgtctgtgcttcaactgcttcgagcccggacactttgcggataaatgcccgaagccaggcgccagcaaggccaagcgcctccccgccccaacaacggtggtaaggatgtcactgggggttgtgtgaaccacgtgactgccgaggatgtgctgacaactccagacgtcatcgttggtacgttcctcattcattccatccctgctaccattttgttcgactctggagcttcccactcgtttatatctgtgccattcgtggggagaaatcagctgggggtagaaaggcttaggaaccctctactcatcaccacccctggagtggttatgacaacgaagtattatagcccggccgttcctatagaaatccagggaattcctttccctcggatctgattcttctggacaccaagaacttggatgtgatccttgggatgaattggttggctcaattccaaggagtagtggattgcgcaaggcgcactgtcactctgtaccgggggcccgatcaaccagttgttttctttgcactccaactcccgccggcacttcagtacttcatcaactaggattatccgtaatctccatcgtcagtgagttcggtgatgtgtttccggaagagctacccggtatgccgcccaagcgggagattgagttccggatagatcttgctccaggagccactcctttatacaagcgaccctaccgtatggcagcaaatgaattggccgaagtcaagaaacagttggaagagttgaaagaaaatgggtatatacggccgagcacttccccctggagtgctcccgtgatttttgtggagaagaaagacaagacaaagaggatgtgcgttgactacagagctctcaacgaggtcactatcaaaaacatgtacccccttccccagatcgatgatctgttcgatcagcttaaaggtgccactgtcttttccaagattgatcttcgttccggatatcaccagttgcgtattcgtgaagaagatatcccgaagaccgcattaaccacgcggtacggactgtatgaattcacggtgatgttgttcggtctgaccaattctcctgccttcttcatgaatttaatgaacaaagtgttcatggaatacctggataagttcgttgtggtctttattgacgacatactggtgtactcggagtcagaggaagaccatcagcagcatctccgtttagtgttggggaagctgcgggaacactaactgtatgccaagctcagcaagtgtgagtttttgttgtccgaagttaagttcttagggcatgtgatttctgctaaaggagttgctgtggatcccaaaacggtgaccgccgtcactgattggaagcaacccaagacagtcactcaggtccgcagctttttgggtttggcaggatactaccgaagattcatcgagaatttctccaaaattgccaggcccatgacgcagttgctgaagaaggaagaaaaatttgtgtggagtccgcagtgtgagaaagcattccaaactctcaaagaaaagctggtttcctcgcccgtgttaatcttactggatactcgcaaggacttcttggtgtactgtgacgcttcgcgccaaggattggggtgtgtattaatgcaggaaggtcatgtggtagcctatgcctcacgccagctacggccccatgaaggcaactatcctactcatgatttggagttggccgctgtggttcatgatttgaaaatctggcggcattatctcattggaaatcgctgcgaaatatataccgatcataagagtttgaaatacatcttcactcagtcagatctgaatcttcagcagagaagatggttagagctcatcaaagattatgatgtgggaatccactatcaccctagtaaggccaacgtggtcgccgacgcgctaagtcgaaaaagccattgcagcactcttggcgtccgtggcattccaccagaacttaatcaacagttggaagccctgaacctaagcatcgttagctatggattcttggctatgctggaagccaagcctaccttgctcgatcaaatccgcgaggctcagaagaatgatccagatattcatgggatcctcaagaatatgaaacagggtaaagccgctggtttcacagaagatgaacacggaaccctatggaacggaaatcatcgtgtcaaggcagagcaccaacgaccggccagacttctccaacctctccaagtaccagaatggaaatgggatgaaattgggatggatttcatcaccggagttccaaaaacccaaggcggatatgattctatatgggtaatcgtggatcgactaaccaaggtagcttggttcattcctgtgaagaccacctatggagggaacaaattagctgaactctacttcgctaggatcgtgagtctccatggcgttcctaagaaaattgtatctgataggggaagccaattcacctatcacccgcagacagatggacagaccgatcatccgaatcaggtcctagaagacctgggataagagtctcccctatgccgagttctcctacaataatagctaccaagccagcatacaaatggcaccctatgaagcgttgtatggccgcaaatgccggacaccactattgtgggaccaagttggggaaagccaagtgttcgggactgatatcctgagagaagctgaagctaaagtcagaaccatttgagataatctaaaggtggcatagtctcggcagaagagttatgcagacaaccgacgccgtaacctggaattcgcagtggacgattttgtgtatcttcgggtcacgctattgcggggcgtacataggtttcagacaaaagggaagctcccacctaggtttgtggggcctttccgcatcattgctcgacgcggagaagttgcttaccagttagagctgcccgcatccttgggcaacgtgcacgatgtgttccatgtgtcgcaactcaagaaatgccttcgagtgccgtccgagcaggctgattcagagcaaattgaagttcgcgaagacttgacctacgtggagaagccagtgaagattctggacaccatagagcgcaggaccaggaatcgggtaatccgtttttgcaaggtccaatggagcaaccatgccgaggaagaagctacttgggaacgtgaagacgagctgaaggcagcccatcccgatctcttcgccagttcttccgaatctcggggtcgagattccgtt

SEQ ID NO: 14247 - DNA, 4359 bp, Oryza sativa
  Clone ID: TFbOSC417437j.C1.o1.np
accgccaccccacccagcgcgccacccccgccgcaccacagcgcccccaacccccccccccacccgaaaccccaccccggcctcgcccccgcccgccccgcccgcccccccaacccggccccgcccccccctcgccccgacccccgccacacgcccgcccacccccctcccgccgccccccctcaccccccccccccccaccggccccgccgcgccccgccccccccaccccccgcgccgccccccatcccgcccgccccgccccccgccgccccgcccggaccccaccccccgacgcgcacaaccccactccccccccccgccccccccccggccccccccccgccccccccccgccgaacgccccgcaccccaagaggccagcccccgttaagccatccgtgcccccgggcgtcggcgacagggcggggcaacaccagaccgggctgacggcgaaccaggcgggaaaagcaccgcccggcgccctcagatgcagatgacgggtgggaacccacggcgccggccggtgtgagcccgggtgcgcccgggtccaccgtggacccacctcggccatataaggaccggtcttcgggcctctgttgcaaagcactaccgtacttccacatgtctagtggggcaaatgaaggctacacgagctgcggcccggtagtcgagatgtcatggcacagggccggtgtcctgctgctaggggctcagtcctgcctacctgtcccgggggttccggccgtaggtgggattgggtcgatgtacacctctgatcagagtataatctattcgaatagccgcgccctcggttatgggcaagccgagcaatgtacccaaatggccggcagcatcagccgtcgtggtctggacctgactggtttcgtcttggagctgcggggcatgtgcgttgtcctggggtatccgcatggagtggactaccagggcaggccgctcccggagcaggagggtgacgatgcagagccccacgctgcttgggaggttactgcagtgatcctcaccggctcacccgagaggacttcgttggcagtcaccgcgggtggagattctttctccgtcacttgccagaacgccgctctcctcgccatcggcactcttcaccagcgctacccggacgagttgcagcactcgccctaccgctaccaccctcgtcgcggaggagcccgcgactacgccaccttccgggatgctagctcggaggatgacgctaccatcatgcacctggcgcgcatggtggaggcgtacgacgcggctcgtatcgacttccatcagatggtgcgccgtgggatggtcgggaacaacatgaagatcctggagctgcgtcaggagaatctgcagctgaaaaaggacctagacgcagtggaggcgcagctgcatcagctcaagatcgcccagggagaggtctgtcgccccaagcgccgccgcgtctgccgcagccagaagatcaccgcccgcaagagcacctccaggcccgagcttgttagtcagtccctggcgtggacttgcttcgttgagatcccccgtggttcctcaggagggggaagcctccggcgttggtagcacggaggatgcgctgttgctcaccttccatggtgacgaccaggagaagtgctgtcaccggtgatggcaaccaacccgaaggcagcaaccacaacaaccatggcagcccacctccacctcctcctccgcctccaccaccaccaccagacaccaacgccattctcacccaaatcctcgcccagcaggccaacatgatggctgctttcctccaccacatccaaaatccgccacaacataatgctccaccaccacccccacaacactctaaactcgccgagttcctccgcatccgtccacctaccttctctagctccaacaaccccgtggatgcgttggattggttgcatgccgtggggaaaaagctagacaccgtgcagtgcagcgatgaggagaaagtcgtcttcgccgcccaccaattgcaggggcccgcatctctatggtgggaccatttccaggctacgcagccagaggggcagcctattacttgggcccgcttcaccgccgccttccggaggacccatgtgcccgccggagtcatggcccttaagaaaagggaattccgagagttgaagcaaggcaaccgctccgtgatggagtatttgcatgagttcaacaacctggcccggtacgccccggaggatgtacgggaaaatgaggaaaagcaggagaagttcttggcaggaatggaccctgagctgtccgtgcgtctagtctccggggactatccggatttccaacgtctggtggacaagagcatccgcttggaagccaagcacaaggaactggagtcgcacaagcgtcgcttggcgaatttccgcaatcaacagggagctaaccaaaggatccgctacaccaatccctatccagggggatcctcctcgcagcagcaacaacagcagcagcaaccatgctccgcgccccgacctcaattcgtggtgcgcgtcccacagccgcagcagcagcagagtcagcaagggacccgtgcgccccgtcctcctacgcccgccgtgcagtctggtcaaggccgcagggacgttcaaggtccgcagcgtctgtgcttcaactgcttcgagcccgggcactttgcggacaaatgcccaaaaccgcggcgccagcaaggccaagcgcctccccgctccaacaacggtggtaaggatgtcattcggggtcaggtgaaccacgtgacggccgaggacgtgctgacaactccagacgtcatcgttggtacgttcctcattcattccatccctgctaccattttgttcgactctggagcttcccactcgtttatatctgtgccattcgtggggagaaatcagttgggggtagaaaggcttaggaaccctctcctcatcaccacccctggaggggttatgacagcaaagtattatagtcctgccgtccctatagaaattcaggggattccttttccctcggatctgattcttttagacaccaagaacttggatgtgatccttgggatgaattggttggctcaattccaaggagtagtggattgtgcaagacgcactgtcactctgtaccgagggccggaacaaccggttgttttctttgcacccccaacctctgtcagtagttcagaacttcatcagataggactgtcagaaatccccatcgtcagagagttcggagacgtgtttccggaagaactacccggtatgccgcccaagcgagagattgagttccggatagatcttgctccaggaaccactcctctgtacaagcgaccctaccgtatggcagcaaatgaactggctgaagttaagaaacagttggaagagttgaaagaaaaggggtatatacgtccgagtacttccccctggggttctcctgtgatttttgtggagaagaaagacaagacgaagaggatgtgcgttgactacagagctctcaatgaagtcaccatcaaaaacaagtaccctcttccctggatcgatgatctgttcgatcagcttaaaggtgccacggtattctccaagattgatcttcgttccagatatcactagttgcgcatccgtgaagaagatattccgaagaccgcattcaccacgtgatacggactgtatgaattcacggtgatgtcattcggtttaaccaatgctcctgccttcttcatgaacttaatgaacaaagtgttcatggaatacttggataagtttgttgtggttttcattgatgacattctggtatactcacaatcagaggaagaccatcagcaccatctccgtctggtgttggggaagttgcgggaacatcaattgtatgccaaacttagcaagtgtgagttctggttgtccgaagtcaaattcttagggcacgtgatatctgctaaaggagttgctgtggaccccgaaacagtgaccgccgtcactgattggaagcaacccaagacagtcactcaaattcgcagtttcttaggtttggcaggatactaccggaggttcatcgagaacttctccaaaatcgctcgacccatgacacagttgttgaagaaagaagagaaatttgtgtggagcccgcaatgcgagaaggcgttccaaactctcaaagaaaagctggtttcctcgccagtgttaatcttgccggatactcgcaaggacttcatggtgtattgtgacgcttcgcgccaaggattggggtgcgtgctcatgcaggacggtcatgtggtggcctatgcctcacgccagctacggcctcatgaaggcaactttccaacggagagaagcatcaaggcaacacaaatccccgccaaga

SEQ ID NO: 14248 - DNA, 4467 bp, Oryza sativa
  Clone ID: TFbOSC417495j.C1.o2.fg
atgaagatcctggagctgcgtcaagagaacctgcagctcaagaaggacctagacgcggtggaggcgcagctgcatcagctcaagatcgcccagggagaggtctgccgccccaagcgccgccgcgtctgccgcagccagaagatcaccgcccgcaagagcacctccaggcccgagcttgttcgtcagtccctggcgtggacttgcttcgtcgagacccctcgtgccgagcccgcgcccgtggttccccaggagggggaagcctccggcgttggtagcacggaggatgcgctgttgctcaccttccgtcctggcccgtcgcagcggagaagtgctaataccggtgatggcaaccaacccgaaggcagcaaccaccaccaccagggcagcccacctccacctcctcctccgcctccaccaccaccgccagataccaacgccattctcacccaaatcctcgcccagcaggccaacatgatgactgctttcctccaccacctccaaaatccgccacaacataatgctcccccgccacctccccaacactctaaactcgccgagttcctccgcatccgcccacctaccttctctagctccaacaaccccgtggatgcgttggattggttgcatgctgtggggaaaaagctagacactgtgcagtgcagcgatgaggagaaagtcatcttcgccgcccaccaactgcagggactcgcatctctatggtgggaccatttccaggctacgcagccagaaggacagcctattacttgggctcgcttcaccgccgctttccggagaacccatgtgcccgccggagtcgtggcccttaagaaaagggaattccgagagttgaagcaaggcaaccgctccgtgatggagtatttgcatgagttcaacaacctggcccgttacgccccggaagatgtgcgggaagatgaggagaagcaagagaagttcttggcaggaatggaccctgagctgtccggtgctaaccaaagggtccgctacaccaatccctatccagggggatcctcctcgcagcagcaacaacagcagcagcagcctcgctccgcgcctcgacctcaattcgtggtgcgcgtcccacagccgcagcagcagcagaatcaacaagggactcgtgcgccccgtcctcctacgccaactgtgcagcctggtcaaggccgcagggacgctcaaggtccgcagcgtctgtgcttcaattgcttcgagcctgggcactttgcggataaatgcccaaagccaaggcgacagcaaggccaagcgcctccccgctccaacaacggtggtaaggacgtcattcggggtcgtgtgaaccacgtgacggctgaggacgtgctgacaactccagacgtcatcgttggtacgttcctcgttcattccatccctgctaccattctgttcgactctggagcttcccactcgtttatatctgtgccattcgtggggagaaatcagttgggggtagaaaggcttaggaaccctctgctcatcaccacccctggaggggttatgacagcgaagtattatagtcctgccgtccctatagaaattcaggggattccttttccctcggatctgattctgctagacaccaagaacttggatgtgatccttgggatgaattggttggctcaattccaaggagtagtggattgcgcgagacgcactgtcactctgtaccgaggtccggaacaaccggttgttttctttgcacctccaacctctgtcagtagttcagaactgcatcagataggactgtcagaaatccccatcgtcagggagttcggagacgtgtttccggaagaactacccgttatgccgcctaagcgagagattgagttccggatagatcttgctccaggaaccactcctctgtacaagcgaccctaccgtatggcagcaaatgaactggccgaagtcaagaaacagttggaagagttgaaagaaaaggggtatatacgtccgagcacttccccctggggtgctcctgtgatttttgtggagaagaaagacaagacgaagaggatgtgcgttgactacagagctctcaatgaagtcaccatcaaaaacaagtaccctcttccccggatcgatgatctgttcgatcagcttaaaggtgccactgtattctccaagattgatcttcgttccggatatcaccaattacgtattcgtgaagaagacattctgaagaccgcattcaccacgcgatacggactgtatgaattcacggtgatgtcattcggtttaaccaatgcacctgccttcttcatgaacttaatgaacaaagtgttcatggaatacttggataagtttgttgtggttttcattgatgacattctggtatactcacaatccgaggaagaccatcagcaccatctccgtctggtgttgggaaagttgcgggaacatcaattgtatgccaaacttagcaagtgtgagttctggttgtccgaagtcaaattcttagggcacgtgatatctgctaaaggagttgcggtggaccccgaaacagtgaccgccgtcactgattggaagcaacccaagacagtcactcaagtccgcagtttcttaggtttggcaggatactaccgaaggtttatcgagaacttctccaaaatcgctcgacccatgacgcagttgttgaaaaaagaagagaaatttgtgtggagcccgcaatgcgagaaggcgtttcaaactctcaaagaaaagctggtttcctcgccggtgttaatcttgccggatactcgcaaggatttcatggtgtattgtgacgcttcgcgccaaggattggggtgcgtgctcatgcaggatggtcatgtggtggcctatgcctcacgccagctacgacttcatgaaggcaactaccctacccatgatttggagttagccgcggtggttcatgctctaaaaatctggcggcactatctcatcgggaatcgctgtgaaatatatactgatcataagagtttgaaatacattttcactcagtcggacctgaatcttcggcaaaggagatggttagaactcatcaaggattatgatgtgggaattcactatcatcctggtaaggccaacgtggttgccgacgctctaagtcgaaaaagtcattgcaacactcttaacctccgtggcattccacccgaacttaatcaacagatggcagccctgaacctaagcatagttagtcgtggattcttggctgcgttggaagccaagcctgccttgctcgatcaaatccgcgaggctcagaagaatgatccggacatgcatggactcctcaagaatatgaaacagggtaaagccgctggtttcacagaggatgaacacggaaccctgtggaacggaaatcgagtatgcgttccagataacagagaacttaaacagctgatactccaggaagcccacgaaagtccttattccatccaccctggcagtacaaagatgtacttagacttgaaggagaaatactggtgggttagtatgaagcgggaaattgcagagtttgtggccctttgtgatgtgtgccagcgtgtcaaggcagagcaccaacgaccggccggacttctccaacccctccaagtacctgaatggaaatgggatgaaattgggatggacttcatcaccggacttccaaagacccaaggtggatatgattctatatgggtagttgtggatcgattaaccaaggtagctcgattcattcctgtgaagaccacctatggagggaacaaactagccgagctctacttcgataggatcgtgagtctccatggcgttcccaagaaaatcgtatccgataggggaagccaattcacctctcacttttggaagaagctccaagaagagctgggtacccgcttaaatttcagcaccgcgtatcacccgcagacagatggacagaccgagcgtctaaatcagatcctagaagatatgcttcgcgcatgtgtcctagatttcgggaagacctgggataagagtctcccctatgccgagttctcctacaataacagttatcaagccagcatacaaatggcaccttatgaagcgttgtatgggcgcaaatgccggacaccgctattgtgggaccaagttggggaaagccaagtgttcgggactgatatcctgagagaagctgaagcgaaggtcagaaccattcgggataatctaaaggtggcacagtcccggcagaaaagttatgcagataatcgtcgccgtaacctggaattcgcagtgggtgatcttgtgtatcttcgggtcacgccattgcgaggtgtacacaggtttcggacaaaagggaagctcgcacctcggtatgtgggtcctttccgtatcgttgctcgacgcggagaagtcgcttaccagttggagctgcccgcctccttgggcaacgtgcatgatgtgttccatgtgtcgcaactcaagaaatgtctccgagtgccatcctag

SEQ ID NO: 14249 - DNA, 2451 bp, Oryza sativa
  Clone ID: TFbOSC420793j.C1.o1.fg
atgactggcttcgtcttggagttgcgaggcatgtgcgtggccctggggtatccacacggagtggactaccaggccaggccgcttccagagcaggagggtgaggacgcggagccccacgctggttgggaggtcactgcagtgatcctcgctggctcttctgagcggacttcgctgacagtcaccgcgggtggcgactccttccccgccgcttgccagagcgccgctctcctcgccatcggcactcttcaccagcgctacccggacgagttgcagcactcgccctaccgctaccaccctcgtcgcggaggagcccgcgactacgccaccttccgggatgctagctcggaggatgacgctaccatcgtgcacctggcacgcatggtggaggcgtacgacgcggctcgtatcgacttccaccagatggtacgccgcgggatggtcgagaacaacatgaagatcctggagctgcgtcaggagaacctgcagctcaagaaggacctcgacgcagtggaggcgcagctgcatcagctcaaggtcgcccagggagagatctgccgccccaagcgtcgccgcgtctgccgcagccagaagatcaccgcccgcaagagcacctccaggcccgagcttgttcgtcagtccctggcgtggacttgcttcgtcgagacccctcgtgccgagcctgcgcccgtggttccccaggagggggaagcctccggcgttggtagctcggaggctccttctctgtttgctggttctgtgtggggttttcagatggtgacgaccaggagaaatgttagcaccggtgaaggcaaccaacccgaaggcagcgaccacaaccaccagggcaacccacctccacctcctcctccacctccacctccaccaccaccaccagacaccaacgccattctcacccaaatcctcgcccaacaagccaacatgatgactgctttcctccaccacctccaaaatccgccacaacagaatgctccaccaccacctccccaacactctaaactcgccgagttcctccgcatccgcccacctaccttctccagctccaacaaccccgtggatgctttggattggttgcatgccgtggggaaaaagctagacacggtgcagtgcagtgatgaggagaaagtcgtcttcgccgcccatcagctgcagggacccgcatctctctggtgggaccacttccaggctacgcagccagagggacagccgattacttggactcgcttcaccgccgctttccggagaacccatgtgcccgctggagtcgtggctcttaagaaaagggaattccgagagttgaagcaaggcaaccgctccgtgatggagtatttgcatgagttcaacaacctggcccgttacgctccggaggatgtgcgggaagatgaggagaagcaagagaagttcttggcaggaatggaccctgagctgtccgtccgtctagtctctggggactatccggattttcaacgactggtggacaagagcatccgcttggaagccaagcacaaggagctggaatcgcacaagcgccgcttggcgaatttccgcaatcaacagggtgctaaccagagggttcgctacaccaatccctatccagggggatcctcctcgcagcagcagcagcaacctcgcccagcgccccgacctcaattcgtggtgcgcgtcccacagccgcagcagcagcagaatcagcaagggactcgtgcgccccgtcctcctacgccagctgtgcagcccgttcaaggccgcagggacgctcaaggtcagcagcgtctgtgcttcaactgtttcgagcccgggcactttgcggataaatgcccgaagccaaggcgtcagcaaggccaagcgcctccccgctccaacaacggcgggaaggatgtcattcggggccgtgtgaatcacgtgacggccgaggacgtgctgacaactccagacgtcatcgttgttgtggatcgactaaccaaggtagctcgatttattcctgtgaagaccacctatggagggaacaagctagcggagctctacttcgccaggatctttcgccggcgtcttcaatggagccgagatctccgcggccggtttcctttctctccggccgccctctctctctcccgtcgctataaaatcgtcccccgtgcttcgctcttccgtttccgccgctcgccgctcgctctcgccgtcggattcgtgctcacgccgtgcacctctctctccgccgtcgccgtcgagctccggtccgccgccgtcgtcgctccggtcttcctcccgactcggcgtcacctccatccgcgtcgccgcgtcgtcgtcgaccccgtccgcatctccgtttcgcccgccgaccgtcggagcaccgtcgtcatcgtcatcccgaaccgcgccgccgccttcttccgcttcggccgccgttcccgtcgtcgccgtcgaccggggtga

SEQ ID NO: 14250 - DNA, 2103 bp, Oryza sativa
  Clone ID: TFbOSC4210j.C1.o1.fg
atgtcatggcacagggccggtgtcctgctgctaggggctcagttctgcctgcctgtcccgggtgttccggccatggccggcagcgtcacccgtcgtggtttggacatgactggcttcgtcttggagttgcggggcatgtgcgtggccctggggtatccacacggagtggactaccaggccaggccgctcccggagcaggagggtgacgatgcggagccccgcgctggttgggaggtcactgcagtgatcctcgctggctcttctgagcggacttcgctgacagtcaccgcgggtggcgattccttccccgccgcttgccagagcgccgctctcctcgccatcggcactcttcaccagcgctacccggacgagttgcagcactcgccctaccgctaccaccctcgtcgcggaggagcccgcgactacgccaccttccgggatgctagctcggaggatgacgctaccatcgtgcacctggcgcgcatggtggaggcgtacgacgcggctcgtatcgacttccatcagatggtgcgccgtgggatggtcgagaacaacatgaagatcctggagctgcgtcaggagaacctgcagctcaagaaggacctcgacgcggtggaggcgcagctgcatcagctcaagatcgcccagggagagatctgccgccccaagcgtcgccgcgtctgccgcagccagaagatcaccgcccgcaagagcacctccaggcccgagcttgttcgtcagtccctggcgtggacttgcttcgtcgagacccctcgtgccgagcccgcgcccgtggttccccaggagggggaagcctccggcgttggtagcacggaggttgtgtggggcatggttatgccgatggtgacgaccaggagaaatgctaacaccggtgatggcaaccaacccgaatgcagcaaccacaaccaccagggcaacccacctccacctcctcctcctcctccaccaccaccaccagacaccaacgccattctcacccaaatcctcgcccagcaagccaacatgatgaccgctttcctccaccacctccaaaacccgccacaacaaaatgctccaccaccacccccacaacactctaaactcgccgaattcctccgcatccgcccacctaccttctctagctccaacaaccccgtggatgctttggattggttgcatgccgtggggaaaaagttaggcactgtgcagtgcagcgatgaggagaaagtcatcttcgccgcccaccagctgcaaggacccgcatctctatggtgggaccacttccaggctacgcagccagagggacagcctattacttgggctcgcttcaccgccgctttccggagaacccatgtgcccgccggagtcgtggcccttaagaaaagggaattccgagagttgaagcaaggcaaccgctccgtgatggagtatttgcatgagttcaacaatctggcccgttacgctccggaggatgtgcgggaagatgaggagaagcaagaaaagttcttggcaggaatggaccccgagctgtccgtccgtctagtctctggggattatccggattttcaacgactggtggacaagagcatccgcttggaagctaagcacaaggagctggagtcgcacaagcgtcgcttggcgaatttccgcaatcaacagggtgctaaccaaagggtccgctacaccaatccctatccagggggatcctcctcgcagcagcaacaacagcagcagcaacctcgctccgcgccccgacctcaattcgtggtgcgcgtcccacagccgcagcagcagcagaatcagcaagggactcgtgcgccccgtcctcctacgccaactgtgcagcctggccaaggccgcagggacgctcaaggtcagcagcgtctatgcttcaactgcttcgagcccgggcactttgcggataaatgcccaaagccaaggcgtcagcaaggccaagcgcctccccgctccaacaacggcgggagggatgtcattcggggtcgtgtgaatcacgtgacggccgaggacgtgctgacaactccggacgtcatcgttggacggtcatgtggtagcctatgcctcacgtcagctacgacctcatga

SEQ ID NO: 14251 - DNA, 3690 bp, Oryza sativa
  Clone ID: TFbOSC421503j.C1.o5.fg
atgtcatggcacagggccggtgtcctgctgctaggggctcagtcctgcctgcctgtcccgggggttccggccgtaggtgggattgggtcggtactcttgtctatggctaggatgggtttgaaactatgtcacgtcttccgtctgtataccgtggtgatggccggcagcgtcacccgtcgtggtttgagcatgactggcttcgtcttggagctgcggggcatgtgcgttgtcctggggtatccacatggagtggactaccaggccaggccgcttccggagcaggagggtgacgatgcagagccccacgctgcttgggaggtcactgcagtgatcctctctggctctcccgagcggacttcgctggcagtcaccgcgggtggagattccttccccgccgcttgccagaacgccgctctcctcgctatcggcactcttcaccagcgctacccggacgagttgcagcactcgccctaccgctaccaccctcgccgcggaggagcccgcgactacgccaccttccgagatgctagctcggaggatgacgctaccatcgtgcacctggcgcgcatggtggaggcgtacgacgcggctcgtatcgacttccaccagatggtgcgccgtgggatggtcgagaacaacatgaagatcctggagctgcatcaggagaacctgcaactcaagaaggacttagacgcggtggaggcgcagctgcatcagctcaagatcgcccagggagaggtctgccgccccaagcgtcgccgcgtctgccgcagccagaagatcaccgcccgcaagagcacctccaggcccgagcttgtttgtcagtccctggcgtggacctgcttcgtggagacccctcgtgccgagcccgcgcccgtggttccccaggagggggaagcctccggcgttggtagcacggaggatgcgctgttgctcaccttccgtcctggcccgtcgcagcggagaaatgctgccaccggtgatggcaaccaacctgaaggcagcaaccacaaccaccagggcaacccacctccacctcctcctccgcctccaccaccaccaccagacaccaacgccattctcacccaaatcctcgcccagcaagccaacatgatgactgctttcctccaccacctccaaaatccgccacaacataatgctccaccaccacctccccaacactctaaactcgccgagttcctccgcatccgtccacctaccttctctagctccaacaaccccgtggatgcattggattggttgcatgccgtggggaaaaagctagacacggtgcagtgcagcgatgaggagaaagtcatcttcgccgcccaccagctgcaggggcccgcatctctatggtgggaccatttccaggctacgcagccagaggggcagcctattacttgggcccgtttcaccgccgctttccggaggacccatgtgcccgttggagtcgtgtcccttaagaaaagggaattccgagagttgaagcaaggcaaccgctccgtgatggagtatttgcatgagttcaacaacctggcccgttacactccggaggatgtgcgggaagatgaggagaagcaagagaagttcttggcaggaatggaccccgagctgtccgtccgtctagtctctggggactatccggattttcaacgtctggtggacaagagcatccgcttggaagccaagcacaaggaactggagtcgcacaagcgccgcttggcgaatttccgcaatcaacagggtgctaaccaaagggtccgctacaccaatccctatccagggggatcctcctcgcaacagcaacaacagcagcagcaacctcgctccgcgcctcgacctcaattcgtggtgcgcgtcccacagccgcagcagcagcagaatcaacaagggactcgtgcgccccgtcctcctacgccaactgtgcagcctggtcaaggccgcagggacgctcaaggtcagcagcgtctgtgcttcaactgcttcgagcccgggcactttgcggataaatgcccgaagccaaggcgtcagcaaggccaagcgcctccccgctccaacaacggtgcgaaggatgtcattcggggtcgtgtgaatcacgtgacggccgaggacgtgctgacaactccagacgtcatcgttggtacgttcctcgttcattccatccctgctaccattttgttcgactctggagcttcccactcgtttgtatctgtgccattcgtggggagaaatcagttgggggtagaaaggcttaggaaccctctgctcatcaccacccctggaggggttatgacagcaaagtattatagccctgccgtccctatagaaattcaggggattccttttccctcggatctgattctgctagacaccaagaacttggatgtgatccttgggatgaattggttggctcaattccaagtagtagtggattgcgcgagacgcactgtcactctgtaccgagggccggaacaaccggttgttttctttgcacccccaacctctgtcagtagttcagaactgcatcagataggactgtcagaaatccccatcgtcagggagttcggagatgtgtttccggaagaactacccggtatgccgcccaagcgagagattgagttccggatagatcttgctccaggaaccactcctctgcacaagcgaccctaccgtatggcagcaaatgaactggccgaagttaagaaacagttggaagagttgaaagaaaaggggtatatacgtccgagtacttccccctggggtgctcctgtgatttttgtagagaagaaagacaagacgaagaggatgtgcgtcgactacagagctctcaatgaagtcaccataaaaaacaagtaccctcttccccggatcgatgatctgttcgatcagcttaaaggtgccactgtattctccaagattgatcttcgttccggatatcaccaattacgtattcgtgaagaagatattccgaagaccgcattcaccacgcgatacggactgtatgaattcacggtgatgtcattcggtctaaccaatgcacctgccttcttcatgaacttaatgaacaaagtgttcatggaatacttggataagtttgtcgtggttttcattgatgacattctgatatactcacgatcagaggaagaccatcagcaccatctccgtctggtgttgggaaagttgcatgaacatcaattgtatgccaaacttagcaagtgtgagttctggttgtccgaagtcaaattcttagggcacgtgatatctgctaaaggagttgccgtggaccccgaaacagtgaccgccgtcactgattggaagcaacccaagacagttactcaagtccgcagtttcttaggtttggcaggatattaccggaggttcatcgagaacttctccaaaatcgctcgacccatgacacagttgttgaagaaagaagagaaatttgtgtggagcccgcaatgcgagaaggcgtttcaaactctcaaggaaaagctggtttcctcgccggtgttaatcttgccggatactcgcaaggacttcatggtgtattgtgacgcttcgcgccaaggattggggtgcgtgctcatgcaggacggtcatgtggtagcctatgcctcacgccagctacgacctcatgaaggcaactaccctacccatgacttggagttagccgctgtcacgtcctga

SEQ ID NO: 14252 - DNA, 5793 bp, Oryza sativa
  Clone ID: TFbOSC5440j.C1.o1.np
cctcgtccacccttccgtttcggtcgccgaccgccggaacgccgtcgaccccgtcgacccgatccgcgctgtcgccttccctcgctccgaccgccttttttgtcgtcgccgtcgacctagggtgagccatggaccgccgcctcttttcccccttcccttcccctctctcggccgccgctccgccgtgcctatggccgccgccggcgaccataggggcgcgggcgctgcctcccgccggctgcgccggccttggccgccctcgggcgcgtcgagtggctgccgcgtggggcccggccgtcagccgcccgcgcccttaggtgcggctgacgcgtgggacccacggcgccggccggtgtgagcccgggtgcacccggtccaccgtggacccacctcggccatataaggaccggtcttcgggcctctgttgcaaagcactaccgtacttccacatgtctagtggggcaaaggaaggctacacgagctgcggcccggtagtcgagatgtcatggcacagggccggtgtcctgctgctaggggctcagtcctgcctacctgtcccggaggttccggccgtaggtggggttgggtcgatgtacacctctgatcagagtataatctattcgaatagccgcgccctcggttatgggcaagccgagcaatgtacccaaatggccggcagcatcaaccgtcgtggtctggacctgaccggcttcgttttggagctgcggggcatgtgcgttgtcttagggtattcgcatggagtggactaccagggcaagcagctcccggagcaggagggtgacgatgcagagccccacgctgcttgggaggttactgtagtgatcctcactggctcacccgagaggacttcgttggcagtcaccgtgggtggagattctttctccgccgcttgccagaacgccgctctccttgccatcggcactcttcaccagctctacccggacgagttgcagcactcgccctaccgctaccaccctcgccgcggaggagcccgcgactacgccaccttccgggatgctagctcggaggatgacgctaccatcaggcacctggcacgcatggtggaggcgtacgacgcggcccgtatcgacttccatcagatggtgcgtcgcgggttggtcgagaacaacatgaagatcctggagctgcgtcaggagaatctgcagctgaagaaggacctagacgcagtggaggcgcagctgcgtcagctcaagatcgcccagggagaggtcggtcgccccaagtgtcgccgcgtctgccgcagcctgaagatcactgcccgcaagagtacctccaggcccgagcttgttcgtcagtccctggcgtggacctgcttcgtcgagaccccttgtgccgagcccgcgcccgtggttcctcaggaggatggagcctccggcgttggcagcacggaggatgcgctgctgctcaccttccatggtgacaaccaggagaagtgctgctaccggtgaaggcagtcaccccgaaggcagcaaccacaacaaccatggcagcccacctccacctcctccccctcctccaccaccaccaccagacaccaacgccatcctcacccaaatcctcgcccagcaggccaacatgatggctgctttcctccaccacatccaaaatccgccacaacataatgctccaccaccacccccacaacactctaaactcgccgagttcctccgcatccgtccacctaccttctctagctccaataaccccgtggatgcgttggattggttgcatgccgtggggaaaaagttagacaccgtgcagtgcagtgatgaggagaaagtcatcttcgccgcccaccaactgcaggggcccgcatctctatgttgggaccatttccaggctacgcagccaaaggggcagcctattacttgggcccgcttcaccgccgctttccggagaacccatgtgcccgccggagtcatggcccttaagaaaagggaattccgagagttgaagcaaggcaaccgctccatgatggagtatttgcatgagtttaacaacctggcccggtacgccctggaggatattcgtgaagatgaggagaagcaagagaagttcttggcaggaatggaccctgagctgtccgtgcgtcttgtctccggggactatccggatttccaacgtctggtggacaagagcatccgcttggaagccaagcacaaggaactggagtcgcacaagcgtcgcttggcgaatttccgcaaccaacagggggctaaccaaagggtccgctacaccaatccctatccagggggatcctccttgcagcagcaacagcagcaacaacctcgctccgcgccccgacctcaattcgtggtgcgtgtcccacagccgcagcaacagcagagtcagcaagggactcgtgcgccccgtcctcctacgccagctgtgcagcctggtcaaggccgccgggacgctcaaggtcagcagcgtctgtgcttcaactgcttcgagcctgggcactttgcggataaatgcccaaagccgaggcgccagcaaggccaagcgcctccccgctccaacaacggtggtaaggatgtcattcggggtcgtgtgaaccacgtgatggccgaggacgtgctgacaactccagacgtcatctttggtacgttccccattcattccatccctgctaccattttgttcgactctggagcttcccactcgtttatgtctgtgccattcgtggggagaaatcagttgggggtagaaaggcttaggaaccctctgctcatcaccacccctggaggggttatgacagcaaagtattatagccatgccgttcctatagaaattcagggaattccttttctctcggatctgattcttctagacaccaagaacttggatgtgatccttgggatgaattggttggctcaattccaaggagtagtggattgtgcaagacgcactatcactctgtaccgagggccggaacaaccggttgttttctttgcacccccaacctctgtcggcagttcagaacttcatcagataaaactgtcggaaatccccatcgtcagggagttcggagacgtgtttccggaagaactacccggtatgccgcccaagcgagagattgagttccggatagatcttgctccaggaaccgctcctctgtacaagcgaccctaccgtatggcagcaaatgaactggccgaagtcaagaaacagttggaagagttgaaagaaaaggggtatatacggccgagtatttccccctggggtgctcctgtgatttttgtggagaagaaagacaagacgaaagaggatgtgcgttgactacagagctctcaatgaagttactatcaaaaacaagtaccctcttccccggatcgatgatctgttcgatcagcttaaaggtgccacggtattctccaagattgatcttcgttccggatatcaccagttgcgcatccgtgaagaagacatcccgaagaccgcattcaccacgcgatacggactgtatgaattcacagtgatgtcgtttggtttaaccaatgctcctgccttcttcatgaacttaatgaacaaagtgttcatggaatacttggataagtttgttgtggttttcattgacgacattctggtgtactcacaattagaggaagaccatcagcaccatctccgtctggtgttgggaaagttgcgggaacatcaattgtatgccaaacttagcaagtgtgagttttggttgtccgaagtcaaattcttaggacacgtgatatctgctaaaggagttgctgtggaccccgaaacagcgaccgccgtcactgattggaagcaacccaagacagtcactcaaattcgcagttttttgggtttggcaggatactaccggaggttcatcgagaacttctccaaaatcgctcgacccatgacacagttgttgaagaaagaagagaaatttgtgtggagcccgcaatacgagaaggcattccaaactctcaaggaaaggctggtttcctcgccggttttaatcttaccggatactcgcaaggacttcatggtgtactgtgacgcttcgcgccaaggattggggtgcgtgctcatgcaggaaggtcatctggtagcctatgcctcacgccagctacggcctcatgaaggcaactaccctacccatgatttggagttagccgcggtggttcatgctctaaaaatctggcggcactatctcattgggaatcgctgtgaaatatatactgatcataagagtttgaaatacatcttcacccagtcggatctgaatcttcggcagaggagatggttagaactcatcaaggattatgatgtgggaattcactatcatcctggtaaggccaacgtggttgccgacgctctatgtcgaaaaagccattgcaacactcttaacgtccgtggcattccagccaaacttaatcaacagatggaagccctgaacctaagcatagttggtcgtggattcttggctacgctggaagccaagcctaccttgctcgatcaaatccgcgaggcccagaagaatgatccggatatgcgtggactcctcaagaatatgaaatagggtaaagccgctggtttcacagaggatgaacacggaaccctatggaacggaaatcggcgtgtcaaggcagagcaccaacgaccggccggacttctccaacctctccaagtaccagaatggaaatgggatgaaattgggatggatttcatcaccggacttccaaaaacccagggcggttatgattctatatgggtagtcgtggatcgactaaccaaggtggctcggtttattcctgtgaagaccacctatggagggaacaaactagctgagctctacttcgctaggatcgtgagtctccatggcgttcctaagaaaattgtatctgataggggaagccaattcacctctcacttttggaagaagctccaagaagagctgggtacccaattaaatttcagcaccgcgtatcacccgcagacagatggacagaccgagcgtctaaatcagatcctagaagatatgcttcgcgcatgtgtcctagatttcgggaagacctgggataagagtctcccctatgccgagttctcctacaataacagctaccaagccagcatacaaatggcaccctatgaagcgttgtatggacgcaaatgccggacaccgctattgtgggaccaagttggggaaaacaagtgttcggggctgatatcctgagagaagctgaagctaaagtcagaaccattcgggataatctaaaggtggcacagtcccggcaaaagagttatgcagataaccgacgccgtaatctggaattcgtagtggatgattttgtgtaccttcgggtcacgccattgcgaggtgtacataggtttcagacgaaagggaagctcgcacctcggtttgtgggtcctttccgtatcattgctcgacgcggggaagtcgcttaccagttggagctgcccgtttccttgggcaacgtgcatgatgtgttccatgtgtcgcaactcaagaaatgccttcgagtgccgtccgagcaggccgactcagagcagattgtagtttgcgaagacttgacctacgtgtagagactagtgaaaatcctggacaccatggagcgcaggaccaggaaccgggtaatccgtttttgcaagatccaatggagcaaccacgctgaggaagaacctacttgggagcgtgaagacgagatgaaggcagcccatcccaatctcttcgccagttcttccgaatctcggggtcgagattccgtt

SEQ ID NO: 14253 - DNA, 5334 bp, Oryza sativa
  Clone ID: TFbOSC5888j.C1.o4.fg
atggatgaagtcgggggtcgatggacattctccagggcaaatgaaggctacacgagctgcggcccgatggccggcagcgttacccgtcgtggtttggacatgactggcttcgtcttggagctgcgaggcatgtgcgtggtcttggggtatccacatggagtggattaccaggccaggccgctcccggagcaggagggtgaggatgcagagcctcacgctggttgggaggtcactgcagtgatcctctccggctctcccgagcggacttcgctggcagtcaccgcgggtggagactccttccccgccgcttgccagaacgccgctctcctcgccatcggcactcttcaccagcgctacccggacgagttgcagcactcgccctaccgctaccaccctcgtcgcggaggagcccgcgactacgccaccttccgagacgccagctcggaggatgacgctaccgtcgtgcatctggcacgcatggtggaggcgtacgacgcggctcgtatcgacttccatcagatggtgcgccgtggcatggtggagaacaacctgaagatcctggagctgcgtcaggagaacctgcagctcaagaaggacctcgacgcgttggaggcgcagctgcaccagctcaagatcgcccagggagagatcagccgtcccaagcgtcgccgcgtctgccgcagccagaagatcaccgcccgcaagagcacctccaggcccgagcttgttcgtcagtccctggcgtggacttgcttcgtcgagacccctcgtgccgagcctgcgcccgtggttccccaggagggggaagcctccggcgttggtagctcggaggctccttctctgtttgctggttccgtgtggggttttcagatggtgacgaccaggagaaatgttaacaccggtgaaggcaaccaacccgaaggcagcaaccccaaccaccaaggcaatccacctccgccaccaccgccagacaccaacgccattctcacccaaatcctcgcccagcaagccaacatgatgaccgctttcctccaccacctccaaaacccgccacaacagaatgctccaccaccacccccacaacactctaaactcgccgagttcctccgcatccgcccacctaccttctccagctccaacaaccccgtggatgctttggattggttgcatgccgtggggaagaagttagacacggtgcagtgcagcgatgaggagaaagtcgtcttcgccgcccatcagctgcagggacccgcatctctatggtgggaccatttccaggctacgcagccagaggggcaaccgattacttgggctcgcttcaccgccgctttccggagaacccatgtgcccgccggagtcgtggctctcaagaagagggaattccgggagttgaagcaaggcaaccgctccgtgatggagtatttgcatgagttcaacaatctagcccgttatgccccggaggatgtgcgggaagacgaggagaagcaggagaagttcttggcaggaatggaccctgagctgtccgttcgtctagtctctggggactatcctgattttcaacgactggtggacaagagcatccgcttggaagccaagcacaaggagctggaatcgcacaagcgccgcttggcgaatttccgcaatcaacagggtgctaaccagagggtccgctacaccaatccctacccagggggatcctcctcgcagcagcagcagcagcagcaacctcgcccagcgccccgacctcaattcgtggtgcgcgtcccacagccacagcagcagcagaatcagcaagggactcgtgcaccccgtcctcctacgccagctgtgcagcccgttcaaggccgcagggacgctcaaggtcagcagcgtctgtgcttcaactgcttcgagcccgggcactttgcggataaatgcccgaagccaaggcgtcagcaaggccaagcacctccccgctccaacaacggcgggaaggatgtcattcggggtcgtgtgaatcacgtgacggccgaggacgtgctgacaactccagacgtcatcgttggtacgttcctcgttcattccatccctgctacaattttgttcgactctggagcttcccactcgtttatatctgtgccattcgtggggagaaatcagttgggggtagaaaggcttagaaaccctctgctcatcaccacccctggaggggttatgacagcaaagtattatagccctgccgttcctatagaaattcaggggattccttttccctcggatctgattcttctagacacaaagaacttggatgtgatccttgggatgaattggttggcccaattccaaggggtagtggattgcgcgaggcgcactgtcactctgtaccgaggaccggaacaaccggttgttttctttgcaccctcaacctctgtcagaagttcggaacttcatcagatagaactgtcagaaatccccatagtcagagagttcggagacgtgtttccggaagaactacctggtatgccgcccaagcgagagattgagttccgaatagatcttgctccaggaaccactcctctgtacaagcgaccctaccgtatggcagcaaatgagctggccgaagttaagaaacagttggaagagttgaaagaaaaggggtacatacgtccgaagaagaaagacaagacgaagaggatgtgcgtcgactacagagctctcaatgaagtcaccataaaaaacaagtaccctcttccccggatagatgatctgttcgatcagcttaaaggtgccactgtattctccaagattgatcttcgttccggatatcaccagttacgtattcgtgaagaagatattccgaagaccgcattcaccacgcgatacgggttatatgaattcacggtgatgtcgttcggcttaaccaatgctcctgccttcttcatgaacttgatgaacaaagtgttcatggaatacttggataagttcgttgtggttttcatcgatgacattctgatatactcacaatcagaggaagaccatcagcaccatctccgtctggtgttgggaaagttgcgggaacatcaattgtatgccaagcttagcaagtgtgagttctggttgtccgaagtcaaattcttggggcacgtgatatctgctaaaggagttgctgtggaccccgaaacagtgaccgccgtcaccgattggaagcaacccaagacagtcactcagattcgcagtttcttgggtttggcaggatattaccggagattcatcgagaacttctccaaaatcgctcgacccatgacacagttgttgaagaaagaagagaaatttgtgtggagcccgcagtgcgagaaggcgttccaaactctcaaggaaaagctggtttcctcgccagtgttaatcttgccggatactcgcaaggatttcatggtgtattgtgatgcttcgcgccaaggattggggtgcgtactcatgcaggacggtcatgtggtagcctatgcttcacgtcagctacgtcctcatgaaggcaactaccctacacatgacttggagttagcagcggtggttcatgctctaaaaatctggcggcactatctcattgggaaccgctgtgaaatatatactgatcataagagtttgaaatacatcttcactcagtcagatctgaaccttcggcaaaggagatggttagaactcatcaaggattatgatgtgggaattcactatcatcctggtaaggctaacgtggttgccgacgctctaagtcggaagagccattgcaatactcttaacgtccgtagcattccgcccgagcttaatcaacagatggaagccctgaacctaagcatagttggtcgcggattcttggctgcgttggaagccaagcctaccttgctcgatcaaatccgcgaggctcagaagaatgatccggacatgcatggactcctcaagaatatgaaacagggtaaagccgctggtttcacagaggatgaacacggaaccctatggaacggaaagcgggtatgcgttccagataaccgagaacttaaacagctgatacttcaggaagctcacgaaagtccttattccattcacccgggcagtaccaagatgtacttagacttgaaggagaaatactggtgggttagcatgaagcgggaaattgcagaatttgtggctctatgtgatgtgtgccagcgtgtcaaggcagaacaccaacgaccggccggacttctccaacctctccaagtgccggaatggaaatgggatgaaattgggatggatttcatcaccggtcttccaaaaacccaaggtggatatgactctatatgggtaatagtggatcgattaaccaaggtagctcgattcattcctgtgaagaccacctatggagggaataaactagcggaactctacttcgctaggatcgtgagtctccatggtattcccaagaaaatcgtatctgataggggaagccaattcacctctcgcttttggaagaagctccaagaagagctgggtacccgattgaatttcagcaccgcctatcacccgcagacagatggacagaccgagcgtctaaatcagatcctagaagatatgctccgcgcatgtgtcctagatttcgggaagacttgggataagagtctcccctatgccgagttctcctacaataacagctatcaagccagcatacaaatggcaccatatgaagcgttgtacgggcgcaaatgccggacaccgctattgtgggaccaagttggagaaagtcaagtgttcgggactgatatcctgagagaagctgaagctaaagtcagaatcattcgggataatctaaaggtggcacagtcccggcagaaaagttatgcggataaccgtcgccgtgacctggaattcgcagtggatgactttgtgtatcttcgggtcacgccattgcgaggtgtacacaggtttcagacgaaagggaagctcgcacctcggtatgtgggtccctttcgtatcactgctcgacgcggagaagtcgcctaccagctggagttgcccgcctccttgggtaacgtgcatgatgtgttccatgtgtcgcaactcaagaaaagtctccgagtgccatccgagcaggccaactcagagcaaattgaagttcgcgaagacctgacctatgtggagaggccagtgaaaatcctggacaccatggagcgcaggaccaggaaccgagtaatccgtttttgcaaggtccagtggagcaaccacgccgaagaagaagctacttgggagcgcgaagacgaactgaaggcagcccatcccgatctcttcgccagttcttccgaatctcggggtcgagattccgtttaa

SEQ ID NO: 14254 - DNA, 2133 bp, Oryza sativa
  Clone ID: TFbOSC6120j.C1.o1.fg
atgtcgtggcagagggttggtgccctgctgcttggggctcagtcctgcctgcctgtcccggagatggccggcagcgtcacccgtcgtggtttggacatgactggcttcgtcttggagctgcggggcatgtgcgtggccctggggtatccacatggagtggactaccaggccaggccgcttccggatcaggagggtgacgacgcggagccccacgctggttgggaggtcaccgcagtgatcctctctggctctcccgagcggacttcgctggcagttaccgcgggtggagattccttccccgccgcttgccagaacgccgctctcctcgccatcggcactcttcaccagcgctacccggacgagttgcagcactcgccctaccgctaccaccctcgtcgcggaggagcccacgactacgccaccttccgggatgctagctcggaggatgacgctaccatcgtgcacctggcgcgcatggtggaggtgtacgacgcggctcgtatcgacttccatcagatggtgcgtcgcgggatggtcgagaacaatctgaagatcctggagctgcgtcaggagaacctgcagctcaagaaggacctagacgcggtggaggcgcagctgcatcagctcaagatcgcccagggagaggtctgccgccccaagcgtcgccgcgtctgccgcagccagaagatcaccgcccgcaagagcacctccaggcccgagcttgttcgtcagtccctggcgtggacttgcttcgtcgagacccctcgtgccgagcccgcgcccgtggttccccaggagggggaagcctccggcattggtagcacggaggctctttctctgtttgctggttctgtgtggggttttcagatggtgacgaccaggagaaatgctgccaccggtgatggcaaccaacccgaaggcagcaaccacaaccatcagggcaacccacctccacctcctcctccgcctccaccaccaccaccagacaccaacgccattctcacccaaatcctcgcccagcaagccaacatgatgactgctttcctccaccacctccaaaatccaccacaacataatgctccaccaccacccccacaacactctaaactcgccgagttcctccgtatccgcccacctaccttctctagctccaacaaccccgtggatgcgttggattggtttcatgccgtggggaaaaagctagacacggtgcagtgcagcgatgaggagaaagttatcttcgccgcccaccaactgcaggggcccgcatctctatggtgggaccatttccaggctacgcagccagaggggcagcctattacttgggcccgcttcaccgccgctttccggagaacccatgtgcccgccggagtcgtggcccttaagaaaagggaattccgagagttgaagcaaggcaaccgctccgtgatggagtatttgcatgagttcaacaacctagcccgttacgccccggaggatgtgcgggaagatgaggagaagcaagaaaagttcttggcaggaatggaccctgaactgtccgtccgtctagtctctggggactatccggattttcaacgattggtggacaagagcatccgcttggaagccaagcacaaggagctggagtcgcacaagcgccgcttggcgaatttccgcaatcaacagggtgctaatcaaaggggccgctacaccaatccctatccagggggatcctcctcgcagcagcaacaacagcagcagcaacctcgccccgcgccccgacctcaattcgtggtgcgcttcccacagccgcagcaacagcagaatcaacaagggactcgtgcgccccgtcctcctacgccaacggtgcagcctggtcaaggccgcagggacgctcaaggtcagcagcgtctgtgcttcaactgcttcgagcccgggcactttgcggataaatgcccaaagccaaggcgtcagcaaggccaagcgcctccccgctccaacaacggcgggaaggatgtcattcggggtcgtgtgaatcacgtgacggccgaggacgtgctgacaactccagacgtcatcgttgggagttcggagatgtgtttccggaagaactacccggtatgccgcccaagcgagagattgagttccggatag

SEQ ID NO: 14255 - DNA, 1957 bp, Oryza sativa
  Clone ID: TFbOSC6491j.C1.o1.fg
atgtcatggcacagggccggtgtcctgctgctgggggctcagtcctgcctgcctgtcccgggggttccggccatggccggcagcatcaaccgtcgtggtctggacctgactggctttgttttggagctgcggggcatgtgcgttgtcctggggtatgcgcatggagtggactaccagggcaggcagctcccggagcaggagggtgacgatgcagagccccacgctgcttgggaggttactgcagtgatcctcactggctcacccgagaggacttcgttggcagtcaccacgggtggagattctttctccgccgcttgccagaacgccgctctcctcgccatcggcactcttcaccagcgctacccggacgagttgcagcactcgccctaccgctaccaccctcgccgcggaggagcccgcgactacgccaccttccgggatgctagctcggaggatgacgctaccatcatgcacctggcgcgcatggtggaggcgtacgacgcggctcgtatcgacttccatcagatgctgaagaaggacctagacgcagcagaggcgcagctgcatcagctcaagatcgcccagggagaggtctgtcgccccaagcgccgccgcgtctgccgcagccagaagatcaccgcccgcaagagcacctccaggcccgagcttgttcgccagtccttggcatggacctgcttcgtggagacccctcgtgccgagcccgcgcccatggctcctcaggagggggaagcctccggcgttgatggtgacgaccaggagaagtgctgctacggtgaaggcagtcaccccgaaggcagcaaccacaacaaccagggcagtccacctccacctcctcctccgcctctaccaccaccaccagacaccaacgccattctcacccaaatcctcgcccagcaggccaacatgatgactgctctcctccaccacatccaaaatccgccacaacataatgctccaccaccacccccacaacactctaaactcgccgagtttctccgcatccgcccacctaccttctctagctccaacaaccccgtggatgcgttggattggttgcatgccgtggggaaaaagttagacactgtgcagtgcagcgatgaggagaaagtcatcttcgccgcccaccaactgcagggacccgcatctctatggtgggaccatttccaggctacgcagccagaggggcagcctattacttgggcccgttttaccgccgctttccggagaacccatgtgcccgccggagtcgtggcccttaagaaaagggaattccgagagttgaagcaaggcaaccgctccgtgatggagtatttgcatgagttcaacaacctggcccgttacgccccggaggatgtgcgggaagatgaggagaagcaagagaagttcttggcaggaatggaccctgagctgtccgtgcgtctagtctccggggactatccggacttccaacgtctggtggacaagagcatccgcttggaagccaagcacaaggaactggagtcgcacaagtgccacttggagaatttccgcaaccaacagggtgctaaccaaagggtccgctacaccaatccctatccagggggatcctcctcgcagcagcaaccacagcagcagcaacctcgctccgcgccccgacctcaattcgtggtgcgcgtcccacagccgcagcagcaacagaatcaacaagggactcgagcgccccgtcctcctacgccaactgtgcagcctggtcaaggccgcagggacgcttcaggtccgcagcgtctgtgcttcaactgcttcgagcccgggcactttgcggataaatgcccgaagccaaggcgtcagcaaggccaagcgcctccccgccccaacaacggtggtaaggatgtcattcagggtcgtgtgaaccatgtgacggccgaggacgtgctgacaactccagacgtcatcgttg

SEQ ID NO: 14256 - DNA, 1537 bp, Oryza sativa
  unsure (1)..(1537): unsure at all n locations
  Clone ID: TFbOSC7321j.C1.o1.fg
atggtggaggcgtacgacgcggctcgtatcgacttccatcagatggtgcgtcgtgggatggtcgagaacaacatgaagatcctggagctgcgtcaggagaacctgcagctcaaaaaggacctagatgcggtggaggcgcagctgcatcaactcaagatcgcccagggagaggtctgccgccccaagcgtcgccgcgtctgccgcagccagaagatcaccgcccgcaagagcacctccaggcccgagcttgttcgtcagtccctggcgtggacttgcttcgtggagacccctcgtgccgagcccacgcccgtggttccccagaagggggaagcctccggcgttgatggtgagaccaggagaaatgctgccaccagtgatggcaaccaacccgaaggcagcaaccacaacaaccatggcagcccacctccacctcctcctccgcctccaccaccaccaccagataccaacgccattctcacccaaatcctcgcccagcaggccaacatgatgactgcttttctccaccacctccaaaatccgccacaacataatgctccaccaccacctccccaacactctaaactcgccgagttcctccgcatctgtccacctaccttctctagctccaacaaccccgtggatgcgttggattggttgcatgccgtggggaaaaagctagacactgtgcagtgcagcgatgaggagaaagtcatcttcgccgcccatcagctgcagggacccgcatctctatggtgggaccatttccaggctacgcagccagagggacagcctattacatgggcccgcttcaccgccgctttccggagaacccatgtgcccgccggagtcgtggcccttaagaaaagggaattccgagagttgaagcaaggcaaccgctccgtgatggagtatttgcacgagttcaacaacctggcccgttacgctccggaggatgtgcgggaagatgaggagaagcaagagaagttcctggcaggaatggaccctgagctgtccgtctgtctagtctccggggattatccggatttccaacgtctggtggacaagagcatccgcttggaagccaagcacaaggaactggagtcgcacaagcgccgcttggcgaatttccacaaccaacagggtgctaaccaaagggtccgctacaccaatccctatccagggggatcctcctcgcagcagcaacagcagcagcagcaacctcgctccgcgcntngacctcaattcgtggtgcgcgtcccacagccgcagcaggagcagaatcaacaagggactcgtgcgccccgtcctcctccaccgactgtgcagcctggtcaaggccgcagggacgctcaaggtccgcagcgtctgtgcttcaactgcttcgagcccgggcactttgcggataaatgcccgaagccaaggcgtcagcaaggccaagcgcctccccgccccaacaacggtggtaaggacgtcattcggggtcgtgtgaaccatgtgacggccgaggacgtgctgacaactccagacgtcatcgttg

SEQ ID NO: 14257 - DNA, 1980 bp, Oryza sativa
  Clone ID: TFbOSC7370j.C1.o1.fg
atgactggcttcgtcttggagctgcggggcatgtgcgtggtcttggggtatccacatggagtggattaccaggccaggccgctcccggagcaggagggtgaggatgcagagcctcacgctggttgggaggtcactgcagtgatcctctccggctctcccgagcggatttcgctggcagtcacagcgggtggggactccttccccgccgcttgccagaacgccgctctcctcgccatcggcacccttcaccagcgctacccggacgagttgcagcactcgccctaccgctaccaccctcgtcgcggaggagcccgcgactacgccaccttccgagacgccagctcggaggatgacgctaccgtcgtgcacctggcacgcatggtggaggcgtacgacgcggctcgtatcgacttccatcagatggtgcgtcgtggcatggtggagaacaacctgaagatcctggagctgcgtcaggagaacctgcagctcaagaaggacctcgacgcagtggaggcgcagctgcaccagctcaagatcgcccagggagaggacagccgtcccaagcgtcgccgcgtctgccgcagccagaagatcaccgcccgcaagagcacctccaggcccgagcttgtccgtcagtccctggcgtggacctgcttcgtcgagacccctcgtgccgagcctgcgcccgtggttccccaggagggggaagcctccggcgttggtagctcggaggtcgtgtggggcatggttacgccgatggtgacgaccaggagaaatgttaacaccggtgaaggcaaccaacccgagggcagcaaccccaaccaccaaggcaatccacctccaccaccaccaccagacaccaacgccattctcacccaaatcctcgcccagcaagccaacatgatgaccgctttcctccaccacctccaaaacctgccacaacagaatgctccaccaccacctccccaacactctaaactcgccgagttcctccgcatccgcccacctaccttctccagctccaacaaccccgtggatgctttggattggttgcatgccgtggggaagaagctagacacggtgcagtgcagtgacgaagagaaagtcatcttcgccgcccaccagctgcaggggcccgcatctctatggtgggaccacttccaggctacgcagcccgaggggcagccgattacttgggctcgcttcaccgccgctttccggagaacccatgtgcccgccggagtcgtggctctcaagaagagggaattccgggagttgaagcaaggcaaccgctccgtgatggagtatttgcatgagttcaacaatctagcacgttatgccccggaggatgtgcgggaagatgaggagaagcaagagaagttcttggcaggaatggaccctgagctgtctgttcgtctagtctctggagactacccggacttccaacgtctggtggacaagagcatccgcttggaagccaagcacaaggagctggaatcgcacaagcgccgcttggcgaacttccgcaatcagcagggtgctaaccagagggtccgctacaccaatccctacccagggggatcctcctcgcagcagcaacagcagcagcagcaacctcgctccgcgcctcgacctcaatccgtggtgcgcgtcccacagcagcaacagcagcagaatcagcaagggactcgtgcgccccgtcctcctacgccagctgggcagcccgttcaaggccgcagggacgcttcaggtccgcagcggctgtgcttcaactgcttcgagcccgggcactttgcggataaatgcccgaagccaaggcgtcagcaaggccaagcgcctccccgctccaacaacggcgggaaggatgtcattcggggtcgtgtgaatcacgtgacggccgaggacgtgctgacaactccagacgtcatcgttggacggtcatgtggtagcctatgcctcacgccaactacgacctcatga

SEQ ID NO: 14258 - DNA, 1984 bp, Oryza sativa
  Clone ID: TFbOSC7911j.C1.o1.fg
atggccggcagcgttacccgtcgtggtttgcacatgactggcttcgtcttggagctgcgaggcatgtgcgtggtcttggggtatccacatggagtggattaccaggccaggccgctcccggatcaggagggtgaggatgcagagcctcacgctggttgggaggtcactgcagtgatcctctccggctctcccgagcggacttcgctggcagtcaccgcgggtggagattccttccccgccgcttgccagaacgccgctctcctcgccatcggcacccttcaccagcgctacccggacgagttgcagcactcgccctaccgctaccacccccgtcgcggaggagccagcgaccacgccaccttccgagacgccagctcggaggatgacgctaccgtcgtgcatctggcacgcatggtggaggcgtacgacgcggctcgtatcgacttccaccagatggtgcgtcgtggcatggtggagaacaacctgaagatcctggagctgcgtcaggagaacctgcagctcaagaaggacctcgacgcgttggaggcgcagctgcatcagctcaagatcgcccagggagagatcagccgtcccaagcgtcgccgcgtctgccgcagccagaagatcaccgcccgcaagagcacctccaggcccgagcttgttcgtcagtccctggcgtggacctgcttcgtcgagacccctcgtgccgagcctgcgcccgtggttccccaggagggggaagcctccggcgttggtagctcggaggttgtgtggggcatggttacaccgatggtgacgaccaggagaaatgctgctaccggtgatggcaaccaacccgaaggcagcaaccacaaccaccagggcaacccacctccacctccacctccgcctccaccaccaccgccagacaccaacgccattctcacccaaatcctcgcccagcaagccaacatgatgaccgctttcctccaccacctccaaaacccgccacaacagaatgctccaccaccacctccccaacactctaaactcgccgagttcctccgcatccgtccacccaccttctctagctccaacaaccccgtggatgctttggattggttgcatgccgtgggaaagaagctagacacggtgcagtgcagcgacgaagagaaagtcatcttcgccgcccaccagctgcagggacccgcatctctctggtgggaccacttccaggctacgcagccagaggggcagccgattacttgggctcgcttcaccgccgctttccggagaacccatgtgcccgccggagtcgtggctcttaagaagagggagttccgggagttgaagcaaggcaaccgctccgtgatggagtatttgcatgagttcaacaatctggcccggtacgctccggaggatgtgcgggcagacgaggagaagcaggagaagttcttggcaggaatggaccctgagctgtccgttcgtctagtctctggggactatcctgatttccaacgtctggtggataagagcatccgcttggaagccaagcacaaggagctggaatcgcacaagcgccgcttggcgaacttccgcaatcaacagggtgctaaccagagggtccgctacaccaatccctacccagggggatcctcctcgcagcagcagcagcagcagcagcaacctcgctccgcgcctcgaccacaattcgtggtgcgcgtcccacagccgcagcagcagcagaatcaacaagggactcgtgcgccccgtcctcctacgccagctgtgcagcccgctcaaggccgcagggacgctcaaggtcagcagcgtctgtgcttcaactgcttcgagcccgggcactttgcggataaatgcccaaagccaaggcgtcagcaaggccaagcgcctccccgctccaacaacggcgggaaggatgtcattcggggccgtgtgaatcacgtgacggccgaggacgtgctgacaactcccgacgtcatcgttg

SEQ ID NO: 14259 - DNA, 2196 bp, Oryza sativa
  Clone ID: TFbOSC7912j.C1.o1.fg
atgactggcttcgtcttggagctgcgaggcatgtgcgtggtcttggggtatccacacggagtggactaccaggccaggccgcttccgaagcaggagggtgaggatgcagagcctcacgctggttgggaggtcactgcagtgatcctctccggctctcccgagcggacttcgctggcagtcaccgcgggtggggattccttccccgccgcttgccagaacgccgctctcctcgccatcggcacccttcaccagcgctacccggacgagttgcagcactcgccctaccgctaccaccctcgtcgcggaggagcccgcgactacgccaccttccgagacgccagctcggaggatgacgccaccgtcgtgcatctggcacgcatggtggaggcgtacgacgcggctcgtatcgacttccaccagatggtgcgtcgtggcatggtggagaacaacctgaagatcctggagctgcgtcaggagaacctgcagctcaagaaggacctcgacgcgttggaggcgcagctgcatcagctcaagatcgcccagggagagatcagccgtcccaagcgtcgccgcgtctgccgcagccagaagatcaccgcccgcaagagcacctccaggcccgagcttgttcgtcagtccctggcgtggacctgcttcgtcgagacccctcgtgccgagcctgcgcccgtggttccccaggagggggaagcctccggcgttggtagctcggagggtgcgctgttgctcaccttccgtcctggcccgtcgcagcgctcttcttctctgtttgctggttctatgtggggttttcagatggtgacgaccaggagaaatgttaacaccggtgaaggcaaccaacccgagggcagcaaccccaaccaccaaggcaatccacctccaccaccaccacctgacaccaacgccattctcacccagatcctcgcccaacaagccaatatgatgaatgctttcctccaccacctccaaaatccaccacaacagaatgctccaccaccacccccacaacactctaaactcgccgaattcctccgcatccgcccacccaccttctctagctccaacaatcccgtagatgcgttggattggttgcatgccgtggggaagaagctagacacggtgcagtgcagtgacgaagagaaagtcatcttcgccgcccaccagctgcaagggcccgcatctctatggtgggaccatttccaggctacgcagccagagggacagccgattacttgggctcgcttcaccgccgctttccggagaacccatgtgcccgccggagtcgtggctctcaagaaaagggaatttcgagagttgaagcaaggcaaccgctccgtgatggagtatttgcatgagttcaacaatctggcccggtacgctccggaggatgtgcgggaagacgaggagaagcaggagaagttcttggcaggaatggaccctgagctgtccgtccgcttagtctctggggactatccggattttcaacgactggtggacaagagcatccgcttggaagccaagcacaaggagctggaatcgcacaagcgccgcttggcgaacttccgtaatcagcagggtgctaaccagagggtccgctacaccaatccctacccagggggatcctcctcgcaacagcagcagcagcagcaacctcgttccgcgcctcgacctcaattcgtggtgcgcgtcccacagccgcagcagcaacagaatcagcaagggacccgtgcaccccgtcctcctacgccaactgtgcagcccgttcaaggccgcagggacgctcaaggtcagcagcgtctgtgcttcaactgcttcgagcccgggcactttgcggataaatgcccaaagccaaggcgtcagcaaggccaagcgcctccccgctccaacaacggtggcaaggacgtcatccgtggtcgtgtgaatcacgtgacggccgaggacgtgctgacaaccccagacgtcatcgttgagaagaaagacaagacgaagaggatgtgcgtcgactacagagctctcaatgaagtcaccatcaaaaacaacgtgtcaaggcagaacaccaacgaccggccggacttctccaacctctccaagtgccagaatggaagtgggatgaaattgggatggatttcatcaccggacttccaaaaacccaaggtggatatgattctatatgggtaa

SEQ ID NO: 14260 - DNA, 5919 bp, Oryza sativa
  Clone ID: TFbOSC8726j.C1.o1.np
ccttccttctcgccggattcgagctcgcgacgtcgctctctctctccgccgtcgccgccgagctctggtccgccgccgtcgtcgccccggaccgcctcccacctcggcgccgcctcctttggcttcaccgcatcctcgccgacctcgtccacctctccgtttcggtcgccaaccgccggagcgccgtcgtccccgtcgacccgatccgcgccaccgcctccctccgctccggccgcctcccccgtcgccgccgtcgccccgggatgagctgtggaccgtcgcctcctttccccttcccttccctctctcggccgccgctccgccgcgccggtggtcgccggctccgaccatcggagcgtgggcgcgccgcctcccgccgaccgcgcaagcatggccgccctcgggcgtgccgagtggctaccgcgtggggcctggctgtcagccgcccgcgcccttgggtgcggctgacgtgtggggcccacagcgccgaccggtgtgagccccggggtgcatggttttgatggtagcacctcggccatatatggaccggtcttcgggcctctgttgcaaagcactaccgtacttccacatgtctagtggggcaaatgaaggctacacgagctgcggcccggtagtcgagatgtcatggcacagggccggtgtcctgctgctaggggctcagtcctgcctgcctgtcccgggggttccggccgtaggtgggattgggtcgatgtacacctctgatcagagtataatttattcgaatagccgcgccctcggttatgggcaagccgagcaatgtacccaaatggccggcagcgtcagccgtcgtggtctggacatgactggtttcgtcttggagctgcggggcatgtgcgttgtcctggggtatccgcatggagtggactaccagggcaggccgcttccggagcaggagggtgacgatgcagagccccacgctgcttgggaggttactgcagtgatcctcactggctctcccgagcggacttcgctggcagtcaccgcgggtggagattctttctccgccgcttgccagagcgccgctctcctcgccatctgcactcttcaccagcgctacccggacgagttgcagcactcgccctaccgctaccaccctcgccgcggaggagcccgcgactacgccaccttccgggatgctagctcggaggatgacgctaccatcatgcacctggcgcgcatggtggaggcgtacgacgcggctcgtatcgacttccatcagatggtgcgccgtgggatggtcgagaacaatctgaagatcctggagctgcgtcaagagaacctgcagctcaagaaagacctagacgcagtggaggcgcagctgcatcagctcaagatcgcccagggagaggtctgccgccccaagcgtcgccgcgtctgccgcagccagaagatcaccgcccgcaagagcacctccaggcccgagcttgttcgtcagtccctggcatggacttgcttcgtcgagaaccctcgtgccgagcccgcgcccgtggttccccaggagggggaagcctccggcgttggcagcacggaagatgcgctgttgctcaccttccatggtgatgaccaggagaagtgctagtaccggtgatggcaaccaacctgaaggcagcaaccacaaccaccagggcagcccacctccacctcctcctccgcctccaccaccaccaccagataccaacgccattctcacccaaatcctcgcccagcaggccaacatgatgattgctttcctccaccacctccaaaatccgccacaacataatgctccaccaccacccccacaacactctaaactcgccgagttcctccgcatccgtccacccaccttctttagctccaacaaccccgtggatgcgttggattggttgcatgccgtggggaaaaagctagacactgtgcagtgcagcgatgaggagaaagtcatcttcgccgcccaccagctgcaggggcccgcatctctatggtgggaccatttccaggctacgcagccagaggggcagcctattacttgggctcgcttcactgccgctttccggagaacccatgtgcccgccggagtcgtggcccttaagaaaagggaattccgagagttgaagcaaggcaaccgctccgtgatggagtatttgcatgagttcaacaacctggcccgttacgccccggaggatgtgcggagatgaggagaagcaagagaagttcttggcaggaatggaccctgagctgtccgtccgtctagtttccggggactatccggatttccaacgtctggtggacaagagcatccgcttggaagccaagcacaaggaactggagtcgcacaagcgccgcttggcgaatttccgcaatcaacagggtgctaaccaaagggtccgctacaccaatccctatccagggggatcgtcctcgcagcagcaacctcgctccgcgccccgacctcaattcgtggtgcgcgtcccacagccgcagcaacagcagagtcagcaagggactcgtgcgccccgtcctcctacaccaactgtgcagcctggtcaaggccgcagggacgctcaaggtccgcagcgtctgtgcttcaactgcttcgagcctgggcactttgcggataaatgcccgaagccgaggcgccagcaaggccaagcgcctccccgctccaacaacggtggtaaggatgtcattcggggtcgtgtgaaccacgtgacggccgaggacgtgctgacaactccagacgtcatcgttggtacgttcctcattcattccatccctgctaccattttgttcgactctggagcatcccactcgttcatatctgtgccattcgtggggagaaatcagttgggggtagaaaggcttaggaaccctctgctcatcaccacccctggaggggttatgacagcaaagtattatagtcctgccgtccctatagaaattcaggggattccttttccctcggatctgattcttctagacaccaagaacttggatgtgatccttgggatgaattggttggctcaattccaaggagtagtggattgcgcgagacgcactgttactctgtaccgagggccggaacaaccggttgttttctttgcacccccaacctctgtcagaagttcagaacttcatcagatagtactgtcagaaatccccatcgtcagggagttcggagatgtgtttccggaagaactacccggtatgccgcccaagcgagagattgagttccggatagatcttgctccaggaaccactcctctgtacaagcgaccctaccgtatggcagcaaatgaactggccgaatttaagaaacagttggaagagttaaaagaaaaggggtatatacgtccgagtacttccccctggggtgctcctgtgatttttgtggagaagaaagacaagacgaagaggatgtgcgttgactacagagctctcaatgaagtcaccatcaaaaacaagtaccctcttccccggatcgatgatctgttcgattagcttaaaagtgccacggtattctccaagatcgatcttcgttccggaaatcaccagttgcgcattagggaagaagatattccgaagaccgcattcaccacgcgatacggactgtatgaattcacggtgatgtcattcggtctaaccaatgctcctgccttcttcatgaacttaatgaacaaagtgttcatggaatacttggataagtttgttgtggtgttcattgatgacattctgatatactcacaatcagaggaagaccatcagcaccatctccgtctggtgttgggaaagttgcgggaacatcaattgtatgccaaacttagcaagtgtgagttctggttgtccgaagtcaaattcttagggcacgtgatatctgctaaaggagttgctatggaccccgaaacagtgaccgccgtcactgattggaagcaacccaagacagtcactcaagtccgcagtttcttaggtttggcgggatactaccggaggttcatcgagaacttctccaaaatcgctcgacccatgacacagttgttgaagaaagaagagaaatttgtgtggagcccgcaatgcgagaaggcgtttcaaactctcaaagaaaagctggtttcctcgctagtgttagtcttgccagatactcgcaaggatttcatggtgtattgtgacgcttcgcgccaaggattggggtgcgtgctcatgcaggacggtcatgtggtggcctatgcctcacgccagctacggcctcatgaaggcaactaccctacccatgatttggagttagccgcggtggttcatgctctaaaaatctggcggcactatctcattgggaatcgctgtgaaatatatactgatcataagagtttgaaatacatcttcacccagtcggatctgaatcttcggcaaaggagatggttagaactcatcaaggattatgatgtgggaattcactatcatcctggtaaggccaacgtggtcgccgacgctctaagtcgaaagagccattgcaacactcttaacgtccgtggcattccacccgaacttaaccaacagatggaagccctgaatctgagcatagtgggtcgtggattcttggctacgctggaagccaagcccaccttgctcgatcaaatccgcgaggctcagaagaacgacccggacatgcgtggactcctcaaaaatatgaaacagggtaaagccgcgggtttcacagaggatgaacacggagccctatggaacggaaatcggcgtgtcaaggcagagcaccaacgaccggccggacttctccaacctctccaagtaccagaatggaaatgggatgaaattgggatggacttcatcaccggacttccaaaaacccaaggtggatatgattctatatgggtagttgtggaccggttaaccaaggtagctcgatttattcctgtgaagaccacctatggagggaacaaactagccgagctctacttcgctaggatcgtgagtctccatggcgttcccaagaaaatcgtatctgataggggaagccaattcacctctcacttttggaagaagctccaagaagagctgggtacccgattaaatttcagcaccgcgtatcacccgcagacagatggacagaccgagcgtctaaatcagatcctagaagatatgcttcgcgcatgtgtcctagatttcgggaagacctgggataagagtctcccctatgccgagttctcctacaataacagctaccaagccagcatacaaatggcaccttatgaagcgttgtatgggcgcaaatgccggacaccgctcttgtgggaccaagttggggaaagtcaagtgttcgggactgatatcctgagagaagctgaagcgaaggtcagaaccattcgggataatttaaaggtggcacagccacggcagaaaagttatgcagataaccgtcgccgtaacctggaattcgcggtggacgattttgtgtaccttcgaatcacgccattgcggggtgtacacaggtttcggacaaaagggaagctcgcacctcggttcgtgggtcctttccgtatcattgctcggcgcggagaagtcgcttaccagttggagctgcccgcctccttgggcaacgtgcatgatgtgttccatgtgtcgcaactcaagaaatgtctccgagtgccatccgagcaggccgactcagagcaaattgaagttcgcgaagacttgacctacgtggagaggccagtgaaaatcctggacaccatggagcgcaggaccaggaaccgggtaatccgtttttgcaaggtccagtggagcaaccacgccgaagaagaagctacctgggagcgtgaagacgagctgaaggcagcccatcccgatctcttcgccagttcttccgaatctcggggtcgagattccgtt

SEQ ID NO: 14261 - DNA, 5563 bp, Oryza sativa
  Clone ID: TFbOSC900012j.C1.o12.np
atggatgaagtcgggggtcgatggacattctccagggcaaatgaaggctacacgagctgcggcccggtagtcgagatgtcgtggcagagggttggtgccctgctgcttggggctcagtcctgcctgcctgtcccggaggttccggccgtaggcgggattgggtcgatgtacacctctgatcagagtataatctattcgaatagccgcgccctcggttatgggcaagccgagcaatgtacccaaatggccggcagcatcaaccgtcgtggtctggacctgactggcttcgttttggagctgcggggcatgtgcgttgtcctggggtatccgcatggagtggattaacagggcaagcagctcccggagcaggagggtgccgatgcagagccccacgctgcttgggaggtcactgcagtgatcctcactggctcacccgagaggacttcgttggcggtcaccgcgggtggagattctttctccgccgcttgccagaacgccgctctccttgccatcggcactcttcaccagcgctacccggacgagttgcagcactcgccctaccgctaccaccctcgtcgcggaggagcccgcgactacgccaccttccgggatgctagctcggaggatgacgctaccatcatgcaccaggcgcgcatggtggaggcgtacgacgtggctcgtatcgacttccatcagatgatgcatcgcgggttggtcgagaacaacatgaagatcctggagctgcgtcaggagaatctgcagctgaagaaggacctagacgcagtggaggcgcaactgcgtcagctcaagatcgcccagggagaggtctgtcgccccaagcgtcgccgcgtctgccgcagccagaagatcaccgctcgcaagagtacctccaggacctgtttcgtcgagacccctcgtgccgagcgcgcgcctgtggttcctcaggaggatggagcctccggcgttggcagcacggaggatgcgctgatgctcaccttccgtcctggcccatcgcagctgtaggcgagcagttagtaggtttgcgcatggtgacgaccaggagaagtgctgctaccggtgaaggcagtcaccccgagggcagcaaccacacaaccatggcagcccacctccacctccccctccgcctccaccaccaccaccagacaccaacgccattctcacccaaatcctcgcccagcaggccaacatgatggctgctttcctccaccacatccaaaatccgccaccacataatgctccaccaccacccccacaacactctaaactcgctgagttcctccgcatccgtccgcctaccttctctagctccaataaccccgtggatgcgttggattggttgcatgccgtggggaaaaagttagacaccgtgcagtgcagcgatgaggagaaagtcatcttcgccgcccaccaattgcaggggcccgcatctctatggtgggaccatttccaggctacgcagccagaggggcaacctattacttgggcccgcttcaccgccgctttctggagaacccatgtgcccgccggagtcatggcccttaagaaaagggaattccgagagttgaagcaaggcaaccgctccgtgatggagtatttgcatgagtttaacaacctggcccggtacgccccggaggatgttcgtgaagatgaggagaagcaagagaagttcttggcaggaatggaccctgagctgtccgtccgtctagtctccggggactatccggatttccaacgtctggtggacaagagcatccgcttggaagccaagcacaaggaactggagtcgcacaagcgtcgcttggcgagtttccgcaaccaacagggggctaaccaaagggtccgctacaccaatccctatccagggggatcctcctcacagcagcagcaacagcagcagcaacctcgctccgcgccccgacctcaattcgtggtgcgcgtcccacagccgcagcaacagcagagtcagcaagggactcgtgcgccccgtcctcctacgccagccgtgcagcctggtcaaggccgcagggacgttcaaggtccgcaacgtctgtgcttcaactgcttcgagcctgggcactttgcggataaatgcccaaagccgaggcgccagcaaggccaagcgcctccccgctccaacaacggtggtaaggatgtcattcggggtcgtgtgaaccacgtgacggccgaggacgtgctgacaactccagacgtcatcgttggtacgttcctcattcattccatccctgctaccattttgttcgactctggagcttcccactcatttatatctgtgccattcgtggggagaaatcagttgggggtagaaaggcttaggaaccctctgctcatcaccacccctggaggggttatgacagcaaagtattatagccctgccgttcctatagaaatctagggaattccttttctctcggatttgattcttcttgacaccaagaacttggatgtgatccttgggatgaattggttggctcaattccaaggagtagtggattgtgcaagacgcactgtcactctgtaccgagggccggaacaaccggttgttttctttgcacccccaacctctgtcggtagttcagaacttcatcagataagactgtcggaaatccccatcgtcagagagttcggagacgtgttttaggaagaactacctggtatgcctcccaagcgagagattgagttccggatagatcttgctccaggaaccactcccctgtacaagcgaccctaccgtatggcagcaaatgaactggccgaagttaagaaacaattggaagagttgaaaggaaaggggtatatacggccgagtacttccccctggggtgctcctgtgatttttgtggaaaagaaagacaagacgaagaggatgtgcgttgactacagagctctcaatgaagttactatcaaaaacaagtaccctcttccccggatcgatgatctgttcgatcagcttaaaggtgccactgtattctccaagattgatcttcgttccggatatcaccagttgcgcatccgtgaagaagatattccgaagaccgcattcaccacgcaatacggactatatgaattcacggtgatgtcgttcggtttaaccaatgctcctgccttcttcatgaacttaatgaacaaagtgttcatggaatacttggataagtttgttgtggttttcattgatgacattctggtatactcacagtcagaggaagaccatcagcaccatctccgtctggtgttgggaaagttgcgggaacatcaattgtatgccaaacttagcaagtgtgagttctggttgtccgaagtcaaattcttagggcacgtgatatctgctaaaggagttgctgtggaccccgaaacagtgaccgccgtcaccgattggaggcaacccaagacagtcactcaaattcgcagtttcttgggtttggcaggatactaccggaggttcatcgagaacttctccaaaatcgctcgacccatgacacagttgttgaagaaagaagagaaatttgtgtggagcccgcaatgcgagaaggcgttccaaactctcaaggaaaagctggtttcctcgccagtgttaatcttaccggatactcgcaaggacttcatggtgtattgtgacgcttcgcgccaaggattggggtgcgtgctcatgcaggaaggtcatgtggtagcctatgcctcacgccagctacggccccatgaaggcaactaccctacccatgatttggagttggctgctgtggttcatgctctaaaaatctggcggcattatctcattgggaatcgctgtgaagtatatactgatcataagagtttgaaatacatcttcactcagtcggatctgaatcttcggcagagaagatggttagagctcatcaaggattatgatgtgggaattcactatcatcctggtaaggccaacatggtcgccgacgctctaagtcgaaaaagccattgcaacactcttgacgtccgtggcattccacccgaacttaatcaacagatggaagccctgaacctaagcatagttggtcgtggattcttggctacgctggaagccaagcctaccttgctcgatcaaatccgcgaggctcagaagaatgatccggatatgcgtggactcctcaagaatatgaaacagggtaaagccgctggtttcacagaggatgaacacagaaccctatggaacgggaatcgggtatgcgttccagacgacagagaacttaaacagctaatacttcaggaagctcacgaaagtccttactccatccaccctggcagtacgaagatgtacttagacttgaaagggaaatactggtgggttagtatgaagcgggaaattgcagagttcgtggccctttgtgatgtgtgccagcgtgtcaaggcagagcaccaacgaccggccggacttctccaacctctccaagtaccagaatggaaatgggatgaaattgggatggatttcatcaccggacttccaaaaacccaaggtggatatgattctatatgggtagttgtggaccgattaaccaaggtagctcggtttattcttgtgaagaccacctatggagggaacaaactagccgagctctacttcgctaggatcgtgagtctccatggcgttcctaagaaaatcgtatctgataggggaagccaattcacctctcacatttggaagaagctccaagaagagttgggtacccgattaaatttcagcaccgcgtatcacccgcagacagatggacagaccgagcgtctaaatcagatcctagaagacatgcttcgtgcatgtgtcctagatttcgggaagacctgggataagagtctcccctatgccgagttctcctacaataacagctaccaagccagcatacaaatggcaccctatgaagcgttgtatggacgcaaatgccagacaccgctattgtgggaccaagttggggaaagctaagtgttcgggactgatatcctgagagaagctgaagctaaagtcagaaccattcgggataatctaaaggtggcacagtcccggcagaagagttatgcagataaccgacgccgtaatctggaattcgcagtggacaattttgtgtacctttgggtcacgccattgcgaggtgtacacaggtttcagatgaaagggaagctcgcacctcggttcgtgggtcctttccgtatcattgctcggcgcggagaagtcgcttaccagttggagctgcccgcctccttgggcaacgtgcatgatgtgttccatgtgtcgcaactcgagaaatgccttcgagtgccatccgagtaggccgactctgagcagattgaagttcgcgaagacttgacctacgtggagagaccagtgaaaatcctggacaccatggaacgcaggaccaggaaccgggtaatccgtttttgcaaggtccaatggagaaaccacgctgaggaagaagctacttgggagcgtgaagacgagctgaaggcagcccatcccgatctcttcgcccgttcttccgaatctcggggtcgagattccgtt

SEQ ID NO: 14262 - DNA, 1385 bp, Oryza sativa
  unsure (1)..(1385): unsure at all n locations
  Clone ID: TFbOSC900012j.C1.o15.np
aacggcctaaagtcctgatttaggaaaccgataccgtattggttaaggtttctatcttgtaaccctgccccccaacctatataacccggagaagcgctgctatcggggagggcagtcaccccgaaggcagcaacnnnnnnnnnnnnnnnnnnnnnnnnnnnnnnnnnnnnnnnnnnnnnnnnnnnnnnnnnnnnnnnnnnnnnnnnnnnnnncaaatactcgcccagcaggccaacatgatggctgctttcctccaccacatccagaatctgccgcaaaacaatgctccacctccaccaccacccccacagcactctaagcttgccgagttcctccgcatccgcccgcctaccttctctagctcccataaccccattgatgctttggactggttgcatgccgtggggaaaaagttggacaccgtacagtgcaatgatgaggagaaagtcatcttcgccgctcaccaactgcaggggcccgcatctctatggtgggaccacttccaggctacgcagccagagggacagcctatcacctgggcccgtttcactgccgccttccggaggacccatgtgcccgccggagtcatggcccttaagaagagggaatttcgggagttgaaacaaggcaaccgctccgtgatggagtatttgcacgagttcaataatttggcccggtacgccccagaggatgttcgtgaagatgaggagaagcaggagaaattcctggcagggatgaaccctgagctgtctgtgcgtctggtctccggggactatcctgatttccagcgcctggtggacaagagcatccgcctggaagccaagcaaaaggaattggagtcgcacaagcgtcgcttggcgaatttccgcaaccaacgggggctaaccaaaggatccgctacaccaatccttatccaaggggatcctcctcgcagcagcagcaacagcaacctcgctccgcgcccttacctcaattcgtgcctggacaaggccacagggatgctcaaggtcaacagcgtctgtgcttcaactgcttcgagcccgggcactttgcggataaatgcccaaagccgaggcgccagcaaggccaagcgcctccccgccccaacaacggtggtaaggatgtcattcggggccgtgtgaaccacgtgactgccgaggatgtgttgacaactccagacgtcatcgttggtacgttcctcattcattccatccctgctaccattttgttcgactctagagcttcccactcgtttatttctgtgccattcgtggggagaaatcagctgggggtagaaaggcttatgaaccctctgctcatcaccacccctggaggtgttatgacaacaaagtattatagccctgccgttcctatagaaatccaag

SEQ ID NO: 14263 - DNA, 5373 bp, Oryza sativa
  Clone ID: TFbOSC900028j.C1.o18.fg
atggatgaagtcgggggtcgatggacattctccaaggcaaatgaaggctacacgagctgcggcccgatggccggcagcgtcacccgtcgtggtgtggacatgactggcttcgtcttggagctgcgaggcatgtgcgtggtcttggggtatccacatggagtggattaccaggccaggccgctcccggagcaggagggtgaggatgcagagcctcacgctggttgggaggtcactgcagtgatcctctccggctctcccgagcggacttcgctggcagtcaccgcgggtggggattccttccccgccgcttgccagaacgccgctctcctcgccatcggcactcttcaccagcgctacccggacgagttgcagcactcgccctaccgctaccaccctcgtcgcggaggagcccgcgactacgccaccttccgagacgccagctcggaggatgacgctaccgtcgtgcatctggcacgcatggtggaggcgtacgacgcggctcgtatcgacttccatcagatggtgcgtcgtggcatggtggagaacaacctgaagatcctggagctgcgtcaggagaatctgcagctcaagaaggacctcgacgcgttggaggcgcagctgcatcagctcaagatcgcccagggagaggacagccgtcccaagcgtcgccgcgtctgccgcagccagaagatcaccgcccgcaagagcacctccaggcccgagcttgttcgtcagtccctggcgtggacttgtttcgtcgagacccctcgtgccgagcctgcgcccgtggttccccaggagggggaagcctccggcgttggtagctcggaggctccttctctgtttgctggtgctgtgtggggttttcagatggtgacgaccaggagaaatgttaacaccggtgaaggcaaccaacccgaaggcagcaaccccaaccaccaaggcaatccacctccaccaccaccaccagacaccaacgccattctcacccagatcctcgcccaacaagccaacatgatgactgctttcctccaccacctccaaaatccaccacaacagaatgctccaccaccccctccccaacactccaaactcgccgaattcctccgcatccgcccacccaccttttctagctccaacaaccctgtggatgcgttggattggttgcatgccgtggggaagaagctggacactgtgcagtgcagtgatgaagagaaagtcatcttcgccgcccatcagctgcaggggcccgcatccctatggtgggaccacttccaggctacgcagccagcgggacagccgatcacttgggcccacttcaccgccgctttccggagaacccatgtgcccgccggagtcgtggctcttaagaaaagggaattccgagagttgaagcaaggcaaccgctccgtgatggagtatttgcacgagttcaacaatctggcccggtacgctccggaggatgtgcgggaagatgaggagaagcaagagaagttcttggcaggaatggaccctgagctgtccgttcgtctagtctctggggactatcctgattttcaacgactggtggacaagagcatccgcttggaagccaagcacaaggagctggaatcgcacaagcgccgcttggcgaatttccgcaatcagcagggtgctaaccagagggtccgctacaccaatccctacccagggggatcctcctcgcagcagcaacaacagcagcagcaacctcgcccagcgccccgacctcaattcgtggtgcgcgtcccacagccgcagcaacagcagaatcagcaagggactcgtgcgccccgtcctcctacgccagctgggcagcccgttcaaggccgcagggacgcttcaggtccgcagcggctgtgcttcaactgcttcgagcccggacactttgcggataaatgcccaaagccaaggcgtcagcaaggccaagcgcctccccgctccaacaacggcgggaaggatgtcattcggggtcgtgtgaatcacgtgacggccgaggacgtgctgacaactccagacgtcatcgttggtacgttcctcgttcattccatccctgctacaattttgttcgactctagagcttcccactcgtttatatctgtgccattcgtggggagaaatcagttgggggtagaaaggcttagaaaccctctgcttatcaccacccctggaggggttatgacagcaaagtattatagccctgccgtccctatagaaattcaggggattccttttccctcggatctgattcttctagacacaaagaacttggatgtgatccttgggatgaattggctggcacaattccaaggagtagtggattgcgcgagacgcactgttactctgtaccgaggaccagaacaaccggttgttttctttgcacctccaacctctgtcagaagttcagaactgcatcagataggtctgtcagaaatccccatcgtcagagagttcggagacgtgtttccggaagaactacctggtatgccgcccaagcgagagattgagttccggatagatcttgctccaggaaccactcctctgtacaagcgaccctaccgtatggcagcaaatgaactggccgaagttaagaaacagttggaagaattgaaagaaaaggggtatatacgtccgagtacttccccttggggtgctcctgtgatttttgtagagaagaaagacaagacgaagaggatgtgcgtcgactacagagctctcaatgaagtcaccatcaaaaacaagtaccctcttccccggatcgatgatctgttcgatcagcttaaaggtgccactgtattctccaagattgatcttcgttccggatatcaccaattacgtattcgtgaagaagatattccgaagaccgcattcaccacgcgatacgggctgtatgaattcacggtgatgtcgttcggcttgaccaatgctcctgccttcttcatgaacttaatgaacaaagtgttcatggaatacttggataagttcgttgtggttttcatcgatgacattctgatatactcacaatcagaggaagaccatcagcaccatctccgtctggtgttgggaaagttgcggaaacatcaattgtatgccaagcttagcaagtgtgagttctggttgtccgaagtcaaattcttggggcacgtgatatctgctaaaggagttgctgtggaccccgaaacagtgaccgccgtcaccgattggaagcaacccaagacagtcactcagattcgcagtttcttgggtttggcaggatactaccggaggttcatcgagaacttctccaaaatcgctcgacccatgacacagttgttgaagaaagaagagaagtttgtgtggagcccgcaatgcgagaaggcgttccaaaccctcaaggaaaagctggtttcctcgccagtgttaatcttgccggatactcgcaaggacttcatggtgtattgtgatgcttcgcgccaaggattggggtgcgtgctcatgcaggacggtcatgtggtagcctatgcttcacgtcagctacgacctcatgaaggcaactaccctacgcacgacttgaagttagcagcggtggttcatgctctaaaaatctggcggcactatctcattgggaaccgctgtgaaatatatactgatcataagagtttgaaatacatcttcactcagtcagatctgaaccttcggcaaaggagatggttagaactcatcaaggattatgatgtgggaatacactatcatcctggtaaggccaacgtggttgccgacgctctaagtcgaaagagccactgcaacactctcaacgtccgaggcattccacccgagcttaatcaacagatggaagccctgaacctaagcatagttggtcgcggattcttggctgcgttggaagccaagcccaccttgctcgatcaaatccgcgaggctcagaagaatgatccggacatgcatggactcctcaagaatatgaaacagggtaaagccgctggtttcacagaggatgaacacggaaccttatggaacggaaagcgggtatgcgttccagatagcagagaacttaaacagctgatacttcaggaagctcacgaaagtccttattccattcacccgggcagtaccaagatgtacttagacttgaaggagaattactggtgggttagcatgaagcgggaaattgcagagtttgtggctctatgtgatgtgtgccagcgtgtcaaggcagagcaccagcgaccggccggacttctccaacctctccaagtgccggaatggaaatgggatgaaattgggatggatttcatcaccggccttccaaaaacccaaggtggatatgattctatatgggtaattgtggatcgactaacaaaggtagctcgattcattcctgtgaagaccacctatggagggaataaactagcggagctctacttcgctaggatcgtgagtctccatggcgttcccaagaaaatcgtatctgataggggaagccaattcacctctcacttttggaagaagctccaagaagagcttggtacccgactaaatttcagcaccgcgtatcacccgcagacagatggacagaccgagcgtctaaatcagatcttagaagatatgcttcgcgcatgtgtcctggacttcgggaagacttgggataagagtctcccctatgccgagttctcctacaataacagctatcaagccagcatacaaatggcaccatatgaagcgttgtacgggcgcaaatgccggacaccgctattgtgggaccaagttggagaaagccaagtgttcgggactgatatcctgagagaagctgaagctaaagtcagaatcattcgggataatctaaaggtggcacagtcccggcagaaaagttatgcagataaccgacgccgtgatctggaattcgcagtggatgattttgtgtaccttcgggtcacgccattgcgaggtgtgcacaggtttcagacaaaagggaagctcgcacctcggtatgtgggtcccttccgtatcatcgctcgacgcggagaagttgcttaccagctggagttgcccgcctccttgggcaacgtgcatgatgtgttccatgtgtcgcaactcaagaaatgtctccgagtgccatccgagcaggccgattcagagcaaattgaagttcgcgaagacttgacctatgtggagaagccagtgaaaatcctggacaccatggagcgcaggaccaggaaccgagtaatccgtttttgcaaggtccagtggagcaaccacgccgaagaagaagctacttgggagcgcgaagacgagctgaaggcagcccatcccgatctcttcgccagttcttccgaatctcggggtcgagattccgtttaa

SEQ ID NO: 14264 - DNA, 6051 bp, Oryza sativa
  Clone ID: TFbOSC900039j.C1.o3.np
atggagcccgagattgccgcgccggtttccttcccctccggccgccctctctcactcccaacactatataaacactccccgtgcctccctcctccgtttccgccactcgccgctctctctccccgtcggattcgagctcgcgccgtcgccctctctctccgccatcgccgccgagctccggtccgccgccgtcgtcgccccggacctcctcccgcttcggcatcgccctccttcggcttcgccgcgtcctcgccgacctcgtccactcctccgtttcgcccgccgaccgccggaacgccgccgtcctcgtcgacccgagccgcgccgccgccttcctccgctccggtcgccgttcccgtcgtcgccgtcgacccggggtgagccgtggaccgccgtttcacttcccccttccctcccctctctcgggcgccgctccgccgcgccggtggtcgccggcggcgaccatcggggcgcgggtgcgccgcctcccgtcggctgtgccggcgaggccgccttcgggtgcgccccgcggctgccatgtggggcccggccgtcagccgcccgcgtcctcaggtgcggctgacgcgtgggacccacggcgccgaccggcgtaagccgcgtgcacccggtccaccgtggacccacctcggccatgtaaggaccggtcttcgggcctctgttgcaaagcactaccgtacttccacatgtctagtggggcaaatgaaggctacacgagctgcggcccggtagtcgagatgtcatggcacagggccggtgtcctgctgctaggggctcagtcctgcctgcctgtcccgggggttccggccgtaggtgggattgggtcgatgtacacctctgatcagagtataatctattcgaatagccgcgccctcggttatgggcaagccgagcaatgtacccaaatggccggcagcgtcacccgtcgtggtttgagcatgactggcttcgtcttggagctgcggggcatgtgcgtggtcctggggtatccacatggagtggactaccaggccaggccgcttccggagcaggagggtgacgacgcagagccccacgctggttgggaggtcactgcagtgatcctctctggctctcccgagcggacttcgctggcagtcaccgcgggtggagattctttccccgccgcttgccagaacgccgctctcctcgccatcggcactcttcaccagcgctacccggacgagttgcagcactcgccctaccgctaccaccctcgccacgaaggagcccgcgactacgccaccttccgagatgctagctcggaggatgacgctactatcgtgcacctggcgcgcatggtggaggcgtacgacgtggctcgtatcgacttccatcagatggtgcgccgtgggatggtcgagaacaacatgaagatcctggagctgcgtcaggagaacctgcagctcaagaaggacttagacgcggtggaggcgcagctgcatcagctcaagatcgcccagggagaggtctgccgccccaagcgtcgccgcgtctgccgcagccagaagatcaccgcccgcaagagcacctccaggcccgagcttgttcgtcagtccctggcgtggacctgcttcatggagacccctcgtgccgagcccgcgcccgtggttccccaggagggggaagcctccggcgttggtagcacggaggatgcgctgttgctcaccttccatggtgacgaccaggagaaatgctgccaccggtgatggcaaccaacctgaaggcagcaaccacaaccaccaaggcaacccacctccacctcctcctccgcctccaccaccaccaccagacaccaacgccattctcacccaaatcctcgcccagcaagccaacatgatgactgctttcctccaccacctccaaaatccgccacaacataatgctccaccaccacctcccgaacactctaaactcgctgagttcctccgcatccgtccacctaccttctctagctccaacaaccccgtggatgcgttggattggttgcatgccgtggggaaaaagttagacaccgtgcagtgcagcgatgaggagaaagtcatcttcgccgcccaccagctgcaggggcccgcatctctatggtgggaccattttcaggctacgcagccagaagggcagcctattacttgggctcgcttcaccgccgctttccggagaacccatgtgcccgccggagtcgtggcccttaagaaaagggaattccgagagttgaagcaaggcaaccgctccgtgatggagtatttgcatgagttcaacaacctggcccgttacgccccggaggatgtgcgggaagatgaggagaagcaagagaagttcttggcaggaatggaccccgagctgtccgtccgtctagtctctggggactatccggattttcaacgtctggtggacaagagcatccgcttggaagccaagcacaaggaactggagtcgcacaagcgccgcttggcgaatttccgcaatcaacatggtgctaaccaaagggtccgctacaccaatccctatccagggggatcctcctcgcaacagcaacaatagcagcagcaacctcgctccgcgcctcgacctcaattcgtggtgcgcgtcccacagccgcagcagcagcagaatcaacaagggactcgtgcgccccgtcctcctacgccaactgtgcagcctggtcaaggccgcagggacgctcaaggtcagcagcgtctgtgcttcaactgcttcgagcccgggcactttgcggataaatgcccgaagccgaggcgtcagcaaggccaagcgcctccccgctctagcaatggtggtaaggatgtcattcggggtcgtgtgaatcacgtgacggccgaggacgtgctgacaactccagacgtcatcgtcggtacgttcctcatacattccatccctgctaccattttgttcgactctggagcttcccactcgtttatatctgtgccattcgtggggagaaatcagttgggggtagaaaggcttaggaaccctctgctcatcaccacccctggaggggttatgacagcaaagtattatagctctgccgtccctatagaaattcaggggattccttttccctcggatctaattctgctagacaccaagaacttggatgtgatccttgggatgaattggttggctcaattccaaggagtaatggattgcgcgagacgcactgtcactctgtaccgagggccggaacaaccagttgttttctttgcacccccaacctctgtcaaaagttcagaacttcatcagataggactgtcagaaatccccatcgtcagagagttcggagatgtgtttccggaagaactacccggtatgccgcccaagcgagagattgagttccggatagatcttgctccaggaaccactccgttgtacaagcgaccctaccgtatggcagcaaatgaactggccgaagttaagaaacagttggaagagttgaaagaaaaggggtatatacgtccgagtacttccctctggggtgctcctgtgatttttgtagagaagaaagacaagacgaagaggatgtgcgtcgactacagagctctcaatgaagtcaccctcaaaaacaagtatcctcttccccggatcgatgatctgttcgatcagcttaaaggtgccactgtattctccaagattgatcttcgttccggatatcaccaattacgtattcgtgaagaagatattccgaagaccgcattcaccacgcgatacggactgtatgaattcacggtgatgtcattcggtctaactaatgcacctgccttcttcatgaacttaatgaacaaagtgttcatggaatacttggataagtttgtcgtggttttcattgatgacattctgatatactcacgatcagaggaagaccatcagcaccatccccgtctggtgttgggaaagttgcgtgaacatcaattgtatgccaaacttagcaagtgtgagttctggttgtccgaagtcaaattcttagggcacgtgatatctgctaaaggagttgccgtggaccccgaaacagtgaccgccgtcactgattggaagcaacccaagacagtcactcaagtccgcagtttcttaggtttggcaggatactaccggaggttcatcgagaacttctccaaaatcgctcgacccatgacacagttgttgaagaaagaagagaaatttgtgtggagcccgcaatgcgagaaggcgttccaaactctcaaagaaaagctggtttcctcgccagtgttaatcttgccggatactcgcaaggatttcatggtgtattgtgacgcttcgcgccaaggattggggtgcgtgctcatgcaggacggtcatgtggtggcctacgcctcacgccagctacgacctcatgaaggcaactaccctacccatgacttggagttagccgcggtggttcatgctctaaaaatctggcggcactatctcattgggaatcgctgtgaaatatatactgatcataagagtttgaaatacatcttcacccagtcggatctgaatcttcggcaaaggagatggttagaactcatcaaggattatgatgtggggattcactatcatcctggtaaggccaacgtggtcgctgacgctctaagtcgaaagagccattgcaacactcttaacgtccgtggcattccacccgaacttaatcaacagatggaagccctgaacctaagcatagttggtcgcggattcttggctgcgttggaagccaagcctaccttgctcgatcaaatccgcgaggctcagaagaatgatccggacatgcatggactcctcaagaatatgaaacagggtaaagccgctggtttcacagaggatgaacacggaaccctatggaacggaaagcggcgtgtcaaggcagagcaccaacgaccggccggacttctccagcctctccaagtaccagaatggaaatgggatgaaattgggatggatttcatcaccggacttccaaaaacccaaggtggatatgattctatatgggtagttgtggatcgattaaccaaagtagctcgatttattcctgtgaagaccacttatggagggaacaaactagccgagctctacttcgctaggattgtgagtctccatggcgttcccaagaaaattgtatctgataggggaagccaattcacctctcacttttggaagaagctccaagaagagctgggtacccgattaaatttcagcaccgcgtatcacccgcagacagatggacagaccgagcgtctaaatcagatcctagaagatatgcttcgcgcatgtgtcctagatttcgggaagacctgggataagagtctcccctatgccgagttctcctacaataacagctatcaagccagcatacaaatggcaccttatgaagcgttgtatgggcgcaaatgccggacaccgctattgtgggaccaagttggagaaagccaagtgttcgggactgatatcctgagagaagctgaatctaaagtcagaatcattcgggataatctaaaggtggcacagtctcggcagaaaagttatgcagataaccgtcgccgtgacctggaattcgcagtgggtgattttgtgtaccttcgggtcacaccattgcgaggtgtacacaggtttcagacaaaagggaagctcgcacctcggtatgtgggtcctttccgtatcattgctcggcgcggagaagtcgcctaccagttggagctgcccgcctccttgggcaacgtgcatgatgtgtttcatgtgtctcaactcaagaaatgccttcgagtgccatccgagcaggccgactcagagcagattgaagttcgcgaagacttgacctatgtggagaggccagtgaaaatcctggacaccatggagcgcaggaccaggaaccgggtaatccgtttttgcaaggtccagtggagcaaccacgctgaagaagaagctacctgggagcgtgaagacgagctgaaggcagcccatcccgatctcttcgtcagtccttccgaatctcggggtcaagattccgtt

SEQ ID NO: 14265 - DNA, 5274 bp, Oryza sativa
  Clone ID: TFbOSC900042j.C1.o11.fg
atgtcatggcacagggccggtgtcctgctgctaggggctcagtcctgtctgcctgtcccgggggttccggccgtaggtgggattgggtcggtactcttgtctatggctaggatgggttggaaactatgtcacgtcttccgtctgtataccgtggtgatggccggcagcgtcagccgccgtggtttggacatgactggtttcgtcttggagctgcggggcatgtgcgttgtcctggggtatccacatggagtggactaccagcgcaggccgcttccggagcaggagggtgacgatgcagagcccctcgccgcttgggaggtcactgcagtgatcctcgctggctctcccgagcggacttcgttggcagtcaccgcgggtggagattctttccccgctgcttgccagagcgccgctctcctcgccatcggcactcttcaccagcgctacccggacgagttgcagcactcgccctaccgctaccaccctcgccgcggaggagcccgcgacttcgccaccttccgggatgctagctcggaggatgacgctaccatcatgcacctggcgcgcatggtggaggcgtacgacgcggctcgtatcgacttccatcagatggtgcgccgtgggatggtcgagaacaacatgaagatcctggagctgcgtcaggagaacctgcagctcaagaaggacctagacgcggtggaggcgcagctgcatcagctcaagatcgcccagggagaggtctgctgccccaagcgccgccgcgtctgccgcagccagaagatcaccgctcgcaagagcacctccaggcccgagcttattcgtcagtccctggcgtggacctgcttcatggagacccctcgtgccgagcccacgctcgtggttccccaggagggggaagcctccggcgttggtagcacggaggatgcgctgttgctcaccttccgccctggcccgtcgcagcggagaagtgctaataccggtgatggcaaccaacctgaaggcagcaaccacaaccaccagggcagcccacctccacctcctcctccgcctccaccaccaccaccagacaccaacgccattctcacccaaatcctcgcccagcaggccaacatgatgactgctttcctccaccacctccaaaatccgccacaacataatgctccaccaccacccccacaacactctaaactcgccgagttcctccgcatccgcccacctaccttctctagctccaacaaccccgtggatgcgttggattggttgcatgccgtggggaaaaagctagacactgtgcagtgcagcgatgaggagaaagtcatcttcgccgcccaccagctgcaggggcccgcatctctatggtgggaccatttccaggctacgcagccagaggggcagcctattacttgggcccgtttcaccgccgctttccggaggacccatgtgcccgccggagtcgtggcccttaagaaaagagaattccgagagttgaagcaaggcaaccgctccgtgatggagtatttgcatgagttcaacaacctggcccgttacgccccggaggatgtgcgggaagatgaggagaagcaagagaagttcttggcaggaattgaccctgagctgtccgtccgtctagtctccggggactatccggatttccaacgtctggtggacaagagcctccgcttggaagccaagcacaaggaactggagtcgcacaagcgccgcttggcgaatttccgcaatcaacagggcgctaaccaaaggcagcaacaacagcagccgcaacctcgctctgcgccccgacctcaattcgtggtgcgcgtcccacagccgcaacaacagcagagtcagcaagggactcgtgtgccccgtcctcctatgccagacgggcagcctagtcaaggccacagggacgctcaaggtccgcagcgtctgtgcttcaactgcttcgagccagggcactttgcggataaatgcccgaagccaaggcgtcagcaaggccaagcgcctccccgctccaacaacggtgggaaggatgtcattcggggtcgtgtgaaccacgtgacggccgaggacgtgctgacaactccagacgtcatcgttggtacgttcctcatacattccatccctgctactattttgttcgactctggagcttcccactcgtttatatctgtgccatttgtggggagaaatcaattgggggtagaaaggcttaggaaccctctgctcatcaccacccctggaggggttatgacagcaaagtattatagccccgccgtccctatagaaattcaggggattccttttccctcggatctgattctgctagacaccaagaacttggatgtgatccttgggatgaattggttggctcaattccaaggagtagtggattgcgcgagacgcactgtcactctgtaccgagggccggaacaaccggttgttttctttgcacccccaacctctgtcagtagctcagaactttatcagataggactgtcagaaatccccatcgtcagggagttcggagatgtgtttccggaagaactacccggtatgccgcccaagcgagagattgagttccggatagatcttgctccaggaactactcctctatacaagcgaccctaccgtatggcagcaaatgaattggccgaagtcaagaaacagttggaagagttgaaagaaaaggggtatatacatccgagtacttccccctggggtgctcctgtgatttttgtggagaagaaagacaagacgaagaggatgtgcgttgactacagagctctcaatgaagttaccatcaaaaacaagtaccctcttccccggatcgatgatctgttcgatcagcttaaaggtgccactgtattctccaagatcgatcttcgttccggatatcaccaattacgtattcatgaagaagatattctgaagaccgcattcaccacgcgatacggactgtatgaattcacggtgatgtcgttcggtttaaccaatgcacctgccttcttcatgaacttaatgaacaaagtgttcatggaatacttggataagtttgttgtggtgttcattgatgacattctgatatactcacaatcagaggaagaccatcagcaccatctccgtctggtgttgggaaagttgcgggaacatcaattgtatgccaaacttagcaagtgtgagttctggttgtccgaagtcaaattcttagggcacgtgatatctgctaaaggagttgctgtggaccccgaaacagtgaccgccgtcactgattggaagcaacccaagacagtcactcaagtccgcagtttcttaggtttggcaggatactaccggaggttcatcgagaacttctccaaaatcgctcgacccatgacacagttgttgaagaaagaagagaaatttgtgtggagcccgcaatgcgagaaggcgtttcaaactctcaaagaaaagctggtttcctcgccagtgttagtcttgccagatactcgcaaggatttcatggtgtattgtgacttcgcgccaaggattgggctacggcctcatgacggcaactaccctacccatgatttggagttagccgcggtggttcacgctctaaaaatctggcggcactatctcattgggaatcgctgtgaaatatatactgatcataagagtttgaaatacatcttcacccagtcggatctgaatcttcggcaaaggagatggttagaactcgtcaaggattacgatgtgggaattcactatcatcctggtaaggccaacgtggtcgccgacactctaagtcgaaaaagccattgcaacactcttaacgtccgtggcattccacccgaacttaacaaacagatggaagccctgaacctaagcatagttggtcgcggattcttggctgcgttggaagccaagcctaccttgctcgatcaaatccgcgaggctcagaggaatgatccggacatgcatggactcctcaagaatatgaaacagggtaaagtcgctggtttcacagaggatgaacacggaaccctatggaacggaaatcgggtatgcgttccagataatagagaacttaaacagctgatacttcaggaagctcacaaaagtccttattccatccaccctggcagtacgaagatgtacttagacttgaaggagaaatactgcgtgtcaaggcagagcaccaacgaccggccggacttctccaacctctccaagtaccagaatggaaatgagatgaaattgggatggatttcatcaccggacttccaaaaacccaaggtagctcgatttattcctgtgaagaccacctatggagggaacaaactagccgagctctacttcgctaggatcgtgagtctccatggcgttcccaagaaaatcgtatcggataggggaagccagttcacctctcacttttggaagaagctccaagaagagctgggtactcgattaaatttcagcaccgcgtatcacccgcagacagatggacagaccgagcgtctaaatcagatcctagaagatatgcttcgcgcatgtgtcctagatttcgggaagacctgggataagagtttcccctatgccgagttctcctacaataacagctaccaagccagtatacaaatggcaccttatgaagcgttgtatgggcgcaagtgccggacaccgctattgtgggaccaagttggggaaagccaagtgttcgggattgatatcctgagagaagctgaagctaaagtcagagccattcgggataatctaaaggtggcccagtcccggcagaaaagttatgcagataaccgtcgccgtgacctggaattcgcagttgacgattttgtataccttcgggtcacgccattgcggggtgtacaaaggtttcggacaaaagggaagctcgcacctcggttcgtggatcctttccgtatcattgctcggcgcggagaagtcgcttaccagttggagctgcccgcctccttgggcaacgtgcatgatgtgttccatgtgtcgcaactcaagaaatgccttcgagtgccatccgagcaggctgactcagagcaaattgaagttcgtgaagacttgacctacgtggagaggccagtgaaaatcctggacaccatggagcgcaggaccaggaaccgggtaatccgtttttgcaaggtccagtggagcaaccacgccgaagaagaagctacctgggagcgtgaagacgagctgaaggcagcccatcccgatctcttcgccagttcctccgaatctcggggtcgagattccgtttaa

SEQ ID NO: 14266 - DNA, 2436 bp, Oryza sativa
  Clone ID: TFbOSC900055j.C1.o18.np
atgtcatggcacagggccggtgtcctgctgctaggggctcagtcctgcctacctgtcccgggggttccggccgtaggtgggattgggtcggtactcttgtctatggctaggatgggttggaaactatgtcacgtcttccgtctgtataccgtggtgatggccggcagcatcagccgtcgtggtctggacctgactggcttcgtcttggagctgcggggcatgtgcgttgtcctggggtatccgcatggagtggactaccagggcaggccactcccggagcaggagggtgacgatgcagagccccacgctgcttgggagaggacttcgttggcagtcaccgcgggtggagattccttctccgccgcttgccagaacgccgctctcctcgccatcggcactcttcaccagcgctacccggacgagctgcagcactcgccctaccgctaccaccctcgccgcggaggagcccgcgactacgccaccttccgggatgctagctcggaggatgacgctaccatcatgcacctggcgcgcatggtggaggcgtacgacgcggctcgtatcgacttccatcatatggtgcgccgtgggatggtcgagaacaacatgaagatcctggagctgcgtcaggagaatctgcagctgaagaaggacctagacgcagtggaggcgcagctgcatcagctcaagatcgcccagggagaggtctgtcgccccaagcgtcgccgcgtctgccgcagccagaagatcacctcccgcaagagtacctccaggcccgagcttgttcgtcagtccctggcgtggacctgcttcgtggagacccctcgtgccgagcctgcgcccgtggttcctcaggagggggaagcctccggcgttggtagcacggaggatgcgctgttgctcaccttccgtcctggcccgtcgcagcggagaagtgctgccaccggtgatggcaaccaacctgaaggcagtaaccacaacaaccatggcagcccacctccacctcctcccccgcctccaccaccaccaccagacaccaacgccattctcacccaaatcctcgcccagcaggccaacatgatggctgctttcctccaccacatccaaaacccgccacaacataatgctccaccaccaccccgacagcactctaaactcgccgagttcctccgcatccgcccacctaccttctctagctccaataaccccgtggatgcgttggattggttgcatgccgtggggaaaaagttagacaccgtacagtgcagcgatgaggagaaagtcatcttcgccgctcaccaactgcaggggcccgcatctcaatggtgggaccatttccaggctacgcagccagaggggcagcctattacgtgggcccgcttcaccgccgctttccggaggacccatgtgcccgccggagtcatggcccttaagaaaagggaattccgagagttgaagcaaggcaaccgctccatgatggagtatttgcatgagttcaacaacctggcccggtacgccccggaggatgtacgggaagatgaggaaaagaaggagaagttcttggcaggaatggaccctgagctgtccgtgcgcctggtctccggggactattcggatttccaacgtctggtggacaagagcatccacttggaagccaagcacaaggaactggagtcgcacaagcgtcgcttggcgaatttccgcaaccaacagggtgctaaccaaagagtccgctacaccaatccctatccagggggatcctcctcacagcagcagcaacctcgctccgcgccccgacctcaattcgtggtgcgtgtcccacagccgcagcaatagcagagtcagcaagggactcgtgcgccccgtcctcctacgccagccgcgcagtctggtcaaggccgcagggacgttcaaggtccgcagcgtctgtgcttcaactgcttcgagcctgggcactttgcggataaatgcccaaagccgaggcgccagcaaggccaagcgcctccccgctccaacaacggtggtaaggatgtcattcggggtcgtgtgaaccacgtgacggccgaggacgtgctgacaactccagacgtcatcgttggtacgttcctcattcattccatccctgctaccattttgttcgactctggagcttcccactcgtttatatctgtgccattcgtggggagaaatcagttgggggtagaaaggcttaggaaccctctgctcatcaccacccctggaggggttatgacagcaaagtattatagccctgccgttcctatagaaattcagggaattccttttccctcggatctgattcttctagacaccaagaacttggatgtgatccttgggatgaattggttggctcaattccaaggagtagtggattgtgcaagacgcactgtcaccctgtaccgagggccgaaacaaccg

SEQ ID NO: 14267 - DNA, 2282 bp, Oryza sativa
  Clone ID: TFbOSC900056j.C1.o22.gm
gcaattttcccggtcgcgacaagcgtctgtgcttcaactgcttcgagcctgggcactttgcggataaatgcccgaagccaaggcgccagcaaggccaagcgcctccccgctccaacaacggtgggaaggatgtcattcggggtcgtgtgaaccacgtgacggccgaggacgtgctgacaactccagacgtcatcgttggtacgttcctcattcactccatccctgctaccattttgttcgactctggagcttcccactcgtttatatctgtgccattcgtggggagaaatcagttgggggtagaaaggcttaggaaccctctgctcatcaccacccctggaggggttatgacagcaaagtattatagccctgccgtccctatagaaattcaggggataccttttccctcggatctgattctgctagacaccaagaacttggatgtgatccttgggatgaattggttggctcaattccaagggatagggctgtcagaaatccccatagtcagagagttcggagacgtgtttccggaagaactacccggaatgccgcccaagcgagagattgagttccggatagatcttgctccaggaaccactcctctgtacaagcgaccctaccgtatggcagcaaatgaactggccgaagttaagaaacagttggaagagttgaaagaaaaggggtatatacgtccgagtacttccccctggggtgctcctgtgatttttgtggagaagaaagacaagacgaagaggatgtgcgttgactacagagctctcaatgaagtcaccatcaaaaacaagtatcctcttccccggatcgatgacctgttcgatcagcttaaaggtgccactgtattctccaagatcgatcttcgttccggatatcaccaattacgtattcgtgaagaagatattccgaagaccgcattcaccacgcgatacggactgtatgaattcacggtgatgtcgttcggtttaaccaatgcacctgccttcttcatgaacttaatgaacaaagtgttcatggaatacttggacaagtttgttgtgccgcgccgcgccgccgttgcagccgccgtcgtcagtcgccgtcgccaccatcgggttcgcaaggtcgccgccgtccccgtccaccgcttcgccgccgccgaagaccgccggagcaccgtcgccgccgtcgacccgatcttctccgccgccttttcctcgacgccgccgccgtccgttggtcttccgccgacgttttggtcatcggtgagttcgccgcgccgtgatctacgtcttggtgccctccgtttgtgccgtagagccgccgttcgccggcgagcatgcgccgtccgagccgtccgagccgccgagccgccgccggtgctgacgtcgtcgctgaccccctttccgaggtaccgtggtggtactgaggcacatggtgacatgatgtggggctgtgtcttgtgggtacagtggtacacctctggccagagatactaccggaggttcatcgagaacttctccaaaatcgctcgacccatgacacagttgttgaagaaagaagagaaatttgtgtggagcccgcaatgcgagaaggcgttccagactctcaaagaaaagctggtttcctcgccggtgttaatcttgccggatactcgcaaggatttcatggtgtactgtgatgcttcgcgccaaggattgggcctctcggtccacggcggaccgggagcacgcggctggcggcggccggcgccgtgggtcccacgcgtcagccgcacccgcgggcgcgggcggctgacggccgggccccacctggcagccgcggggcgcgcccgaaggcggcctcgccggcacggccgacgggagaacggcgcacccgcgccccgatggtcgccgccggcgaccaacggcgcggcggagtggcacccgagagagaggagggaagggggaagcgaacggagcggtccacggctcaccccggtcgacggcgacgacgggaacggcggccgaaaacggagaaaggcggcggcgcggttcgggacgacgaggacgacggcgttccggcggtcggcgagcgaagcggaggggcggacgaggtcgacgacgacgcggcgaagccgaaggagacgacgccgagaggggaggaagtccggagcgacggcggcggcgaaccggagctcggcggcgacggcggagagaaggtgcgacggcgcgagcacgattccgacggggagagcgagcggcgagcggcggaaacggaggaggagagcacgggggacgtttaaatag

SEQ ID NO: 14268 - DNA, 5421 bp, Oryza sativa
  Clone ID: TFbOSC900082j.C1.o6.fg
atgtcgtggcacagggccagtgtcctgctgctaggggctcagtcctgcctacctgtcccgggggttccggctgtaggtgggattgggtcggtactcttgtctatggctaggatgggttggaaactatgtcacgtcttccgtctgtataccgtggtgatggccggcagcatcaaccgtcgtggtctggacctgactggtttcgttttggagctgcggggcatgtgcgttgtcctggggtatccgcatggagtggactaccagggcaggcagctcccggagcaggagggtgacgatgcagagccccacgctgcttgggaggttactgcagtgatcctcactggctctcccgagaggacttcgttggcggtcaccgcgggtggagattccttctccgccgcttgccagaacgccgcactcctcgccatcggcactcttcaccagcgctacccggacgagttgcagcactcgccctaccgctaccaccctcgccgcggaggagcccgcgactacgccaccttccgggatgctagctcggaggatgacgctaccatcatgcacctggcgtgcatggtggaggcgtacgacgcggctcgtatcgacttccatcaaatggtgcgccatgggttggtcgagaacaacatgaagatcctggagctgcgtcaggagaatctgcagctgaagaaggacctagacgcagtggaggcgcagctgcatcagctcaagatcgcccagggagaggtctgtcgccccaagcgccgccgcgtctgccgcagccagaagatcaccgcccgcaagagcacctccaggcccgagcttgttcgccagtccttggcgtggacttgcttcgtcgagacccctcgtgccgagcccatgcccgtggttcctcaggagggggaagcctccggcgttggtagcacggaggatgcgctgttgctcaccttccgtcctggcccgtcgcagcggagaagtgctaacaccggtgatggcaaccaacccgaaggcagcaaccaccacaaccatggcagcccacctccacctcctcctccgcctccaccaccaccaccagacaccaacgctattctcacccaaatcctcgcccagcaggccaacatgatggctgctttcctccaccacatccaaaatccgccacaacataatgctccaccaccaccgccacaacactctaaactcgccgagttcctccgcatccatccacctaccttctctagctccaataaccccgtggatgcgttggattggttgcatgccatggggaaaaagttagacatcgtgcagtgcagcgatgaggagaaagtcgtcttcgccgcccaccaactgcaggggcctgcatctctatggtgggactatttccaggctacgcagccagaggggcagcctattacttgggcccgcttcaccgccgctttccggaggacccatgtgcccgccggagtcatggcccttaagaaaagggaattccgagagttgaagcaaggtaaccgctccgtgatggagtatttgcatgagttcaacaacctggcccggtacgccccggaggatgtacgggaagatgaggaaaagcaggagaagttcttggcaggaatggatcctgagctgtcagtccgtctagtctccggggactatccagatttccaacgtctggtggacaagagcatccgcttggaagccaagcacaaggaactggagtcgcacaagcgccgcttggcgaatttccgcaatcaacagggagctaaccaaaggatccgctacaccaatccctatccagggggatcgtcctcgcagcagcaacagcagcagcaacctcgctccgcgccccgacctcaattcgtggtgcgcgtcccacagccgcagcaacagcagagccagcaagggacccgtgcgccccgtcctcctacgccagccgcgcagtctggtcaaggccgcagggacgttcaaggtccgcagcgtctgtgcttcaactgcttcgagcctgggcactttgcggataaatgcccaaagccgaggcgccagcaaggccaagcgcctccccgctccaacaacggtggtaaggatgtcattcggggtcgggtgaaccacgtgacggccgaggacgtgctgacaactccagacgtcatcgttggtacgttcctcattcattccatccctgctaccattttgttcgactctggagcttcccactcgtttatatctgtgccattcgtggggagaaatcagttgggggtagaaaggcttaggaaccctctgctcatcaccacccctggaggggttatgacagcaaagtattatagtcctgccgtccctatagaaattcaggggattccttttccctcggatctgattcttctagacaccaagaacttggatgtgatccttgggatgaattggttggctcaattccaaggagtagtggattgtgcaagacgcactgtcactctgtaccgagggccggaacaaccggttgttttctttgcacccccaacctctgtcagtagttcagaacttcatcagataggactgtcagaaatccccatcatcagagagttcggagacgtgtttccggaagaactacccggtatgccgcccaagcgagagattgagttccggatagatcttgctccaggaaccactcctctgtacaagcgaccctaccgtatggcagcaaatgaactggccgaagttaagaaacagttggaagagttgaaagaaaaggggtacatacgtccgagtacttccccctggggtgctcctgtgatttttgtggaaaagaaagacaagacgaagaggatgtgcgttgactacagagctctcaatgaagtcaccatcaaaaacaagtaccctcttccccggatcgatgatctgttcgatcagcttaaaggtgccacggtattctccaagattgatcttcgtttcggatatcaccaattacgtattcgtgaagaagatatcccgaagaccgctttcaccacgcgatacggactgtatgaattcacggtgatgtcattcggtttaaccaatgctcctgccttcttcatgaacttaatgaacaaagtgttcatggaatacttggataagtttgttgtggttttcattgatgacattctggtatactcacaatcagaggaagaccatcagcaccatctccgtctggtgttgggaaagttgcgggaacatcaattgtatgccaaacttagcaagtgtgagttctggttgtccgaagtcaaattcttagggcacgtgatatctgctaaaggagttgctgtggaccccgaaacagtgaccgccgtcaccgattggaagcaacccaagacagtcactcaaattcgcagtttcttgggtttggcaggatactaccggaggttcatcgagaacttctccaaaatcgctcgacccatgacacagttgttgaagaaagaagagaaatttgtgtggagcccgcaatgcgagaaggcgttccaaactctcaaagaaaagctggtttcctcgccagtgttaatcttgccggatactcgcaaggacttcatggtgtattgtgacgcttcgcgccaaggattggggtgcgtgctcatgcaggaaggtcatgtggtggcctatgcctcacgccagctacggcctcatgaaggcaactaccctacccatgatttggagttagccgcggtggttcatgctctaaaaatctggcggcactatctcattgggaatcgctgtgaaatatatactgatcataagagtttgaaatacatcttcacccaatcggatctgaatcttcggcagagaagatggttagagctcatcaaggattatgatgtgggaatccactatcatcctggtaaggccaacgtggtcgccgacgccctaagtcgaaaaagccattgcaacactcttaatgtccgtggcattccacctgaacttaatcaacagatggaagccctgaacctaagcatagttggtcgcggattcttggctgcgttggaagccaagcctaccttgctcgatcaaatccgcgaggctcagaagaatgatccggacatgcgtggactcctcaagaatatgaaacagggtaaagccgctggtttcacagaggatgaacacggaaccctatggaacggaaatcgggaagctcacgaaagtccttattccatccaccctggcagtacgaagatgtacttagacttgaaggagaaatactggtgggttagtatgaagcgggaaattgcagagttcgtggccctttgtgatgtgtgccagcgtgtcaaggcagagcaccaacgaccggccggacttctccaacctctccaagtaccagaatggaaatgggatgaaattgggatggatttcatcaccggacttccaaaaacccaaggtggatatgattctatatgggtagttgtggaccgattaaccaaggtagctcggtttattcctgtgaagaccacctatggagggaacaaactagccgagctctacttcgctaggatcgtgagtctccatggcgttcctaagaaaattgtatctgataggggaagccaattcacctctcacttttggaagaagctccaagaagagctgggtacccgattaaatttcagcaccgcgtatcacccgcagacagatggacagaccgagcgtctaaatcagatcctagaagatatgcttcgcgcatgtgtcctagatttcgggaagacctgggataagagtctcccctatgccgagttctcctacaataacagctaccaagccagcatacaaatggcaccttatgaagcgttgtatgggcgcaaatgccggacaccgctcttgtgggaccaagttggggaaagccaagtgttcgggactgatatactgagagaagctgaagcgaaggtcagaaccattcgggataatctaaaggtggcacagtcccggcagaaaagttatgcagataaccgtcgccgtaacctggaattcgcagtggatgattttgtgtaccttcgggtcacgccattgcgaggtgtacacaggtttcagacgaaagggaagctcgcacctcggttcgtgggtcctttccgtatcattgctcgacgcggagaagtcgcttaccagttggagctgcccgcctccttgggcaacgtgcatgatgtgttccatgtgtcgcaactcaagaaatgccttcgagtgccgtccgagcaggccgactcagagcaaattgaagttcgcgaagacttgacttacgtggagaggccagtgaaaatcctggacaccatggagcacaggaccaggaaccgggtaatccgtttttgcaaggtccaatggagcaaccacgccgaggaagaagctacttgggagcgtgaagacgagctgaaggcagcccatcccgatctcttcgccagttcttccgaatctcggggtcgagattccgtttaa

SEQ ID NO: 14269 - DNA, 5388 bp, Oryza sativa
  Clone ID: TFbOSC900086j.C1.o17.fg
atggatgaagtcgggggtcgatggacattctccagggcaaatgaaggctacacgagctgcggcccgatggccggcagcgttacccgtcgtggtttggacatgactggcttcgtcttggagctgcggggcatgtgcgtggtcttggggtatccacatggagtggattaccaggccaggccgctcccggagcaggagggtgaggatgcagagcctcacgctggttgggaggtcactgcagtgatcctctccggctctcccgagcggatttcgctggcagtcacagcgggtggggactccttccccgccgcttgccagaacgccgctctcctcgccatcggcacccttcaccagcgctacccggacgagttgcagcactcgccctaccgctaccaccctcgtcgcggaggagcccgcgactacgccaccttccgagacgccagctcggaggatgacgctaccgtcgtgcacctggcacgcatggtggaggcgtacgacgcggctcgtatcgacttccatcagatggtgcgtcgtggcatggtggagaacaacctgaagatcctggagctgcgtcaggagaacctgcagctcaagaaggacctcgacgcagtggaggcgcagctgcaccagctcaagatcgcccagggagaggacagccgtcccaagcgtcgccgcgtctgccgcagccagaagatcaccgcccgcaagagcacctccaggcccgagcttgtccgtcagtccctggcgtggacctgcttcgtcgagacccctcgtgccgagcctgcgcccgtggttccccaggagggggaagcctccggcgttggtagctcggaggttttaatcgtcagctctctttctctgcttgctggttctgtgtggggttttcagatggtgacgaccaggagaaatgttaacaccggtgaaggcaaccaacccgagggcagcaaccccaaccaccaaggcaatccacctccaccaccaccaccagacaccaacgccattctcacccaaatcctcgcccagcaagccaacatgatgaccgctttcctccaccacctccaaaacctgccacaacagaatgctccaccaccacctccccaacactctaaactcgccgagttcctccgcatccgcccacctaccttctccagctccaacaaccccgtggatgctttggattggttgcatgccgtggggaagaagctagacacggtgcagtgcagtgacgaagagaaagtcatcttcgccgcccaccagctgcaggggcccgcatctctatggtgggaccacttccaggctacgcagcccgaggggcagccgattacttgggctcgcttcaccgccgctttccggagaacccatgtgcccgccggagtcgtggctctcaagaagagggaattccgggagttgaagcaaggcaaccgctccgtgatggagtatttgcatgagttcaacaatctagcacgttatgccccggaggatgtgcgggaagatgaggagaagcaagagaagttcttggcaggaatggaccctgagctgtctgttcgtctagtctctggagactacccggacttccaacgtctggtggacaagagcatccgcttggaagccaagcacaaggagctggaatcgcacaagcgccgcttggcgaacttccgcaatcagcagggtgctaaccagagggtccgctacaccaatccctacccagggggatcctcctcgcagcagcaacagcagcagcagcaacctcgctccgcgcctcgacctcaatccgtggtgcgcgtcccacagcagcaacagcagcagaatcagcaagggactcgtgcgccccgtcctcctacgccagctgggcagcccgttcaaggccgcagggacgcttcaggtccgcagcggctgtgcttcaactgcttcgagcccgggcactttgcggataaatgcccgaagccaaggcgtcagcaaggccaagcgcctccccgctccaacaacggcgggaaggatgtcattcggggtcgtgtgaatcacgtgacggccgaggacgtgctgacaactccagacgtcatcgttggtacgttcctcgttcattccatccctgctacaattttgttcgactctggagcttcccactcgtttatatctgtgccattcgtggggagaaatcagttgggggtagaaaggcttagaaaccctctgcttatcaccacccctggaggggttatgacagcaaagtactatagccctgccgtccctatagaaattcaggggattccttttccctcggacctgattcttctagacacaaagaacttggatgtgatccttgggatgaattggctggcacaattccaaggagtagtggattgcgcgagacgcactgttactatgtaccgaggaccagaacaaccggttgttttctttgcacctccaacctctgtcagaagttcagaactgcatcagataggtctgtcagaaatccccatcgtcagagagttcggagacgtgtttccggaagaactacctggtatgccgcccaagcgagagattgagttccggatagatcttgctccaggaaccactcctctgcacaagcgaccctaccgtatggcagcaaatgaactggccgaagtaaagaaacagttggaagagttgaaagaaaaggggtacatacgtccgagtacttccccatggggtgctcctgtgatttttgtagagaagaaagacaagacgaagaggatgtgcgtcgactacagagctctcaatgaagtcaccatcaaaaacaagtaccctcttccccggatcgatgatctgttcgatcagcttaaaggtgccactgtattctccaagattgatcttcgttccggatatcaccaattacgtattcgggaagaagatattccgaagaccgcattcaccacgcgatacgggctgtatgaattcacggtgatgtcgttcggcttgaccaatgctcctgccttcttcatgaacttgatgaacaaagtgttcatggaatacttggataagttcgttgtggttttcatcgatgacattctgatatactcacaatcagaggaagaccatcagcaccatctccgtctggtgttgggaaagttgcgggaacatcaattgtatgccaagcttagcaagtgtgagttctggttgtccgaagtcaaattcttgggacacgtgatatctgctaaaggagttgctgtggaccccgaaacagtgaccgccgtcaccgattggaagcaacccaagacagtcactcagattcgcagtttcttgggtttggcaggatactaccggagattcatcgagaacttctccaaaatcgctcgacccatgacacagttgttgaaaaaagaagagaagtttgtgtggagcccgcaatgcgagaaggcgttccaaactctcaaagaaaagctggtttcctcgccagtgttaatcttgccggatactcgtaaggatttcatggtgtactgtgatgcttcgcgccaaggattggggtgcgtgctcatgcaggacggtcatgtggtagcctatgcctcacgccaactacgacctcatgaaggcaactaccctacgcatgacttggagttagcagcggtggttcatgctctaaaaatctggcggcactatctcattgggaaccgctgtgaaatatatactgatcataagagtttgaaatacatcttcacccagtcggatctgaatcttcggcaaaggagatggttagaactcatcaaggattatgatgtgggaatacactatcaccctggtaaggctaacgtggttgccgacgctctaagtcggaagagccattgcaatactctcaacgtccgtagcattccgcccgagcttagtcaacagatggaagccctgaacctaagcatagttggtcgtggatttttggccgcgttggaagccaagcccaccttgctcgatcaaatccgcgaggctcagaagaatgatccggacatgcatggactcctcaagaatatgaaacagggtaaagccgctggtttcacagaggatgaacacggaaccttatggaacggaaagcgggtatgcgtaccagatagcagagaacttaaacagctgatacttcaggaagctcacgaaagtccttattccattcacccgggcagtaccaagatgtacttagacttgaaggagaaatactggtgggtcagcatgaagcgggaaattgcagagtttgtggctctatgtgatgtgtgccagcgtgtcaaggtagagcaccagcgaccggctggacttctccaacctctccaagtgccggaatggaaatgggatgaaattgggatggatttcatcaccggccttccaaaaacccaaggtggatatgactctatatgggtaatagtggatcgattaaccaaggtagctcgattcattcctgtgaagaccacctatggagggaacaaactagcggagctctacttcgctaggatcgtgagtctccatggtattcccaagaaaatcgtatctgataggggaagccaattcacctctcacttttggaagaagctccaagaagagctgggtactcgattgaatttcagcaccgcctatcacccgcagacagatggacagaccgagcgtctaaatcagatcctagaagatatgctccgcgcatgtgtcctagatttcgggaagacttgggataagagtctcccctatgccgagttctcctacaataacagctatcaatccagcatacaaatggcaccctatgaagcgttgtacgggcgcaaatgccggacaccgctattgtgggaccaagttggagaaagccaagtgttcgggactgatatcctgagagaagctgaagctaaagtcagaatcattcgggataatctaaaggtggcacagtctcggcagaaaagttatgcagataaccgacgccgtgatctggaattcgcagtggatgattttgtgtatcttcgggtcacgccattgcgaggtgtgcacaggattcagacaaaagggaagctcgcacctcggtatgtgggtcccttccgtatcatcgctcgacgtggagaagttgcttaccagctggagttgcccgcctccttgggcaacgtgcatgatgtgttccatgtgtcgcaactcaagaaatgtcttcgagtgccatccgagcaggccgactcagagcaaattgaagttcgcgaagacttgacctatgtggagaggccagtgaaaatcctggacaccatggagcgcaggaccaggaaccgagtaatccgtttttgcaaggtccagtggagcaaccacgccgaagaagaagctacttgggagcgcgaagacgagctgaaggcagcccatcccggtctcttcgccagttcttccgaatctcggggtcgagattccgtttaa

SEQ ID NO: 14270 - DNA, 3999 bp, Oryza sativa
  Clone ID: TFbOSC900091j.C1.o28.gm
atgaagatcaccgcccgcaagagtacctccaggcccgagcttgttcgtcagtccttggcatggacctgcttcgtcgagacccctcgcgccgagcccgcgccctcgatggtgacaaccaggagaagtgctgctaccggtgaaggcagtcaccccgaaggcagcaaccacaacaaccatggcagcccacctccacctcctcccccgccaccaccaccaccaccaccagacaccaactccatcctcacccaaatcctcgcccagcaggccaacatgatggctgctttcctccatcacatccaaaatccgccacagcataatgttccacctccatcaccacccccgcaacattctaaactcgccgagttcctccgcatccgtccgcctaccttctctagttccaataaccccgtggatgccttggattggttgcatgccgtggggaaaaagttggataccgtgcagtgcaacgatgaggaaaaagtcatctttgccgctcaccaactgcagggacccgcatctctatggtgggacaacttccaggctatgcagccagaaggacagcctattacttgggcccgcttcaccgccgctttccggaggacccatgtgcccgccggagttatggcccttaagaaaagggaattccgggagttgaagcaaggcaaccgctccgtgatggagtatttgcatgagtttaacgacttggcccggtatgccccagaggatgttcgggaagatgaggaaaagcaggagaagtttttggcaggaatggaccctgagctgtccgtgcgtctggtctccggggattatcctgatttccagcgtctggtggacaagagcatccgcttggaagccaagcacaaggaactggagtcacacaagcgtcgcttggcaaatttccgcaatcaacaaggggctaaccaaaggatccgctacaccaatccctatccagggggatcctcctcgcagcagcagcagcagcagcaaccacgctccgcgccccgacctcaattcgtggtgcgtgtcccacagccgcagcaacagcagagtcagcaagggacccgtgcgccccgtcctcatgtgccagccgtgcagcctggacaaggccgcagagacgctcaaggtcagcagcgtctgtgcttcaactgcttcgagcccgggcactttgcggataaatgcccgaagccgcgacgccagcaaggccaagcgcctccccgccccaacaacggtggtaaggatgtcattcggggtcgtgtgaaccatgtgactgccgaggatgtgctgacgactccggacgtcatcgttggtacgtttctcattcattccatccctgctaccattttgttcgactctggagcttcccactcgtttatatctgtgccattcatggggagaaatcagttgggggtagaaaggcttaggaaccctctgctcatcaccacccctggaggggttatgacagcaaagtattatagccctgccgttcctatagaaatccagggaattcctttcccctcggatttgattcttctagacaccaagaacttggatgtgatcctcgggatgaattggttggcacaattccaaggagtagtggattgcgcaaggcgcactgtcactctgtaccgggggcctgatcaaccggttgttttctttgcacccccaacctctgtcgacaattcagaacttcatcagattggactgtcaaaaatccccatcgtccgtgagttcggagatgtgtttctggaggaactacccggtatgacgcccaagcgagagattgagttccggatagatcttgctccaggaaccactcctctatacaagcgaccctaccgtatggcagccaatgaactggccgaagtcaagagacagttggaagagttgaaagaaaagggagctctcaatgaagttactatcaaaaacaagtaccctcttccccggatcgatgatttgttcgaccagcttaaaggtgccactgtcttttcaaaaatcgatcttcgttccggatatcaccaattgcgtattcgtgaagaagatatcccgaagaccgcattcaccacgcgatacggactgtatgaattcacggtgatgtcgttcggtctgaccaatgctcctgccttcttcatgaacttaatgaacaaagtgttcatggaatacctagataagtttgttgtggttttcattgacgacatcctggtgtactcacaatcagaggaagaccatcagcagcatctctgtctggtgttgggaaagttgcgggaacaccacttgtatgccaagcttagcaagtgtgagttctggttgtccgaagtcaagttcctagggcacgtgatatctgctaaaggagttgctgtggatcccgaaacggtgaccgccgtcactgattggaagcaacccaagacagtcactcaagtccgtagctttttgggtttggccgggtactaccgaagattcatcgagaatttctccaaaattgccagacccatgacgcagttgctgaagaaggaagaaaaatttgtgtggagcccgcaatgcgagaaggcgttccaaactctcaaagagaagctggaaggccacgtggtagcctatgcctcacgccagcttcggccccatgaaggcaactaccctacccatgatttggacttggccgctgtggttcatgctctaaagatctggcggcactatctcattgggaatcgctgtgaaatatatactgatcataagagtttgaaatacatcttcactcagtcggatctgaatcttcggcagaggagatggttagaactcatcaaggattatgatgtgggaattcactatcatcctggtaaggccaacgtggtcgccgactctctaagtcgaaaaagccgttgcaacactctcggcgtccgtggtattccactggaacttaatcaacagatggaagccctgaacctaagcatagttggtcgtggattcttggctacgctggaagccaagcctaccttgcttgatcaaatccgcgaggctcataagaatgatccagatatgcatggactcctcaagaatatgaaacagggtaaagccgctggtttcacagaggatgaacacggaaccctatggaacggaaatcggagttcgtggccctttgtgatgtgtgccagcgtgtcaagggagagcaccaacgaccggccggacttctccaacctctccaagtaccagaatggaaatgggatgaaattgggatggatttcatcaccggacttccaaaaacccagggcgacctgggataagagtctcccctataccgagttctcctacaataacagctaccaagccagcatacaaatggcaccctacgaagcgttgtatggctgcaaatgccggacaccgctattgtgggaccaagttggggaaagccaagtgttcgggactgatatcctgagagaagctgaagataaagtcagaaccattcgggataatctaaaggtggcacagtcccggcagaagagttatgcagataaccgacgccgtaacctggaattcgcagtggacgattttgtgtacctatgggtcacgccattgcgaggagtacacaggtttcagacgaaagggaagctcgcacctcggttcgtgggtcctttccgtatcattgctcgacgcggagaagtagcttaccagttggagctgcccgcctccttcggcaacatgcatgatgtgttccatgtgtcgcaactcaagaaatgtcttcgagtgccatccgagcaggccgattcagagcaaattgaagttcgcgaagacttgacctacgtggagaggacagtgaaaatcctggacaccatggagcgcaggaccaggaactgggtaatccgtttttgcaaggtccaatggagcaaccacgctgaggaagaagcaacttgggaacgtgaagacgagctgaaggcagcccatcccgatctcttcgccaacgctgcagcttcagaagatccgctcttcgtggaggttgaagccgacgtttag

SEQ ID NO: 14271 - DNA, 3813 bp, Oryza sativa
  Clone ID: TFbOSC900113j.C1.o14.gm
atggtgacgaccaggagaaatgctaataccggtgatggcaaccaacctgaaggcagcaaccacaaccaccaaggcaacccacctccacctcctcctccgcctccacctccaccaccagataccaacgccattctcacccaaatcctcgcccagcaagccaacatgatgactgctttcctccaccacctccaaaatccgccacaacataatgctcccccaccacctccccaacactctaaactcgccgagttcctccgcatccgtccacccaccttctctagctccaacaaccccgtggatgcgttggattggttgcatgccgtggggaaaaagctagacactgtgcagtgcagcgatgaggagaaagtcatcttcgccgcccaccagctgcaagggcccgcatctctatggtgggaccatttccaggctacgcagccagcggggcaacctattacttgggctcgcttcaccgccgctttccggagaacccatgtgcccgccggagtcgtggctcttaagaagagggagttccgagagttgaagcaaggcaaccgctccgtgatggagtatttgcatgagttcaacaaccttgcccgttacgccccggaggatgtgcgggaagatgaggagaagcaagagaagttcttggcgggaatggaccctgagctgtccgtttgtctagtctccagggactacccggacttccaacgtctggtggacaagagcatccgcttggaagccaagcacaaggagctggagtcgcacaagcgccgcttggcgaatttccgcaatcaacagggtgctaaccaaagggtccgctacaccaatccctatccagggggatcctcctcgcagcagcaacaacagcagcagcaacctcgctccgcgcctcgacctcaattcgtggtgcgcgtcccacagccgcagcagcagcagaatcaacaagggactcgtgcgccccgtcctcctacgccaactgtgcagcctggtcaaggccgcagggacacacaaggcaattttcccggtcgcgacaagcgtctgtgcttcaactgcttcgagcctgggcactttgcggataaatgcccgaagccaaggcgccagcaaggccaagcgcctccccgctccaacaacggtgggaaggatgtcattcggggtcgtgtgaaccacgtgacggccgaggacgtgctgacaactccagacgtcatcgttggtacgttcctcattcactccatccctgctaccattttgttcgactctggagcttcccactcgtttatatctgtgccattcgtggggagaaatcagttgggggtagaaaggcttaggaaccctctgctcatcaccacccctggaggggttatgacagcaaagtattatagccctgccgtccctatagaaattcaggggataccttttccctcggatctgattctgctagacaccaagaacttggatgtgatccttgggatgaattggttggctcaattccaagggatagggctgtcagaaatccccatagtcagagagttcggagacgtgtttccggaagaactacccggaatgccgcccaagcgagagattgagttccggatagatcttgctccaggaaccactcctctgtacaagcgaccctaccgtatggcagcaaatgaactggccgaagttaagaaacagttggaagagttgaaagaaaaggggtatatacgtccgagtacttccccctggggtgctcctgtgatttttgtggagaagaaagacaagacgaagaggatgtgcgttgactacagagctctcaatgaagtcaccatcaaaaacaagtatcctcttccccggatcgatgacctgttcgatcagcttaaaggtgccactgtattctccaagatcgatcttcgttccggatatcaccaattacgtattcgtgaagaagatattccgaagaccgcattcaccacgcgatacggactgtatgaattcacggtgatgtcgttcggtttaaccaatgcacctgccttcttcatgaacttaatgaacaaagtgttcatggaatacttggacaagtttgttgtgccgcgccgcgccgccgttgcagccgccgtcgtcagtcgccgtcgccaccatcgggttcgcaaggtcgccgccgtccccgtccaccgcttcgccgccgccgaagaccgccggagcaccgtcgccgccgtcgacccgatcttctccgccgccttttcctcgacgccgccgccgtccgttggtcttccgccgacgttttggtcatcggtgagttcgccgcgccgtgatctacgtcttggtgccctccgtttgtgccgtagagccgccgttcgccggcgagcatgcgccgtccgagccgtccgagccgccgagccgccgccggtgctgacgtcgtcgctgaccccctttccgaggtaccgtggtggtactgaggcacatggtgacatgatgtggggctgtgtcttgtgggtacagtggtacacctctggccagagatactaccggaggttcatcgagaacttctccaaaatcgctcgacccatgacacagttgttgaagaaagaagagaaatttgtgtggagcccgcaatgcgagaaggcgttccagactctcaaagaaaagctggtttcctcgccggtgttaatcttgccggatactcgcaaggatttcatggtgtactgtgatgcttcgcgccaaggattggggtgcgtgctcatgcaggatggtcatgtggtggcctatgcctcacgccagctacggcctcatgaaggcaactaccctacccatgatttggagttagcagctgtcacgaccggaaataacccaacgggcattcctcacgtgcgtgcattaatccttgtcccaggaggcaagactgagccacaaactaagccttacccactagacatgtggaagtacggtagtgctttgcaacagaggcccgaagaccgccgggggagagggcgcgcggaccgggtccacgggagtggggcccacgcgtcagcctctcggtccacggcggaccgggagcacgcggctggcggcggccggcgccgtgggtcccacgcgtcagccgtacccgcgggcgcggtcgggttacgtcccgccccctactgggaggcgtgggggcctcccctaaggcttgctccccctttcgtggggccgctgactgtgtgcgtcgcgggcgccggttgggggtctggctattgtgtgggtggtctgaatgtcccatcatgggagagtggtgtggggcgcgccggggttgccggcgggtcgggggggtggcggggacgcgggggggtggggggagtgtgggatgacgggggcgcgtggctcagggttggttttgccggggcgctcaggtcggtgaggttgaggagtgctcatgtgcctatggccgctttcataaattatcgtctggctttgttcgacgttctaggactactgggtgggtgtgtggcggtggttggatgtctgtgtgatggcttctggggctcccccgggtggcgggcgacgacgggaacggcggccgaaacggaggaagccggcggcgcgttcgggacgacgaggacgacggcgttccggcggtcggcgagcgaagcggaggggcggacgaggtcgacgacgacgcggcgaagccgaaggagacgacgccgagaggggaggaagtccggagcgacggcggcggcgaaccggagctcggcggcgacggcggagagaaggtgcgacggcgcgagcacgattccgacggggagagcgagcggcgagcggcggaaacggaggaggagagcacgggggacgtttaaatag

SEQ ID NO: 14272 - DNA, 4680 bp, Oryza sativa
  Clone ID: TFbOSC900113j.C1.o30.fg
atggccggagtcattggcgatggcggcttgagtggcggtgagcctcggcatgccagtgcatacctagttccggctcaattctatggttacgacgaagcagccgtatttgagataggaagtgctttacacttggacaccgcagggtatgatgctcttgttctagttttagccgctcatatgatggtgacgaccaggagaaatgttaacaccggtgaaggcaaccaacccgaaggcagcaaccccaacccccaaggcaacccacctccaccaccaccaccagacaccaacgctattctcactcaaatcctcgcccaacaagccaacatgatgaatgctttcctccaccacctccaaaatccaccacaacagaatgctccaccaccccctccccaacactctaaactcgccgaattcctccgcatccgcccgcccaccttctctagctccaacaaccctgtggatgcgttggattggttgcatgccgtggggaagaagctagacacggtgcggtgcagtgatgaggagaaagtcgtcttcgccgcccaccagctgcagggacccgcatctctatggtgggaccacttccaggctacgcagcccgaggggcaaccgattacttgggcccgcttcaccgccgctttccggagaacccatgtgcccgctggagtcgtggctcttaagaaaagagaattccgagagttgaagcaaggcaaccgctccgtgatggagtatttgcacgagttcaacaacttggcccgttatgctccggaggatgtgcgggaagatgaggagaagcaagagaagttcttggcaggaatggaccccgaactgtctgttcgtctagtctctggggactatcctgatttccaacgtctggtggacaagagcatccgcttggaggccaagcacaaggagctggagtcgcacaagcgccgcttggcgaacttccgcaatcagcagggtgctaaccagagggtccgctacaccaatccctacccagggggaacctcctcgcagcagcagcagcagcagcaacctcgcccagcgccccgacctcaattcgtggtgcgcgtcccacagccgcagcagcagcagaatcagcaagggactcgtgcgccccgtcctcctacgccaactgtgcagcccgttcaaggccgcagggacgctcaaggtccgcagcggctgtgcttcaactgcttcgagcccggacactttgcggataaatgtccaaagccaaggcgtcagcaaggccaagcgcctccccgctccaacaacggcgggaaggatgtcattcggggtcgtgtgaatcacgtgacggccgaggacgtgctgacaactccagacgtcatcgttggtacgttcctcgttcattccatccccgctacaattttgttcgactctggagcttcccactcgtttatatctgtgccattcgtggggagaaatcagttgggggtagaaaggcttagaaaccctctgctcatcaccacccctggaggggttatgacagcaaagtattatagccctgccgtccctatagaaattcaggggattccttttccctcggatctgattctgctagacaccaagaacttggatgtgattcttgggatgaattggttggctcaattccaaggagtagtggattgcgcgcggcgcactgtcactctgtaccgagggccagaacaaccggttgttttctttgcacctccaacctctgtcagaagttcagaactgcatcagataggtctgtcagaaatccccatagtcagagagttcggagacgtgtttccggaagaactacctggtatgccgcccaagcgagagattgagttccggatagatcttgctccaggaaccactcctctgcacaagcgaccctaccgtatggcagcaaatgaactagccgaagtaaagaaacagttggaagagttgaaagaaaaggggtacatacgtccgagtacttccccatggggtgctcctgtgatttttgtagagaagaaagacaagacgaagaggatgtgcgttgactacagagctctcaatgaagtcaccatcaaaaacaagtaccctcttccccggatcgatgatctgttcgatcagcttaaaggtgccactgtattctccaagattgatctccgttccggatatcaccaattacgtattcgtgaagaagatattccgaagaccgcattcactacgcgatatggactgtatgaattcacggtgatgtcgttcggcttgaccaatgctcctgccttcttcatgaacttgatgaacaaagtgttcatggaatacttggacaagtttgttgtggttttcatcgatgacattctgatatactcacaatcagaggaagaccatcagcaccatctccgtctggtgttgggaaagttgcgggaacatcaattgtatgccaagcttagcaagtgtgagttctggttgtccgaagtcaaattcttagggcacgtgatatctgctaaaggagttgctgtggatcccgaaacagtgaccgccgtcaccgattggaagcaacccaagacggtcactcagattcgcagtttcttgggtttggcaggatactaccggaggttcatcgagaacttctccaaaatcgctcgacccatgacacagttgttgaagaaagaagagaagtttgtgtggagcccgcaatgcgagaaggcgtttcaaactctcaaggaaaagctggtttcctcgccagtgttaatcttgccgaatactcgcaaggacttcatggtgtattgtgacgcttcgcgccaaggattggggtgcgtgctcatgcaggacggtcatgtggtagcctatgcttcacgtcagctacgacctcatgaaggcaactaccctacgcatgacttggagttagcagcggtggttcatgctctaaaaatctggcggcactatctcattgggaatcgctgtgaaatctataccgaccataagagcttgaaatacatcttcacccagtcggatctgaatcttcggcaaaggagatggttagaactcatcaaggattatgatgtgggaatacactatcatcctggtaaggccaacgtggttgccgacgctctaagtcggaagagccactgcaacactctcaacgtccgaggcattccacccgagcttaatcaacagatggaagccctgaacctaagcatagttggtcgcggattcttggctgcgttggaagccaagcctaccttgctcgatcaaatccgcgaggctcagaagaatgatccggacatgcatggactcctcaagaatatgaaacagggtaaagccgcaggtttcacagaggatgaacacggaaccttatggaacggaaagcgggtatgcgttccagatagcagagaacttaaacagctgatactccaggaagctcacgaaagtccttattccattcacccgggcagtaccaagatgtacttagacttgaaggagaaatactggtgggttagcatgaagcgggaaattgcagagtttgtggctctatgtgatgtgtgccagcgtgtcaaggcagaacaccaacgaccggccggacttctccaacctctccaagtgccggaatggaaatgggatgaaattgggatggatttcatcaccggccttccaaaaacccaaggtggatatgattctatatgggtaatagtggatcgattaaccaaggtagctcgattcattcctgtgaagaccacctatggggggaataaactagcggagctctacttcgctaggatcgtgagtctccatggtattcccaagaaaatcgtatctgataggggaagccaattcacctctcacttttggaagaagctccaagaagagctgggtactcgattgaatttcagcaccgcctatcacccgcagacagatggacagaccgagcgtctaaatcagattctagaagatatgcttcgcgcatgtgtcctagacttcgggaagacttgggataagagtctcccctatgccgagttctcctacaataacagctatcaagccagcatacaaatggcaccctatgaagcgttgtatgggcgcaaatgccggacaccgctattgtgggaccaagttggagaaagccaagtgttcgggactgatatcctgagagaagctgaagctaaagtcagaatcattcgggataatctaaaggtggcacagtctcggcagaaaagttatgcagataaccgtcgccgtgatctggaattcgcagtggatgactttgtgtatcttcgggtcacgccattgcgaggtgtgcacaggtttcagacaaaagggaagctcgcacctcggtatgtgggtcccttccgtatcattgctcgacgcggagaagtcgcctaccagctggagttgcccgcctccttgggtaacgtgcatgatgtgttccatgtgtcgcaactcaagaaatgtcttcgagtgccatccgagcaggccgactcagagcaaattgaagttcgcgaagacttgacctatgtggagaggccagtgaaaatcctggacaccatggagcgcaggaccaggaaccgagtaatccgtttttgcaaggtccagtggagcaaccacgccgaagaagaagccacttgggagcgtgaagacgagctgaaggcagcccatcccggtctcttcgctagttcttccgaatctcggggtcgagattccgtttaa

SEQ ID NO: 14273 - DNA, 5019 bp, Oryza sativa
  Clone ID: TFbOSC900144j.C1.o3.fg
atgtcatggcacagggccggtgtcctgctgctaggggctcagtcctgcctgcctgtcccgggggttccggccgtaggtgggattgagtcggtactcttgtctatggctaggatgggttggaaactatgtcacgtcttccgtctgtacaccgtggtgatggccggcagcgtcagccgtcgtggtctggacatgactggtttcgtcttggagctgcggggcatgtgcgttgtcctggggtatccacatggagtggactaccagggcaggccgcttccggagcaggagggtgacgatgcagagccccacgctgcttgggaggttactgcagtgatcctcactggctctcccgagcggacttcgttggcagtcaccgcgggtggagattctttccccgccgcttgccagaacgccgctctcctcgccatcggcactcttcaccagcgctacccggacgagttgcagcactcgccctaccgctaccaccctcgccgcggaggagcccgcgactacgccatcttccgggatgctagctcggaggatgacgctaccatcatgcacctggcgcgcatggtggaggcgtacgacgcggctcgtatcgacttccatcagatggtgcgccgtgggatggtcgggaacaacatgaagatcctggagctgcgtcaggagaatctgcagctgaagaaggacctagacgcagtagaggcgcagctgcatcagctcaagatcgcccagggagagatggtgaagaccaggagaaatgctgccaccggtgatggcaaccaacccgaaggcagcaaccacaaccaccagggcagcccacctccacctcctcctccgcctccaccaccaccaccagacaccaacgccattctcacccaaatcctcgcccagcaggccaacatgatgactgctttcctccaccacctccaaaatccgccacaacagaatgcaccaccaccacccccacaacactctaaactcgccgagttcctccgcatccgtccacctaccttctctagctccaacaaccccgtggatgcgttggattggttgcatgccgtggggaaaaagctagacactgtgcagtgcagcgatgaggagaaagtcatcttcgccgcccaccagctgcaggggcccgcatctttatggacccatgtgcccgccggagtcgtggcccttaagaaaagggaattccgagagttgaagcaaggcaaccgctctgtgatggagtatttgcatgagttgaacaacctggcccggtacgccccggaggatgtacgggaagatgaggaaaagcaggagaagttcttggcaggaatggaccctgagctgtccgtgcgcctagtctccggggactatccggatttccaacgtctgatggacaagagcatccgcttggaagccaagcacaaggaactggagtcgcacaagcgccgcttggcgaatttccgcaatcaacagggtgctaaccaaagggtccgctacaccaatccctatccagggggatcctcctcgcagcagcaacaacagcagcagcaacctcgctccgcgccccgacctcaattcgtgcctggtcaaggccgcagggacgctcaaggtccgcagcgtctgtgcttcaactgcttcgagcccgggcactttgcggataaatgcccaaagccgaggcgccagcaaggccaagcgcctccccgctccaacaacggtggtaaggatgtcattcggggtcgtgtgaaccacgtgacggccgaggacgtgctgacaactccagacgtcatcgttggtacgttcctcattcattccatccctgctaccattttgttcgactctggagcttcccactcgtttatatctgtgccattcgtggggagaaaacagttgggggtagaaaggcttaggaaccctctgctcatcaccacccctggaggggttatgacagcaaagtattatagccctgccgtccctatagaaattcaggggattccttttccctcggatctgattcttctagacaccaagaacttggatgtgatccttaggatgaattggttggctcaattccaaggagtagtggattgcgcgagacgcactgtcactctgtaccgagggccggaacaaccggttgttttctttgcacccccaacctctgtcagtagttcagaacttcatcagataggactgtcagaaatccccatcgtcagagagttcggagacgtgtttccggaagaactacccggtatgccgcccaagcgagagattgagttccggatagatcttgctccaggaaccactcctttgtacaagcgaccctaccgtatggcagcaaatgaactggccgaaaagaaagacaagatgaagaggatgtgcgttgactacagagctctcaatgaagtcaccatcaaaaacaagtaccctcttccccgtatcgatgatatgttcgatcagcttaaaggtgccactgtattctccaagattgatcttcgttccggatatcaccaattacgtattcgtgaagaagacattcctaagaccgcattcaccacgcgatacggactgtatgaattcacagtgatgtcgttcggtttaaccaatgcacctgccttcttcatgaacttaatgaacaaagtgttcatggaatacttggataagtttgtggtggttttcattgatgacattctgatatactcacaatccgaggaagaccatcagcaccatctccgtctggtgttgggaaagttgcgggaacatcaattgtatgccaaacttagcaagtgtgagttctggttgtccgaagtcaaattcttaggacacgtgatatctgctaaaggagttgcggtggaccccgaaacagtgaccgccgtcactgattggaagcaacccaagacagtcactcaagttcgcagtttcttaggtttggcaggatactaccggaggtttatcgagaacttctccaaaatcgctcgacccatgacacagttgttgaagaaagaagagaaatttgtgtggagcccgcaatgcgagaaggcgttccaaactctcaaagaaaagctggtttcctcgccggtgttaatcttgccggatactcgcaaggacttcatggtgtattgtgacgcttcgcgccaaggattggggtgcgtgctcatgcaggacggtcatgtggtggcctatgcctcacgccagctacggcctcatgaaggcaactaccctacccatgatctggaattagccgcggtggttcatgctctaaaaatctggcggcactatctcattgggaatcgctgtgaaatatatactgatcataagagtttgaaatacatcttcacccagtcggatctgaatcttcggcagaggagatggttagaactcatcaaggattatgacgtgggaattcactatcatcctggtaaggccaacgtggttgccgacgctctaagtcgaaaaagccattgcaacactcttgacgtccgtggcattccacccgaacttaaccaacagatggaagccctgaacctaagcatagttggtcgtggattcttggctacgctggaagccaagcccaccttgctcgatcaaatccgcgaggctcagaagaacgacccggacatgcgtggactcctcaagaatatgaaacagggtaaagccgctggtttcacagaggatgaacacggaaccctatggaacggaaatcgggtatgcgttccagatgacagagaacttaaacagctgatacttcaggaagctcacgaaagtccttattccatccaccctggcagtacgaagatgtacttagacttgaaggagaaatactggtgggttagtatgaagcgggaaattgcagagttcgtggccctttgtgatgtgtgccagcgtgtcaaggcagagcaccaacgaccggccggacttctccaacctctccaagtaccagaatggaaatgggatgaaattgggatggatttcatcaccggacttccaaaaacccaaggtggatatgattctatatgggtagttgtggatcgattaaccaaggtagctcggtttattcctgtgaagaccacctatggagggaacaaactagccgagctttacttcgctaggatcgtgagtctccatggcgttcccaagaaaatcgtatctgataggggaagccaattcacctctcacttttggaagaagctccaagaagagttgggtacccgattaaatttcagcaccgcgtatcacccgcagacagatggacagaccgagcgtctaaatcagatcctagaagatatgcttcgcgcatgtgtcctagatttcgggaagacctgggataagagtctcccctatgccgagttctcctacaataacagctaccaacccagtatacaaatggcaccttatgaagcgttgtatgggcgcaaatgccggacaccgctattgtgggaccgagttggggaaagccaagtgttcgggactgatatcctgagagaagctgaagcgaaggtcagaaccattcgggataatctaaaggtggcacagtcccggcagaaaagttatgcagataaccgtcgccgtaacctggaattcgcagtggacgattttgtgtaccttcgggtcacgccattgcggggtgtgcacaggtttcagacaaaggggaagctcgcacctcggtatgtgggtcctttccgtatcattgctcggtgcggagaagtcgcttaccagttggagctgcccgcctccttgggcaacgtgcacgatgtgttccatgtgtcgcaactcaagaaatgtcttcgagtgccatccgagcaggccgactcagagcaaattgaagttcgcgaagacttgacctacgtggagaggccagtgaaaatcctggacacaatggaacgcaggaccaggaaccgggtaatccatttttgcaaggtccagtggagcaaccacgccgaggaagaagctacttgggagcgtgaagacgagctgaaggcagcccatcccgatctcttcgctagttcttccgaatctcggggtcgagattccgtttaa

SEQ ID NO: 14274 - DNA, 5412 bp, Oryza sativa
  Clone ID: TFbOSC900175j.C1.o10.fg
atgggttggaaactatgtcacgtcttccgcccgtataccgtggtgatggccggcagcgtcacccgtcgtggtttgagcatgactggcttcgtcttggagctgcggggcatgtgcgtggtcttggggtatccacatggagtggattaccaggccaggccgctcccggagcaggagggtgaggatgcagagcctcacgctggttgggaggtcactgcagtgatcctctccggctctcccgagcggacttcgctggcagtcaccgcgggtggagattccttccccgccgcttgccagaacgccgctctcctcgccatcggcacccttcaccagcgctacccggacgagttgcagcactcgccctaccgctaccaccctcgtcgcggaggagcccgcgactacgccaccttccgagacgccagctcggaggatgacgccaccgtcgtgcacctggcacgcatggtggaggcgtacgacgcggctcgtatcgacttccatcagatggtgcgccgtggcatggtggagaacaacctgaagatcctggagctgcgtcaggagaatctgcagctcaagaaggacctcgacgcgttggaggcgcagctgcatcagctcaagatcgcccagggagaggacagccgccccaagcgtcgccgcgtctgccgcagccagaagatcaccgcccgcaagagcacctccaggcccgagcttgttcgtcagtccctggcgtggacctgcttcgtcgagacccctcgtgccgagcctgcgcccgtggttccccaggagggggaagcctccggcgttggtagctcggagggtgcgctgttgctcaccttccgtcctggcccgtcgcagcgctctctttctctgtttgctggttctgtgtggggttttcagatggtgacgaccaggagaaatgttaacaccggtgaaggcaaccaacccgaaggcagcaaccacaaccaccaaggcaatccacctccacctccacctccgcctccaccaccaccgccagacaccaacgccattctcacccaaatcctcgcccagcaagccaacatgatgaccgctttcctccaccacctccaaaacccgccacaacagaatgctccaccaccacctccccaacactctaaactcgccgagttcctccgcatccgcccacctaccttctccagctccaacaaccccgtggatgctttggattggttgcatgccgtggggaagaagctagacacggtgcagtgcagtgatgaggagaaagtcgtcttcgccgcccatcagctgcagggacccgcatctctctggtgggaccacttccaggctacgcagccagagggacagccgattacttgggctcgcttcaccgccgctttccggagaacccatgtgcccgctggagtcgtggctcttaagaaaagggaattccgagagttgaagcaaggcaaccgctccgtgatggagtatttgcatgagttcaacaatctggcccggtacgctccgcaggatgtgcgggaagacgaggagaagcaggagaagttcttggcaggaatggaccctgagctgtccgttcgtctagtctctggggactatcctgattttcaacgactggtggacaagagcatccgcttggaagccaagcacaaggagctggaatcgcacaagcgccgcttggcgaatttccgcaatcaacagggtgctaaccagagggtccgctacaccaatccctacccagggggatcctcctcgcagcagcagcagcagcagcagcaacctcgctccgcgcctcgacctcaattcgtggtgcgcatcccacagccgcagcagcagcagaatcagcaagggactcgtgcaccccgtcctcctacgccaactgtgcagcccgttcaaggccgcagggacgctcaaggtcagcagcgtctgtgcttcaactgcttcgagcccgggcactttgcggataaatgcccaaagccaaggcgtcagcaaggccaagcgcctccccgctccaacaacggcgggaaggatgtcattcggggccgtgtgaatcatgtgacggccgaggacgtgctgacaactccagacgtcatcgttggtacgttcctcgttcattccatccctgctactattttgttcgactctggagcttcccactcgtttatatctgtgtcattcgtggggagaaatcagttgggggtagaaaggcttagaaaccctctgctcatcaccacccctggcggggttatgacagcaaagtattatagccctgccgttcctatagaaattcaggggattccttttccctcggatctgattctgctagacaccaagaacttggatgtgattcttgggatgaattggttggcacaattccaaggagtagtggattgcgcgagacgcactgttactctgtaccgagggccagaacaaccggttgttttctttgcacctccaacctctgtcagaagttcagaactgcatcagataggtctgtcagaaatccccatagtcagagagttcggagacgtgtttccggaagaactacctggtatgccgcccaagcgagagattgagttccggatagatcttgctccaggaaccactcctctgcacaagcgaccctaccgtatggcagcaaatgaactggccgaagtaaagaaacagttggaagagttgaaagaaaaggggtacatccgtccgagtacttccccatggggtgctcctatgatttttgtagagaagaaagacaagacgaagaggatgtgcgtcgactacagagctctcaatgaagtcaccatcaaaaacaagtaccctcttccccggatcgatgatctgttcgatcagcttaaaggtgccactgtattctccaagattgatcttcgttccggatatcaccaattacgtattcgggaagaagatattccgaagaccgcattcaccacgcgatacgggctgtatgaattcacggtgatgtcgttcggcttgaccaatgctcctgccttcttcatgaacttaatgaacaaagtgttcatggaatacttggacaagtttgttgtggttttcatcgatgacattctgatatactcacaatcagaggaagaccatcagcaccatctccgtctggtgttgggaaagttgcgggaacatcaattgtatgccaagcttagcaagtgtgagttctggttgtccgaagtcaaattcttaggacacgtgatatctgctaaaggagttgctgtggaccccgaaacagtgaccgccgtcactgaatggaagcaacccaagacagttactcaagtccgcagtttcttaggtttggcaggatactaccggagattcatcgagaacttctccaaaatcgctcgacccatgacacagttgttgaaaaaagaagagaaatttgtgtggagcccgcaatgcgagaaggcgttccaaactctcaaagaaaagctggtttcctcgccagtgttaatcttgccggatactcgcaaggatttcatggtgtactgtgatgcttcgcgccaaggattggggtgcgtgctcatgcaggacggtcatgtggtagcctatgcctcacgccaactacgacctcatgaaggcaactaccctacacatgacttggagttagcagcggtggttcatgctctaaaaatctggcggcactatctcattgggaaccgctgtgaaatatatactgatcataagagtttgaaatacatcttcactcagtcagatctgaaccttcggcaaaggagatggttagaactcatcaaggattatgatgtgggaattcactatcatcctggtaaggctaacgtggttgccgacgctctaagtcggaagagccattgcaatactcttaacgtccgtagcattccgcccgagcttaatcaacagatggaagccctgaacctaagcatagttggtcgcggattcttggctgcgttggaagccaagcctaccttgctcgatcaaatccgcgaggctcagaagaatgatccggacatgcatggactcctcaagaatatgaaacagggtaaagccgcaggtttcacagaggatgaacacggaactctatggaacggaaagcgggtgtgcgttcccgataacagggaacttaaacagctgatacttcaggaagctcacgaaagtccttattccattcacccgggcagtaccaagatgtacttagacctgaaggagaaatactggtgggttagcatgaagcgggaaattgcagagtttgtggctctatgtgatgtgtgccagcgtgtcaaggcagaacaccaacgaccggccggacttctccaacctctccaagtgccagaatggaagtgggatgaaattgggatggatttcatcaccggacttccaaaaacccaaggtggatatgattctatatgggtaattgtggatcgactaacaaaggtagctcgatttattcctgtgaagaccacttacggagggaacaaactagcggagctctacttcgctaggatcgtgagtctccatggtattcccaagaaaatcgtatctgataggggaagccaattcacctctcacttttggaagaagctccaagaagagctgggtactcgattgaatttcagcaccgcctatcacccgcagacagatggacagaccgagcgtctaaatcagatcctagaagatatgctccgcgcatgtgtcctagatttcgggaagacttgggataagagtctcccctatgccgagttctcctacaataacagctaccaagccagcatacaaatggcaccctatgaagcgttgtacgggcgcaaatgccggacaccgctattgtgggaccaagttggagaaagccaagtgttcgggactgatatcctgagagaagctgaagctaaagtcagaatcattcgggataatctaaaggtggcacagtctcggcagaaaagttatgcagataaccgtcgccgtgatctggaattcgcagtggatgactttgtgtatcttcgggtcacgccattgcgaggtgtgcacaggtttcagacaaaagggaagctcgcacctcggtatgtgggtcccttccgtatcatcgctcgacgcggagaagttgcttaccagctggagttgcccgcctccttgggcaacgtgcatgatgtgttccatgtgtcgcaactcaagaaatgtcttcgagtgccatccgagcaggccgactcagagcaaattgaaattcgcgaagacttgacctatgtggagaggccagtgaaaatcctggacaccatggagcgcaggaccaggaaccgagtaatccgtttttgcaaggtccagtggagcaaccacgccgaagaagaagctacttgggagcgtgaagacgagctgaaggcagcccatcccgatctcttcgccagttcttccgaatctcggggtcgagattccgtttaa

SEQ ID NO: 14275 - DNA, 5361 bp, Oryza sativa
  Clone ID: TFbOSC900176j.C1.o13.fg
atggatgaagtcgggggtcgatggacattctccagggcaaatgaaggctacacgagctgcggcccgatggccggcagcgtcacccgtcgtggtttggacatgactggcttcgtcctggagctgcggggcatgtgcgtggtcttggggtatccacatggagtggattaccaggccaggccgctcccggagcaggagggtgaggatgcagagcctcacgctgggtgggaggtcactgcagtgatcctctctggctctcccgagcggacttcgctggcagtcaccgcgggtggggattcttctcccgccgcttgccagaacgccgctctcctcgccatcggcaccctccaccagcgctacccggacgagttgcagcactcgccctatcgctaccaccctcgtcgcggaggagcccgcgacttcgccaccttccgagatgctagcttggaggatgacgctaccgtcgtgcatctggcacgcatggtggaggcatacgacgcggctcgtatcgacttccatcagatggtgcgtcgcgggatggttgagaacaacctgaagatcctggagctgcgtcaggagaacctgcagctcaagaaggacctcgacgcattggaggcgcagctgcaccagctcaagatcgcccagggagaggacagccgccccaagcgtcgccgcgtctgccgcagccagaagatcaccgcccggaagagcacctccaggcccgagcttgttcgtcagtccctggcgtggacttgcttcgtcgagacccctcgtgccgagcctgcgcccgtggttccccaggagggggaagcctccggcgttggtagcacggaggatgcgctgttgctcaccttccgccctggcccgtcgcagcggagaaatgttagcaccggtgaaggcaaccaacccgaaggcagcaaccccaacccccaaggcaatccacctccaccaccaccaccagacaccaacgccattctcacccaaatcctcgcccagcaagccaacatgatgaccgctttcctccaccacctccaaaatccgccacaacagaatgctccaccaccacctccacaacactctaagctcgccgagttcctccgcatccgcccacccaccttctctagctccaacaatcccgtggatgcgttggattggttgcatgccgtggggaagaagctggacactgtgcagtgcagtgatgaagagaaagtcatcttcgccgcccatcagctgcaggggcccgcatctctatggtgggaccatttccaggctacgcagccagaggggcaaccgattacttgggcccgcttcaccgccgctttccggagaacccatgtgcccgccggagtcgtggctcttaagaagagggagttccgggagttgaagcaaggcaaccgctccgtgatggagtatttgcacgagttcaacagtctggcccggtacgctccggaggatgtgcgggaagatgaggagaagcaagagaagttcttggcgggaatggaccctgagctgtccgttcgcctagtctctggggactatccggacttccaacgtctggtggacaagagcatccgcttggaggccaagcacaaggagctggagacgcacaagcgccgcttggcgaacttccgcaatcagcagggcgctaaccagagggtccgctacaccaatccctatccagggggatcctcctcgcagcagcaacaacagcagcagcaacctcgctccgcgcctcgacctcaattcgtggtgcgcgtcccacagccgcagcagcagcagagtcagcaagggactcgtgtagcccgtcctcctacgccagttgtgcagcccgttcaaggccgcagggacgctcaaggtcagcagcgtttgtgcttcaactgcttcgagcccgggcactttgcggataaatgcccaaagccaaggcgtcagcaaggccaagcgcctccccgctccaacaacggtggcaaggacgtcattcggggtcgtgtgaaccacgtgacggccgaggacgtgctgacaactccagacgtcatcgttggtacgttcctcgttcattccatcccagctactattttgttcgactctggagcttcccactcgtttatatctgtgccattcgtggggaaaaatcagttgggggtagaaaggcttaggaaccctctactcatcaccacccctggaggggttatgacagcaaagtactatagccctgccgttcctatagaaattcaagggattccttttccctcggatctgattctgctagacaccaagaatttggatgtgattcttgggatgaattggttggctcaattccagggagtagtggattgcgcgagacgcactgtcactctgtaccgaggaccggaacaaccggttgttttctttgcacccccaacctctgtcagaagttcaaaactgcatcaaatagaactatcagaaatccccattgtcagagagttcggagatgtgtttccggaagaactacctggtatgccgcctaagcgagagattgagttccggatagatcttgctcctggaaccactcctctgcacaagcgaccctaccgtatggcagcaaatgaactggccgaagttaagaaacagttggaagagttgaaagaaaaggggtacatacgtccgagtacttccccttggggtgctcctgtgatctttgtggagaagaaagacaagacgaagaggatgtgcgttgactaccgagctctcaatgaggtcaccatcaaaaacaagtaccctcttccccggatcgatgatctgttcgaccagcttaaaggtgccactgtattctccaagattgaccttcgttccggatatcaccaattacgtattcgtgaagaagatattccgaagaccgcattcaccacgcgatatgggctgtatgaattcacggtgatgtcgttcggtctaaccaatgcacctgcattcttcatgaacttgatgaacaaagtgttcatggaatacttggacaagtttgttgtggttttcattgatgacatcctgatatactcacagtcagaagaagaccatcagcaccatctccgtctggtgttgggaaagctgcgggaacatcaattatatgccaagcttagcaagtgtgagttctggttgtccgaagtaaaattcttggggcacgtgatatctgctaaaggagttgccgtggaccccgaaacagtgaccgccgtcactgaatggaagcaacccaagacagtcactcaaattcgcagtttcctgggtttggcaggatattaccggagattcatcgagaacttctccaaaatcgctcgacccatgacacagttgttgaagaaagaagagaaatttgtgtggagcccgcaatgcgagaaggcattccaaactctcaaagaaaagctggtctcctcgccagtgttaatcctgccagatactcgcaaggatttcatggtgtactgtgatgcttcgcgccaaggattggggtgcgtactcatgcaggacggtcatgtggtagcctatgcctcacgccagctacgacctcatgaaggcaactaccctacacatgacttggaattagcagcggtggttcatgctctaaaaatctggcggcactatctcattgggaatcgctgtgaaatatatacagatcataagagtctgaaatacatcttcacccagtcggatctgaaccttcggcaaaggagatggttagaactcatcaaggattacgatgtgggaattcactatcatcctggtaaggccaacgtggtcgccgacgctctaagtcgaaaaagccattgcaacactctcaacgtccgtggcattccacccgagcttaaccaacagatggaagccctgaacctaagcatagttggtcgtgggttcttggccgcgttggaagccaagcctaccttgctcgaccaaatccgcgaggctcagaagaatgatccggacatgcatggactcctcaagaatatgagacagggtaaagccgctggtttcacggaggatgaacacggaaccctatggaacggaaagcgggtatgcgttccagatagcagagaacttaaacagttgatacttcaggaagctcacgaaagtccttattccattcacccgggcagtacgaagatgtacctagacttgaaggagaaatactggtgggttagcatgaagcgggaaattgcagagttcgtggctctatgtgatgtgtgccagcgtgtcaaggcagaacaccaacgaccggccggacttctccaacctctccaagtaccagaatggaaatgggatgaaattgggatggatttcatcaccggacttccaaaaacccaaggtggatatgattctatatgggtaattgtggatcgactaacaaaggtagctcgatttattcctgtgaagaccacctatggagggaacaaactagcggaactctacttcgctaggatcgtgagtctccatggtatccccaagaaaatcgtatctgataggggaagccaattcacctctcacttttggaagaagctccaagaagagctgggtacccgtttaaatttcagcaccgcctatcacccgcagacagatggacagaccgagcgtctaaatcagatcctagaagatatgcttcgcgcgtgtgtcctagattttgggaagacttgggataagagtctcccctatgccgagttctcctacaacaacagctatcaagccagcatacaaatggcaccttatgaagcgttgtacgggcgcaaatgccggacaccgctattgtgggaccaagtcggagaaagccaagtgttcggaactgatatcctgagggaagctgaagctaaagtcagaatcattcgggataatctaaaggtggcacagtcccggcagaaaagttatgcagataaccgacgccgtgacctggaattcgcagtggacgattttgtgtaccttcgggtcacgccattgcgaggggtacacaggtttcagacaaaagggaagctcgcacctcggtatgtgggtcccttccgtatcatcgctcgacgcggagaagtcgcttatcagctagagttgcccgcctccttgggtaacgtgcacgatgtgttccatgtgtcgcaactcaagagatgtcttcgagtgccatccgagcaggccgactcagagcaaattgaagttcgcgaagatttgacctacgtggagaggccagtgaaaatcctggacaccagggagcgcaggaccaggaaccgggtaatccgtttttgcaaggtccagtggagcaaccatgccgaagaagaagctacttgggagcgtgaagacgagctgaaggcagcccatcccgacctcttcgccagttcttccgaatctcggggtcgagattccgtttaa

SEQ ID NO: 14276 - DNA, 5409 bp, Oryza sativa
  Clone ID: TFbOSC900179j.C1.o13.fg
atggatgaagtcgggcgtcgatggacattctccagggcaaatgaaggctacacgagctgcggcccgatggccggcagcgttacccgtcgtggtttggacatgaccggcttcgtcttggagctgcgaggcatgtgcgtggtcttgggatatccacatggagtggattaccaggccaggccgctcccggagcaggagggtgaggatgcagagcctcacgctggatgggaggtcactgcagtgatcctctccggctctcccgagcggacttcgctggcagtcaccgcgggcggagactccttccccgccgcttgccagaacgccgctctcctcgccatcggcactcttcaccagcgctacccggacgagttgcagcactcgccctaccgctaccaccctcgtcgcggaggagcccgcgaccacgccaccttccgagacgccagctcggaggatgacgctaccgtcgtgcacctggcacgcatggtggaggcgtacgacgcggctcgtatcgacttccatcagatggtgcgtcgtggcatggtggagaacaacatgaagatcctggagctgcgtcaggagaatctgcagctcaagaaggacctcgatgcgttggaggcgcagctgcatcagctcaagatcgcccagggagagggcagccgccccaagcgtcgccgcgtctgccgcagccagaagatcaccgcccgcaagagcacctccaggcctgagcttgtccgtcagtccttggcgtggacttgcttcgtcgagacccctcgtgccgagcctgcgcccgtggttccccaggagggggaagcctccggcgttggtagctcggagggtgcgctgttgctcaccttccgtcctggcccgtcgcagcgctctccttctctgtttgctggttctgtgtggggttttcagatggtgacgaccaggagaaatgttaacaccggtgaaggcaaccaacccgagggcagcaaccccaacccccaaggcaacccacctccaccaccaccaccagacaccaacgccattctcacccaaatcctcgcccaacaagccaacatgatgaatgctttcctccaccacctccaaaacccgccacaacagaatgctccaccaccacctccccaacactctaaactcgccgagttcctccgcatccgcccacctaccttctctagctccaacaaccctgtggatgctttggattggttgcatgccgtggggaagaagttagacacggtgcagtgcagcgacgaagagaaagtcgtcttcgccgcccatcagctgcagggacccgcgtctctctggtgggaccacttccaagctacgcagcccgaggggcaaccgattacttggactcgcttcaccgccgctttccggagaacccatgtgcccgccggagtcgtggccctcaagaaaagagaattccgggagctgaagcaaggcaaccgctccgtgatggagtatttgcatgagttcaacaatctagcccgttacgccccagaggatgtgcgggaagatgaggagaagcaggagaagttcttggcaggaatggaccctgagctgtctgttcgtctagtctctggagactatccggatttccaacgactggtggacaagagcatccgcttggaggccaagcacaaggaactggaatcgcacaagcgccgcctggcgaatttccgcaatcaacagggtgctaaccagagggtccgctacaccaatccctacccagggggatcctcctcgcagcagcagcagcagcaacctcgcccagcgccccgacctcaattcgtggtgcgcgtcccacagcagcaacagcagcagaatcaacaagggactcgtgcaccccgtcctcctacgccagcggtgcagcccgttcaaggccgcagggacgcttcaggtccgcagcggctgtgcttcaactgcttcgagcccgggcactttgcggataaatgcccgaagccaaggcgtcagcaaggccaagcgcctccccgctccaacaacggcgggaaggatgtcattcggggtcgtgtgaatcacgtgacggccgaggacgtgctgacaactccagacgtcatcgttggtacgttcctcgttcattccatccctgctacaattttgttcgactctggagcttcccactcgtttatatctgtgccattcgtggggaaaaatcagttgggggtagaaaggcttagaaaccctctgctcatcaccacccctggcggggttatgacagcaaagtattatagccctgccgtccctatagaaattcaggggattccttttccttcggacctgattcttctagacacaaagaacttggatgtgattcttgggatgaattggttggcacaattccaaggagtagtggactgcgcgagacgcactgttactctgtaccgagggccagaacaaccagttgttttctttgcacctccaacctctgtcagaagttcagaactgcatcagataagtctgtcagaaatccccatagtcagagagttcggagacgtgtttccggaagaactacctggtatgccgcccaagcgagagattgagttccggatagatcttgctccaggaaccactcctctgcacaagcgaccctaccgtatggcagcaaatgaactggccgaagtaaagaaacagttggaagagttgaaagaaaaggggtatatacgtccgagtacttccccatggggtgctcctgtgatttttgtagaaaagaaagacaagacgaagaggatgtgcgtcgactacagagctctcaatgaggtcaccatcaaaaacaagtaccctcttccccggatcgatgatctgttcgatcagcttaaaggtgccactgtattctccaagattgatcttcgttccggatatcaccaattacgtattcgtgaagaagatattccgaagaccgcattcactacgcgatatggactgtatgaattcacggtgatgtcgttcggcttaaccaatgctcctgccttcttcatgaacttgatgaacaaagtgttcatggaatacttggataagttcgttgtggttttcattgatgacattctgatatactcacaaacagaggaagaccatcagcaccatctccgtctggtgttgggaaagttgcgggaacatcaattgtatgccaagcttagcaagtgtgagttctggttgtccgaagtcaaattcttggggcacgtgatatctgctaaaggagttgctgtggaccccgaaacagtgaccgccgtcaccgaatggaagcaacccaagacagttactcagattcgcagtttcttgggtttggcaggatactatcggagattcatcgagaacttctccaaaatcgctcgacccatgacacagttgttgaagaaagaagagaagtttgtgtggagcccgcaatgcgagaaggcgttccaaactctcaaagaaaagctggtttcctcgcccgtgttaatcttgccggatactcgcaaggatttcatggtgtactgtgatgcttcgcgccaaggattggggtgcgtgctcatgcaggacggtcatgtggtagcctatgcctcacgccagctacgtcctcatgaaggcaactaccctacacatgacttggagttagcagcggtggttcatgctctaaaaatctggcggcactatctcattgggaaccgctgtgaaatatatactgatcataagagtttgaaatacatcttcacccagtcggatctgaatcttcggcaaaggagatggttagaactcatcaaggattatgatgtgggaattcactatcaccctggtaaggccaatgtggttgccgacgctctaagtcgaaagagccactgcaacactctcaatgtccgaggcattccacccgagcttaatcaacagatggaagccctgaacctaagcatagttggtcgcggatttttggccgcgttggaagccaagcccaccttgctcgatcaaatccgcgaggctcagaagaatgatccggacatgcatggactcctcaagaatatgaaacagggtaaagccgctggtttcacagaggatgaacacggaaccttatggaacggaaagcgggtatgcgttccagaaagcagagagcttaaacagctgatacttcaggaagctcatgaaagtccttattccattcacccgggtagtacaaagatgtacttagacttgaaggagaaatactggtgggttagcatgaagcgggaaattgcagagtttgtggctctatgtgatgtgtgccagcgtgtcaaggcagagcaccagcgaccggctggacttctccagcctctccaagtgccggaatggaaatgggatgaaattgggatggatttcatcaccggccttccaaaaacccaaggtggatatgattctatatgggtagtcgtggatcgattaaccaaggtagctcgattcattcctgtgaagaccacttatggagggaacaaactagcggagctctacttcgctaggatcgtgagtctccatggtattcccaagaaaatcgtatctgataggggaagccaattcacctctcacttttggaagaagctccaagaagagctgggtactcgattgaattttagcaccgcctatcacccgcagacagatggacagaccgagcgtctaaatcagatcctagaagatctgctccgcgcatgtgtactagatttcgggaagacttgggataagagtctcccctatgccgagttctcctacaataacagctatcaagccagcatacaaatggcaccttatgaagcgttgtacgggcgcaaatgccgaacaccgctattgtgggaccaagttggagaaagccaagtgttcgggactgatatcctgagagaagctgaagctaaagtcagaatcattcgggataatctaaaggtggcacagtctcggcagaaaagttatgcagataaccgtcgccgtgatctggaattcgcagtggatgattttgtgtaccttcgggtcacgccattgcgaggtgtgcacaggtttcagacaaaagggaagctcgcacctcggtatgtgggtcccttccgtatcatcgctcgacgtggagaagttgcttaccagctggagctgcccgcctccttgggtaacgtgcatgatgtgttccatgtgtcgcaactcaagaaatgtcttcgagtgccatccgagcaggccgactcagagcaaattgaagttcgcgaagacttgacctacgtggagaggccagtgaaaatcctggacaccatggagcgcaggaccaggaaccgggtaatccgtttttgcaaggtccagtggagcaaccacgccgaagaagaagctacttgggagcgcgaagacgagctgaaggcagcccatcccgatctcttcgccagttcttccgaatctcggggtcgagattccgtttaa

SEQ ID NO: 14277 - DNA, 6729 bp, Oryza sativa
  Clone ID: TFbOSC900186j.C1.o18.gm
atggccgagcaagcaaaggtgcacgacctctctccgagtgtgagcggcgacgacggggagccgaacccacgccgtcgagctcgtactcccccacctccactccaaagtcctaagcagggggaggcgctcgagagagttgataaatccgcagcatcaccgattgcgggtgatgcaggggaacggcgagatggggagcgtcgcctcctcgtctacggcgacggcagcacgcctcagggcgcgcttcaggctgctggcgcgctcctacgtcacccgcccgtcgtccatgaccctgagtctccagctcagcgatggctggacgacgtggccaacttggtcatgatggcccagcagcgcctgggtgctggtggacggtccgccactaccaagacctccggcgccgccaccaccggttccgtgtcatcaaggcggagggcgcggcgagcggcggcggctgcacggcattcggctgccactccctcgtcgacaccttcgactcgggaggatcagcatggggagccggatgcccgcctcaacatcgagcgccggcgtaatagccggcgtactccccgtgcaacggagggcgcctcctcgtccagagtgtcacctcgacatggacgtgaggaccagccctccgtgcccccggttggtggtgttggctgtagagcctttgtggcgagtcttcggaatgtccgttggcccccaaggttccggcccaccatcaccgagaagtatgatgggagcgtcaaccccaccgagtttctccagatctatacgaccgggatcgaggccgctgggggagacgacagggtcatggctaatttctttcccatggccctgaagggacaggcgcggggttggctaatgaacctgccacccgcgtcgcggttttgccaagtccgcaatactataccatgcatccctgcacacgcggtgatctacgcgttcagggggggcgtgcggcacaaccgcatgctcgaaaagatcgcttccaaagagccccagactaccgcggagctttttcagctcgcggaccgagtggctcgcaaggaggaggcctggacctggaacccctccggttccggtgtggcagcttcggccgcccccggatccgccgctcagacagggcggcgtgacaggaggaggaagaaaaggtcggcccattccggcgacgagggtcacgtcctcgccgtcgagggcgctccgcgggccacccgaaaggggaggcctgcgagcgacaaaaagaaagaggctggtactcccagcagggagcgcccggccagcaagtggtgctccgtccacaacacctccctccacgatctcgcggactgtcgcgcagtcaaaaatttggctgagcgaacgaggaagtgggaggaggacaggaggcaggaacgccgtgagggcaagtctgcggcagttccctccggtaaacggcgaagtgaggccagacagaaggcccccgccgttggcatcgatgatggtgatgatgacctaggtttccaagaacctggggccaccattgccactgtcgacgggggagcgtgtgctcacgtttctcgccggagtttcaaggccatgaggcgagagcttctcgccgcggcccctactcatgaggcgacgcgtcgggcgcggtggtcggaggtggccctcacctttgaccagaccgaccacccaccgtgcgttgcccggggagggcaggttgcgatggtggtttcccccaccatctgcaatgtgaagttggggcgtgtcctcatagatggaggagcggctctcaacatcctttcccccgcggcctttgatgctatcaaggccccggggatggtgctccagccgtctcaaccgatcattggtgtgacgccggggcacacatggccgttaggtcacatcgacctaccggtcacctttggtggatcagccaacttccgcacggagcgggtgaacttcgatgtggcggaccttagtctgccctacaacgcggttctgggaaggcccgcgttggtgaagtttatggcggcggtccactacgcctacctccagatgaagatgccgggccccagtggccccatctctgtccgtggcgaccttaaagtcgcgctcgcttgcatggagcagcgcgcggaccacctcgctgctgcgaccaagcccgagggtggtgacgagaggctcggcacctccgcccccaccgccccgaggcagcggattgccacatgcgacgaggtcccggaagacgcgctcgtctccttcctgcgggcaaacgctgacgtcttcgcatggagaccagcggacatgcccggggtccccagggaggtgattgagcaccgtctcgctgtgcggccgggcgcaaggccggtccggcagaaagtgcggcggcaggccccggaacgtcaagccttcatccgcgaggaggtggcgaggcttctcgaggccggattcatccgtgaagtcatccatccggagtggctggcgaacccggtggtcgttcccaaggcgaacggcaagcttcggatgtgcatcgactacaccgaccttaacaaggcatgtcctaaggatccttaccccctgcctcgcatagatcagatcgtcgactccactgcggggtgcgaccttttgtgttttctagatgcatactctggttaccatcagattcgcatggctagggaggatgaggaaaaaactgcgttcattacccccgtaggaacctattgttatacatcaatgcccttcgggttaaagaatgcaggtcctacttttcaacgtactactcgaatttctttgggtagccaaataggacgtaatgttgaggcttatgtcgatgacttggttgtaaaaacgcgcaaccaagaaactttacttttagatctagcggaaacttttgagaacctccgctccgcctgcataaagctgaaccccgataagcgggcccgcccgccactctcgctgacgggtggggcccacctgtcatcttcctcctcctgccgcgcccgccgccgcgcccgtgccctagcgccgccgccgccgcggattgcgccgcatcccgccgtccccgcgcgcattaaagagaggggaatcattccccgtgattccctctcccgtttcccccgatttcccctctctctctccctcggattcgttcgaatcgtggccgcattcgtcgccggcgcaatcaatggcggccgagatcttcgcggccggtttccttcctccccggccgcgctctccccctcccgttgctatatattcgttgcccgagctccgctcttccgtttccgccgctcaccgctcgctctcgccgtcggaatcgtgctagcgccgtgctcctctctctccgccgtcgccgtcgaccttcggttcgccgccgccgccgctccggacttcctccttactcggcgacccctccgtccgcttcgccgtgttgtcgccgaccccgtccgccgctccgcttcgcccgccgaccgccggagcaccgtcgccctcgtcatcccgagccgcgccgccgtcttcctccgctccgtccgccgtttcaccgccttcgccgtctcgggggcaaatgaagactacacgagctgcggcccgatggccggcagcattacccgtcgtggtttgagcatgactggcttcgtcttggagttgcggggcatgtgcgtggtcttggggtatccacatggagtggattaccaggccaggccgctcccggagcaggagggtgaggatgcagagcctcacgctggttgggaggtcactgcagtgatcctctccggctctcccgagcggacttcgctggcggtcacagcgggtggggactccttccccgccgcttgccagaacgccgctctcctcgccatcggcactcttcaccagcgctacccggacgagttgcagcactcgccctaccgctaccaccctcgtcgcggaggagcccgcgactacgccaccttccgagacgccagctcggaggatgacgctaccgtcgtgcatctggcacgcatggtggaggcgtacgacgcggctcgtatcgacttccaccagatggtgcgtcgtggcatggtggagaacaacatgaagatcctggagctgcgtcaggagaatctgcagctcaagaaggacctcgacgcgttggaggcgcagcttcaccagctcaagatcgcccagggagaggacagccgtcccaagcgtcgccgcgtctgccgcagccagaagatcaccgcccgcaagagcacctccaggcctgagcttgtccgtcagtccctggcgtggacttgcttcgtcgagacccctcgtgccgagcctgcgcccgtggttccccaggagggggaagcctccggcgttggtagctcggagggtgcgctgttgctcaccttccgtcctggcccgtcgcagcgctctccttctctgtttgctggttctgtgtggggttttcagatggtgacgaccaggagaaatgttagcaccggtgaaggcaaccaacccgagggcagcaaccccaacccccaaggcaacccacctccaccaccaccaccagacaccaacgccattctcacccaaatcctcgcccagcaagccaacatgatgaatgctttcctccaccacctccaaaatccgccacaacagaatgctccaccaccacctccccaacactccaaactcgccgaattcctccgcatccgtccacctaccttctctagctccaacaaccccgtggatgcgttggattggttgcatgccgtggggaagaagttagacacggtgcagtgcagtgatgaggagaaagtcatcttcgccgcccaccagctgcaggggcccgcatctctatggtgggaccatttccaggccacgcagccagaagggcaacctattacttggactcgcttcaccgccgctttccggaaaacccatgtgcccgccggagtcgtggctcttaagaaaagggaatttcgggagttgaagcaaggcaaccgctccgtgatggagtacttgcatgagttcaacaacctggcccgttacgctccggaggatgtgcgggaggatgaggagaagcaagagaagttcttggcaggaatggaccccgagctgtctgttcgtctagtctctggagactacccggacttccaacgtctggtggacaagagcatccgcttggaagccaagcacaaggagctggaatcgcacaagcgccgcttggcgaatttccgcaatcaacagggtgctaaccagagggtccgctacaccaatccctatccagggggatcctcctcgcagcagcagcaacagcagcagcaacctcgcccagcgccccgacctcaatttgtggtgcgcgtcccacagccgcagcagcagcagaatcaacaagggactcgtgcaccccgtcctcctacgccagctgtgcagcccgttcaaggccgcagggacgctcaaggtcagcagcgtctgtgcttcaactgcttcgagcccgggcactttgcggataaatgcccaaagccaaggcgtcagcaaggccaagcgcctccccgctccaacaacggtggcaaggacgtcatccgtggtcgtgtgaatcacgtgacggccgaggacgtgctgacaactcccgacgtcatcgttggtacgttcctcgtccattccatccctgctacaattttgttcgactctggagcttcccactcgtttatatctgtgccattcgtggggagaaatcagttgggggtagaaaggcttagaaaccctctgctcatcaccacccctggcggggttatgacagcaaagtattatagccctgccgttcctatagaaatccaggggattccttttccctcggatctgattctgctagacaccaagaatttggatataggtctgtcagaaatccccatagtcagagagttcggagacgtgtttccggaagaactacctggtatgccgcccaagcgagagattgagttccggatagatcttgctccaggaaccactcctctgtacaagcgaccctaccgtatggcagcaaatgaactggccgaagtaaagaaacagttggaagagttgaaagaaaaggggtacatacgtccgagtacttccccttggggtgctcctgtgatttttgtggagaagaaagataaaacgaagaggatgtgcgttgactacagagctctcaatgaagtcaccatcaaaaacaagtaccctcttccccggatcgatgatctgttcgaccagcttaaagatgccactgtattctccaagattgatcttcgttccggatatcaccaattacgtattcgtgaagaagatattccgaagaccgcattcactacgcgatatggactgtatgaattcacggtgatgtcgttcggcttaaccaatgctcctgccttcttcatgaacttgatgaacaaagtgttcatggaatacttggataagttcgttgtggttttcatcgatgacattctgatatactcacaatcagaggaagaccatcagcaccatctccgtctggtgttgggaaagttgcgggaacatcaattgtatgccaagcttagcaagtgtgagttctggttgtccgaagtcaaattcttggggcacgtgatatctgctaaaggagttgctgtggaccccgagacagtgaccgccgtcaccgattggaagcaacccaagacagcgggcccgcccgccactctcgctgacgggtgggacccacctgtcatccccctcctctcgccgcgcccgccgccaacgcccgtgccctag

SEQ ID NO: 14278 - DNA, 5214 bp, Oryza sativa
  Clone ID: TFbOSC900186j.C1.o7.fg
atggatgaagtcgggcgtcgatggacattctccagggcaaatgaaggctacacgagctgcggcccgatggccggcagcgttacccgtcgtggtttggacatgactggcttcgtcttggagctgcgaggcatgtgcgtggtcttggggtatccacatggagtggattaccaggccaggccgcttccggatcaggagggagacgacgcagagccccacgctgcgtgggaggtcacagcagtgatcctctccggctctcccgagcggacttcgctggcagtcaccgcgggcggagactccttccccgccgcttgccagaacgccgctctcctcgccatcggcacccttcaccagcgctacccggacgagttgcagcactcgccctaccgctaccaccctcgtcgcggaggagcccgcgaccacgccaccttccgagacgccagctcggaggatgacgctaccgtcgtgcatctggcacgcatggtggaggcgtacgacgcggctcgtatcgacttccaccagatggtgcgtcgtggcatggtggagaacaacctgaagatcctggagctgcgtcaggagaacctgcagctcaagaaggacctcgacgcgttggaggcgcagctgcaccagctcaagatcgcccagggagaggacagccgtcccaagcgtcgccgcgtctgccgcagccagaagatcaccgcccgcaagagcacctccaggcccgagcttgttcgtcagtccctggcgtggacctgcttcgtcgagacccctcgtgccgcacctgcgcccgtggttccccaggagggggaagcctccggcatggtgacgaccaggagaaatgttaacaccggtgaaggcaaccaacccgagggcagcaaccccaacccccaaggcaacccacctccaccaccaccaccagacaccaacgccattctcacccaaatcctcgctcagcaagccaacctgatgactgctttcctccaccacctccaaaatccgccacaacagaatgctccaccaccccctccccaacactccaaactcgccgaattcctccgcatccgcccacccaccttctctagctccaacaatcccgtagatgcgttggattggttgcatgccgtggggaagaagctagacacggtgcagtgcagcgacgaagagaaagtcatcttcgccgcccaccagctgcaggggcccgcatctctctggtgggaccacttccaggctacgcagccagaggggcagccgatcacttgggctcgcttcaccgccgctttccggagaacccatgtgcccgccggagtcgtggctctcaagaagagggaattccgagagttgaagcaaggcaaccgctccgtgatggagtatttgcacgagttcaacaacttggcccgttacgcccctgaggatgtgcgggaagatgaggagaagcaagagaagttcttggcaggaatggaccccgagctgtctgttcgtctagtctctggggactatccggattttcaacgactggtggacaagagcatccgcttggaggccaagcacaaggagctggaatcgcacaagcgccgcttggcgaacttccgcaatcagcagggtgctaaccagagggtccgctacaccaatccctatccagggggatcctcctcgcaacagcaacaacagcagcagcaacctcgcccagcgccccgacctcaattcgtggtgcgcgtcccacagccgcagcagcagaatcagcaagggactcgtgcatcccgtcctcctacgccagctgtgcagcccgttcaaggccgcagggacgcttcaggtccgcagcggctgtgcttcaactgcttcgagcccggacactttgcggataaatgcccaaagccaaggcgtcagcaaggccaagcgcctccccgctccaacaacggcgggaaggatgtcattcggggccgtgtgaatcatgtgacggccgaggacgtgctgacaactcccgacgtcaccgttggtacgttcctcgtccattccatccctgctacaattttgttcgactctggagcttcccactcgtttatatctgtgccattcgtggggaaaaatcagttgggggtagaaaggcttagaaaccctctgctcatcaccacccctggaggggttatgacagcaaagtattatagccctgccgtccctatagaaattcaggggattccttttccctcggatctgattctgctagacaccaagaacttggatgtgatccttgggatgaattggttggcccaattccaaggagtagtggattgcgcgaggcgcactgtcactctgtaccgaggaccagaacaaccggttgttttctttgcacccccaacctctgtcagaagttcagaacttcatcagatagaactgtcagaaattcccatcgtcagagagttcggagacgtgtttccggaagaactacctggtatgccgcccaagcgagagattgagttccggatagatcttgctccaggaaccactcctctgtacaagcgaccctaccgtatggcagcaaatgaactggccgaagtaaagaaacagttggaagagttgaaagaaaaggggtacatacgtccgagtacttccccatggggtgctcctgtgatttttgtagagaagaaagacaagacgaagaggatgtgcgtcgactacagagctctcaatgaagtcaccatcaaaaacaagtaccctcttccccggatcgatgatctgttcgatcaactcaaaggtgccactgtattctccaagattgatctccgttccggatatcaccaattacgtattcgtgaagaagatattccgaagaccgcattcactacgcgatatggactgtatgaattcacggtgatgtcgttcggcttgaccaatgctcctgccttcttcatgaacttaatgaacaaagcgttcatggaatacttggataagttcgttgtggttttcatcgatgacattctgatatactcacaatcagaggaagaccatcagcaccatctccgtctggtgttgggaaagttgcgggaacatcaattgtatgccaagcttagcaagtgtgagttctggttgtccgaagtcaaattcttggggcacgtgatatctgctaaaggagttgctgtggaccccgaaacagtgaccgccgtcaccgattggaagcaacccaagacagtcactcagattcgcagtttcttgggtttggcaggatactaccggaggttcatcgagaacttctccaaaatcgctcgacccatgacacagttgttgaagaaagaagagaagtttgtgtggagcccgcaatgcgagaaggcgttccaaactctcaaagaaaagctggtttcctcgccagtgttaatcttgccggatactcgcaaggatttcatggtgtattgtgatgcttcgcgccaaggattggggtgcgtgctcatgcaggacggtcatgtggtagcctatgcttcacgtcagctacgacctcatgagggcaactaccctacgcatgacttggagttagcagcggtggttcatgctctaaaaatctggcggcactatctcattgggaaccgctgtgaaatatatactgatcacaagagcttgaaatacatattcacccagtcggatctgaatcttcggcaaaggagatggttagaactcatcaaggattatgacgtgggaatacactatcaccctggtaaggctaacgtggttgccgacgctctaagtcggaagagccattgcaatactctcaacgttcgaggcattccacccgagcttaatcaacagatggaagccctgaacctaaacatagttggtcgtggattcttggctgcgttagaagccaagcccaccttgctcgatcaaatccgcgaggctcagaagaatgatccggacatgcatggactcctcaagaatatgaaacagggtaaagccgctggtttcacagaggatgaacacggaaccttatggaacggaaagcgggtatgcgttccagatagcagagaacttaaacagctgatacttcaggaagctcacgaaagtccttattccattcacccgggcagtaccaagatgtacttagacttgaaggagaaatactgcgtgtcaaggcagagcactagcgaccggctggacttctccaacctctccaagtaccagaatggaaatgggatgaaattgggatggatttcatcaccggacttccaaaaacccaaggtagctcgattcattcctgtgaagaccacctatggaggacacaagctagccgagctctacttcgctaggatcgtgagtctccatggcgttcccaagaaaatcgtatctgataggggaagccaattcacctctcacttttggaagaagctccaagaagagcttggtacccgactaaatttcagcaccgcgtatcacccgcagacagatggacagaccgagcgtctaaatcagatcttagaagatatgcttcgcgcatgtgtcctggacttcgggaagacttgggataagagtctcccctatgccgagttctcctacaataacagctatcaagccagcatacaaatggcaccttatgaagcgttgtatgggcgcaaatgccgaacaccgctattgtgggaccaagttggagaaagccaagtgttcgggactgatatcctgagagaagctgaagctaaagtcagaatcattcgggataatctaaaggtggcacagtctcggcagaaaagttatgcagataaccgtcgccgtgatctggaattcgcagtggatgattttgtgtaccttcgggtcacgccattgcgaggtgtgcacaggtttcagacaaaagggaagctcgcacctcggtatgtgggtccctttcgtatcactgctcgacgcggagaagtcgcttaccagctggagctgcccgcctccttgggcaacgtgcatgatgtgttccatgtgtcgcaactcaagaaatgtcttcgagtgccatccgagcaggccgactcagagcaaatcgaagttcgcgaagatttgacgtatgtggagaagccagtgaaaatcctggacaccatggagcgcaggaccaggaaccgggtaatccgtttttgcaaggtccagtggagcaaccacgccgaagaagaagctacttgggagcgtgaagacgagctgaaggcagcccatcccgatctcttcgccagttcttccgaatctcggggtcgagattccgtttaa

SEQ ID NO: 14279 - DNA, 5481 bp, Oryza sativa
  Clone ID: TFbOSC900190j.C1.o21.fg
atggaggtggatgaagtcgggggtcgatggacattctccagggcaaatgaaggctacacgagctgcggcccggtagtcgagatgtcatggcacagggccggtgtcctgctgctaggggctcagtcctgcctgcctgtcccgggggttccggccgtaggtgggattgggtcggtactcttgtctatggctaggatgggttggaaactatgtcacagcttccgtctgtataccgtggtgatggccggcagcgtcacccgtcgtggtttggacatgactggcttcgtcttggagctgcggggcatgtgcgtggtcttggggtatccacatggagtggattaccaggccaggccgctcccggagcaggagggtgaggatgcagagccccacgctggttgggaggttactgcagtgatcctctctggctctcccgagcggacttcgctggcagtcaccgcgggtggagattccttccccgccgcttgccagaacgccgctctcctcgccatcggcactcttcaccagcgctacccggacgagttgcagcactcgccctaccgctaccaccctcgtcgcggaggagcccgcgactacgccaccttccgggatgctagctcggaggatgacgctaccatcgtgcacctggcgcgcatggtggaggcgtacgacgcagctcgtatcgacttccaccagatggtacgccgtgggatggtcgagaacaacatgaagatcctggagctgcgtcaggagaacctgcagctcaagaaggacctagacgcggtggaggcgcagctgcagcagctcaagatcgcccagggggaggactgccgtcccaagcgtcgccgcgtctgccgcagccagaagatcaccgcccgcaagagcacctccaggcccgagcttgttcgtcagtccctggcgtggacttgcttcgtggagacccctcgtgccgagcccgcgcccgtggttccccaggagggggaagcctccggcgttggtagcacggaggatgcgctgttgctcaccttccgtcctggcccgtcgcagcggagaaatgctaacaccggtgatggcaatcaacctgaaggcagcaaccacaaccgccagggcaacccacctccacctcctcctccgcctccaccaccaccaccagataccaacgccattctcacccaaatcctcgcccagcaagccaacatgatgacggctttcctccaccacctccaaaatccgccacaacataatgctccaccaccacctccccaacactctaaactcgccgagttcctccgcatccgtccacccaccttctccagctccaacaaccccgtggatgcgttggattggttgcatgccgtggggaaaaagctagacactgtgcagtgcagcgatgaggagaaagtcgtcttcgccgcccaccagctgcaggggcccgcatctctatggtgggaccatttccaagctacgcagccagaggggcagcctattacttgggcccgcttcaccgccgctttccggagaacccatgtgcccgccggagtcgttgctcttaagaagagggagttccgagagttgaagcaaggcaaccgctccgtgatggagtatttgcatgagttcaacaatctggcccgttacgccccggaggatgtgcgggaagatgaggagaagcaagagaagttcttggcaggattggaccctgaactgtccgtccgtctagtctctggggactatccggatttccaacgtctggtggacaagagcatccgcttggaggccaagcacaaggaactggagtcgcacaagcgccgcttggcgaatttccgcaatcaacagggtgctaaccaaagggtccgctacaccaacccctatccagggggatcctcctcgcaacagcaacaacagcagcagcaacctcgctccgcgccccgacctcaattcgtggtgcgcgtcccacagccgcagcagcagcagaatcagcaagggactcgtgcgccccgtcctcctacgccaactgtgcagcctggtcaaggccgcagggacgctcaaggtcagcagcgtctgtgcttcaactgcttcgagcccgggcactttgcggataaatgcccgaagccaaggcgtcagcaaggtcaagcgcctccccgctccaacaacggtgggaaggatgtcattcggggtcgtgtgaatcacgtgacggccgaggacgtgttgacaactccagacgtcatcgttggtacgttcctcgttcattccatccctgctaccattttgttcgactctggagcttcccactcgtttatatctgtgccattcgtggggagaaatcagttgggggtagaaaggcttaggaaccctctgctcatcaccacccctggaggggttatgacagcaaagtattatagccctgccgtccctatagaaattcaggggattccttttccctcggatctgattctgctagacaccaagaacttggatgtgattcttgggatgaattggttggctcaattccaaggagtagtggattgcgcgagacgcactgtcactctgtaccgagggccggaacaaccggttgttttctttgcacccccaacctctgtcagtagttcagaactgcatcagataggactgtcagaaatccccatagtcagggagttcatagatgtgtttccggaagaactacccggtatgccgcccaagcgagagattgagttccggatagatcttgctccaggaaccactcctctgcacaagcgaccctaccgtatggcagcaaatgaactggccgaagtaaagaaacagttggaagagttgaaagaaaaggggtatatacgtccgagtacttccccctggggtgctcctgtgatttttgtggagaagaaagacaagacgaagaggatgtgcgttgactacagagctctcaatgaagtcaccatcaaaaacaagtaccctcttccccggatcgatgatctgttcgatcagcttaaaggtgccactgtattctccaagattgatcttcgttccggatatcaccaattacgtattcgtgaagaagatattccgaagaccgcattcaccacgcgatacgggctgtatgaattcacggtgatgtcattcggtctaaccaatgcacctgccttcttcatgaacttaatgaacaaagtgttcatggaatacttggataagtttgttgtggttttcattgatgacattctgatatactcacaatcagaggaagaccatcagcaccatctccgtctggtgttgggaaagctgcgggaacatcaattgtatgccaagcttagcaagtgtgagttctggttgtccgaagtcaaattcttaggacacgtgatatctgctaaaggagttgctgtggaccccgaaacagtgaccgccgtcgccgattggaagcaacccaagacagttactcaagtccgcagtttcttaggtttggcaggatactaccggagattcatcgagaacttctccaaaatcgctcgacccatgacacagttgttgaagaaagaagagaaatttgtgtggagcccgcaatgcgagaaggcgttccaaactctcaaggaaaagctggtttcctcgccggtgttaatcttgccggatactcgcaaggacttcatggtgtattgtgacgcttcgcgccaaggattggggtgcgtgctcatgcaggacggtcatgtggtagcctatgcctcgcgtcagctgcgacctcatgaaggcaactaccctacacatgatttggagttagccgcggtggttcatgctctaaaaatctggcggcactatctcattgggaatcgctgtgaaatatataccgatcataagagtttgaaatacatcttcacccagtcggatctaaatcttcggcaaaggagatggttagaactcatcaaggactatgatgtgggaattcactatcatcctggtaaggccaacgtggttgccgacgctctaagtcgaaagggccattgcaacactcttaacgtccttggcattccacccgaacttaatcaacagatggaagccctgaacctaagcgtagttggtcgcggattcttggctgcgctagaagccaagcctaccttgctcgatcaaatccgcgaggctcagaagaatgatccggacatgcatggactcctcaagaatatgaaacaggataacagagaacttaaacagctgatacttcaggaagctcacgagagcccttattccattcacccgggcagtacaaagatgtacttagacttgaaggagaaatactggtgggttagtatgaagcgggaaattgcagagttcgtggccctttgtgatgtgtgccagcgtgtcaaggcagagcaccaacgaccggccggacttctccaacctctccaagtaccagaatggaaatgggatgaaattgggatggatttcatcacaggacttccaaaaacccaaggtggatatgattctatatgggtagttgtggatcgattaaccaaggtagctcgatttattcctatgaagaccacctatggagggaacaaactagccgagctctacttcgctaggatcgtgagtctccatggcgttcccaagaaaatcgtatctgataggggaagccaattcacctctcatttctggaagaaactccaagaagagttgggaacccgattaaatttcagcaccgcgtatcacccgcagacagatggacagaccgagcgtctaaatcaaatcctagaagatatgctccgcgcatgtgtactagatttcgggaagacctgggataagagtctcccctatgccgagttctcctacaataacagttatcaagccagcatacaaatggcaccttatgaagcgttgtacgggcgcaaatgccggacaccgctcttgtgggaccaagttggagaaagccaagtgttcgggactgatatcctgagagaagctgaagctaaagtcagaatcattcgggataatctaaaggtggcacagtcccggcagaaaagttatgcggataaccgacgccgtgatctggaattcgtagtggatgactttgtgtatcttcgggtcacgccattgcgaggtgtacacaggtttcagacaaaagggaagctcgcacctcggtatgtgggtcctttccgtatcgttgctcgacgcggagaagtcgcttaccagctggagctgcccgcctccttgggcaacgtgcatgatgtgttccatgtgtcgcaactcaagaaatgccttcgagtgccatccgagcaggccgactcagagcaaattgaagttcgcgaagatttgacctatgtggagaggccagtgaaaatcctggacaccatggagcgcaggaccaggaaccgggtaatccgtttttgcaaggtccagtggagcaaccatgctgaagaagaagctacttgggagcgtgaagacgagctgaaggcagcccatcccgacctcttcaccagttcttccgaatctcggggtcgagattccgtttaa

SEQ ID NO: 14280 - DNA, 2754 bp, Oryza sativa
  Clone ID: TFbOSC900190j.C1.o22.fg
atggacatctctaggacaaatgaaggctacacgagctatggcccggtagtcgagatgtcatggcacagggccggtgtcctgctgctaggggctcagtcctgtctacctgtcccgggggttccggccatggccggcagcatcaactgtcgtggtctggacctgactggcttcgttttggagctgcggggcatgtgcgttgtcctggggtatccgcatggagtggactaccagggcaagcagctcccggagcaggagggtgacgatgcagagccccacgctgcttgggaggttactgcagtgatcctcactggctcacccgagaggacttcgttggcagtcaccgcgggagcccgtgactacgccaccttccgggatgctggctcggaggatgactctacaatcatgcacctggcgcgcatggtggaggcgtacgacgcggcccgtatcgacttccatcagatggtgcgtcgcgggttggtcgagaacaacatgaagatcctggagctgcgtcaggagaatctgcagttgaagaaggacctagacgcagtggaggcgcagctgcgtcagctcaaggtcgcccagggagaggtctgccgtcccaagcgccgccgcgtctgccgcagccagaagatcaccgcccgcaagagtacctccaggcccgagcttgttcgtcagtccctagcgtggacctgcttcgtcgagacccctcgtgccgagcccgtgctcgtgatggtgacgaccaggagaagtgctgctaccggtgaaggcagtcaccccgaaggcagcaaccacaacaaccatggcagcctacctccacctcctcccccgcctccaccaccaccaccagacaccaacgccattctcacccaaatcctcgcccagcaggccaacatgatggctgctttcctccaccacatccaaaatccgccacaacataatgctccaccaccgcccccacaacactctaaactcgccgagttcctccgcatccgtccacctaccttctctagctccaataaccccgtggatgcgttggattggttgcatgccgtggggaaaaagttagacaccgtgcagtgcagcgatgaggagaaagtcatcttcaccgcccaccaactgcaggggcccgcatctctatggtgggaccatttccaggctacgcagccagaagggcagcctactacttgggcccgcttcaccgccgctttctggagaacccatgtgcccgccggagtcatggcccttaagaaaagggaattccgagagttgaaacaaggcaactgctctgtgatggagtatttgcatgagtttaacaacctggcccgatacgccccggaggatgtacgggaagatgaggagaagcaagagaagttcttggcaggaatggaccctgagctgtccgtgcgtctggtctccggggactatccggatttccaacatctggtggacaagagcatccgcttggaagccaagcacaaggaacgggagtcgcacaagcgtcgtttggcgaatttccgcaaccaacagggggctaaccaaaggcagcaacagcagcagcaacctcgctccgcgccccgacctcaattcgtggtgcgcgtcccacagccgcagcaacagcagagtcaacaagggactcgtgcgccccgtcctcctacgccagccgtgcagcctagtcaaggccgcagggacgttcaaggtcagcagcgtctgtgcttcaactgcttcgagcctgggcactttgcggataaatgcccaaagccgaggcgccagcaaggccaagcgcctccccactccaacaatggtggtaaggatgtcattcggggtcgggtgaaccacgtgacggccgaggatgtgctgacaactccagacgtcatcgttggtacgttcctcattcattccatccctgctaccattttgttcgactctggagcttcccactcatttatatatgtgccattcgtggggagaaatcagttgggggtagaaaggcttaggaaccctctgctcatcaccacccctggaggggttatgacagcaaagtattatagccctgtcgttcctatagaaattcagggaattccttttccctcggatctgattcttttagacaccaagaacttggatgtgatccttgggatgaattggttagctcaattccaaggagtagtggattgtgcaagacgcactgtcactctgtaccgagggccggaacaaccggttgttttctttgctcccccaacctctgtcggtagttcagaacttcatcagataggactgtcagaaatccccatcgtcagagggttcggagacgtgtttccggaagaactacccggtatgccaccgaagcgagagattgagttccggatagatcttgctccaggaaccactccccagtacaagcgaccctaccgtatggcagcaaatgaactggccaaagtcaagaaacagttggaagagttgaaagaaaaggggtatatacggccgagtacttccccctggggtgctcctgtgatttttgtggagaagaaagacaagacgaagaggatgtgcattgactacagagctctcaatgaagttaccatcaaaaacaagtaccctcttccccggatcgatgatctgttcgatcagcttaaaggtgccattgtattctccaagattgatcttcgttctggatatcacaattacgtattcgtgaagaagatatccctaagaccgcattcaccacgcgatacggactgtatgaattcacggtga

SEQ ID NO: 14281 - DNA, 5361 bp, Oryza sativa
  Clone ID: TFbOSC900190j.C1.o6.fg
atggatgaagtcgggggtcgatggacattctccagggcaaatgaaggctacacgagctgcggcccgatggccggcagcgttacccgtcgtggtttggacatgtctggcttcgtcttggagctgcgaggcatgtgcgtggtcttggggtatccacatggagtggattaccaggccaggccgctcccggagcaggagggtgaggatgcagagcctcacgctggttgggaggtcactgcagtgatcctctccggctctcccaagcggacttcgctggcagtcaccgcgggcggagactccttccccgccgcttgccagaacgccgctctcctcgccatcggcaccctgcaccagcgctacccggacgagttgcagcactcgccctaccgctaccaccctcgtcgcggaggagcccgcgacttcgccaccttccgagacgccagctcggaggatgatgccaccgtcgtgcatctggcacgcatggtggaggcatacgacgcagctcgtattgacttccaccagatggtgcgtcgcggcatggtggagaacaacatgaagatcctggagctgcgtcaggagaacctgcagctcaagaaggacctcgacgcgttggaggcgcagctgcatcagctcaagatcgcccagggagaggacagccgtcccaagcgtcgccgcgtctgccgcagccagaagatcaccgcccgcaagagcacctccaggcccgagcttgttcgtcagtccctggcgtggacttgcttcgtcgagacccctcgtgccgagcctgcgcccgtggttccccaggagggggaagcctccggcgttggtagctcggagggcgcgctgttgctcaccttccgccctggcccgtcgcagcggagaaatgttaacaccggtgaaggcaaccaacccgagggcagcaaccccaacccccaaggcaatccacctccaccaccaccaccagacaccaacgccattctcacccagatcctcgcccaacaagccaacatgatgaatgctttcctccaccacctccaaaacccgccacaacagaatgctccaccaccacctccccaacactccaaactcaccgaattcctccgcatccgcccacccaccttctccagctccaacaatcccgtggatgcgttggattggttgcatgccgtggggaagaagctagacacggtgcagtgcagcgatgaggagaaagtcgtcttcgccgcccatcagctgcaggggcccgcatctctatggtgggaccacttccaggctacgcagcccgaggggcaaccgattacttgggctcgcttcaccgccgctttccggagaacccatgtgcccgccggagtcgtggctctcaagaagagggaattccgagagttgaagcaaggcaaccgctccgtgatggagtatttgcacgagttcaacaatctggcccgttacgctccggaggatgtgcgggaagatgaggagaagcaagagaagttcttggcaggaatggaccctgagctgtctgttcgtctagtctctggggactatccggattttcaacgattggtggacaagagcatccgcttggaagccaagcacaaggagctggagtcgcacaagcgccgcttggcgaacttccgcaatcaacagggtgctaaccagagggtccgctacaccaatccctacccagggggatcctcctcgcagcagcaacaacagcagcagcaacctcgcccagcgcctcgacctcaattcgtggtgcgcgtcccacagcagcaacagcagcagaatcagcaagggactcgtgcgccccgtcctcctacgccagctgggcagcccgttcaaggccgcagggacgcttcaggtccgcagcggctgtgcttcaactgcttcgagcccgggcactttgcggataaatgcccgaagccaaggcgtcagcaaggccaagcgcctccccgccccaacaacggtgggaaggacgtcatccgtggccgtgtgaatcacgtgacggccgaggacgtgctgacaactcccgacgtcatcgttggtacgttcctcgttcattccatccctgctacaattttgttcgactctggagcttcccactcgtttatatctgtgccattcgtggggaaaaatcagttgggggtagaaaggcttagaaaccctctgctcatcaccacccctggaggggttatgacagcaaagtattatagccctgccgtccctatagaaattcaggggattccttttccctcggacctgattcttctagacactaagaacttggatgtgatccttgggatgaattggctggcacaattccaaggagtagtggattgcgcgaggcgcactgtcactctataccgaggaccagaacaaccggttgttttctttgcacctccaacctctgtcagaagctcagaacttcatcagatagaactgtcggaaatccccatagtcagagagttcggagacgtgtttccggaagaactacctggtatgccgcccaagcgagagattgagttccggatagatcttgctccaggaaccactcctctgcacaagcgaccctaccgtatggcagcaaatgaactggccgaagttaagaaacagttggaagagttgaaagaaaaggggtatatacgtccgagtacttccccttggggtgctcctgtgatttttgtggagaagaaagacaaaacgaagaggatgtgcgttgactacagagctctcaatgaagtcaccatcaaaaacaagtaccctcttccccggatcgatgatctgttcgatcagcttaaaggtgccactgtattctccaagattgatcttcgttccggatatcaccaattacgtattcgggaagaagatattccgaagaccgcattcactacgcgatatggactgtatgaattcacggtgatgtcgttcggcttaaccaatgctcctgccttcttcatgaacttgatgaacaaagtgttcatggaatacttggataagttcgttgtggttttcatcgatgacattctgatatactcacaatcagaggaagaccatcagcaccatctccgtctggtattgggaaagttgcgggaacatcaattgtatgccaagcttagcaagtgtgagttctggttgtccgaagtcaaattcttggggcacgtgatatctgctaaaggagttgctgtggaccccgaaacagtgaccgccgtcaccgattggaagcaacccaagacagtcactcagattcgcagtttcttgggtttggcaggatactaccggaggttcatcgagaacttctccaaaatcgctcgacccatgacacagttgttgaagaaagaagagaagtttgtgtggagcccgcaatgcgagaaggcgttccaaactctcaaagaaaagctggtttcctcgccagtgttaatcttgccggatactcgcaaggatttcatggtgtactgtgatgcttcgcgccaaggattggggtgcgtgctcatgcaggacggtcatgtggtagcctatgcttcacgccagctacgacctcatgaaggcaactaccctacacatgacttggagttagcagcggtggttcatgctctaaaaatctggcggcactatctcattgggaaccgctgtgaaatatatactgatcataagagtttgaaatacatcttcacccagtcggatctgaatcttcggcaaaggagatggttagaactcatcaaggattatgatgtgggaatacactatcatcctggtaaggccaacgtggttgccgacgctctaagtcgaaagagccactgcaacactctcaacgtccgaggcattccacccgagcttaatcaacagatggaagcactgaacctaagcatggttggtcgcggattcttggctgcgttggaagctaagcccaccttgctcgatcaaatccgcgaggctcagaagaatgatccggacatgcatggactcctcaagaatatgaaacagggcaaagccgctggtttcacagaggatgaacacggaaccttatggaacggaaagcgggtatgcgttccagatagcagagaacttaaacagctgatacttcaggaagctcacgaaagtccttattccattcacccgggcagtaccaagatgtacttagacttgaaggagaaatactggtgggtcagcatgaagcgggaaattgcagagtttgtggcactatgtgatgtgtgccagcgtgtcaaggcagagcaccagcgaccggccggacttctccagcctctccaagtgccggaatggaaatgggatgaaattgggatggatttcatcaccggccttccaaaaacccaaggtggatatgattctatatgggtaattgtggatcgactaacaaaggtagctcgatttattcctgtgaagaccacttatggagggaacaaactagcggagctctacttcgctaggatcgtgagtctccatggtattcccaagaaaatcgtatctgataggggaagccaattcacctctcacttttggaagaagctccaagaagagctgggtactcgattgaatttcagcaccgcctatcacccgcagacagatggacagaccgagcgtctaaatcagatcctagaagatatgctccgcgcatgtgtcctagacttcgggaagacttgggataagagtctcccctatgccgagttctcctacaacaacagctatcaagccagcatacaaatggcaccctatgaagcgttgtacgggcgcaaatgccggacaccgctattgtgggaccaagttggagaaagccaagtgttcgggactgatatcctgagagaagctgaagctaaagtcagaatcattcgggataatctaaaggtggcacagtcccggcagaaaagttatgccgataaccgacgccgtgatctggaattcgcagtggatgattttgtgtaccttcgggtcacgccattgcgaggggtgcacaggtttcggacaaaagggaagctcgcacctcggtatgtgggacctttccgtatcgtcgctcgacgcggagaagtcgcttaccagctggagttgcccgcctccttgggcaatgtgcatgatgtgttccatgtgtcgcaactcaagaaatgtcttcgagtgccatccgagcaggccaactcagagcaaattgaagttcgcgaagacttgacgtatgtggagaagccagtgaaaatcctggacaccatggagcgcaggaccaggaaccgggtaatccgtttttgcaaggtccagtggagcaatcacgccgaagaagaagctacttgggagcgcgaagacgagctgaaggcagcccatcccgatctcttcgccagttcttccgaatctcggggtcgagattccgtttaa

SEQ ID NO: 14282 - DNA, 5832 bp, Oryza sativa
  Clone ID: TFbOSC900219j.C1.o9.fg
atggatgaagtcgggggtcgatggacattctccagggcaaatgaaggctacacgagctgcggcccgatggccggcagcgttacccgtcgtggtttggacatgactggcttcgtcttggagctgcgaggcatgtgcgtggtcttggggtatccacatggagtggattaccaggccaggccgctcccggagcaggagggtgaggatgcagagcctcacgctggttgggaggtcactgcagtgatcctctccggctctcccgagcggacttcgctggcagtcaccgcgggcggagattccttccccgccgcttgccagaacgccgctctcctcgccatcggcaccctgcaccagcgctacccggacgagttgcagcactcgccctaccgctaccaccctcgtcgcggaggagcccgcgacttcgccaccttccgagacgccagctcggaggatgacgccaccgtcgtgcatctggcacgcatggtggaggcatacgacgcagctcgtattgacttccaccagatggtgcgtcgcggcatggtggagaacaacatgaagatcctggagctgcgtcaggagaacctgcagctcaagaaggacctcgacgcgttggaggcgcagctgcatcagctcaagatcgcccagggagaggacagccgtcccaagcgtcgccgcgtctgccgcagccagaagatcaccgcccgcaagagcacctccaggcccgagcttgttcgtcagtccctggcgtggacttgcttcgtcgagacccctcgtgccgagcctgcgcccgtggttccccaggagggggaagcctccggcgttggtagctcggaggctccttctcggtttgctggttctgtgtggggttttcagatggtgacgaccaggagaaatgttaacaccggtgaaggcaaccaacccgagggcagcaaccccaacccccaaggcaatccacctccaccaccaccaccagacaccaacgccattctcacccagatcctcgcccaacaagccaacatgatgaatgctttcctccaccacctccaaaacccgccacaacagaatgctccaccaccacctccccaacactccaaactcgccgaattcctccgcatccgcccacccaccttctccagctccaacaatcccgtggatgcgttggattggttgcatgccgtggggaagaagctggacactgtgcagtgcagtgatgaagagaaagtcatcttcgccgcccaccagctgcaggggcccgcatctctatggtgggaccacttccaggctacgcagcccgagggacaaccgatcacttgggctcgcttcaccgccgctttccggagaacccatgtgcccgccggagtcgtggctctcaagaagagggaattccgagagttgaagcaaggcaaccgctccgtgatggagtatttgcacgagttcaacaatctggcccgttacgctccggaggatgtgcgggaagatgaggagaagcaagagaagttcttggcaggaatggaccctgagctgtctgttcgtctagtctctggagactatccggatttccaacgactggtggacaagagcatccgcttggaggccaagcacaaggaactggagtcgcacaagcgccgcttggcgaacttccgcaatcagcagggtgctaaccagagggtccgctacaccaatccctacccagggggatcctcctcgcagcagcaacaacagcagcagcaacctcgcccagcgcctcgacctcaattcgtggtgcgcgtcccacagcagcaacagcagcagaatcagcaagggactcgtgcgccccgtcctcctacgccagctgggcagcccgttcaaggccgcagggacgcttcaggtccgcagcggctgtgcttcaactgcttcgagcccgggcactttgcggataaatgcccaaagccaaggcgtcagaaaggccaagcgcctccccgctccaacaacggtggcaaggatgtcattcggggtcgtgtgaatcacgtgacggccgaggacgtgctgacaactccagacgtcatcgttggtacgttcctcgtccattccatccctgctacaattttgttcgactctggagcttcccactcgtttatatctgtgccattcgtggggaaaaatcagttgggggtagaaaggcttagaaaccctctgctcatcaccacccctggcggggttatgacagcaaagtattatagccctgccgtccctatagaaattcaggggattccttttccctcggacctgattcttctagacactaagaacttggatgtgatccttgggatgaattggctggcacaattccaaggagtagtggattgcgcgagacgcactgttactctgtaccgaggaccagaacaaccggttgttttctttgcacctccaacctctgtcagaagctcagaacttcatcagatagaactgtcggaaatccccatagtcagagagttcggagacgtgtttccggaagaactacctggtatgccgcccaagcgagagattgagttccggatagatcttgctcctggaaccactcctctgtacaagcgaccctaccgtatggcagcaaatgaactggccgaagttaagaaacagttggaagagttgaaagaaaaggggtatatacgtccgagtacttccccttggggtgctcctgtgatttttgtagagaagaaagacaagacgaagaggatgtgcgtcgactacagagctctcaatgaagtcaccatcaaaaacaagtaccctcttccccggatcgatgatctgttcgatcagcttaaaggtgccactgtattctccaagattgatcttcgttccggatatcaccaattacgtattcgggaagaagatattccgaagaccgcattcactacgcgatatggactgtatgaattcacggtgatgtcgttcggcttaaccaatgctcctgccttcttcatgaacttgatgaacaaagtgttcatggaatacttggataagttcgttgtggttttcatcgatgacattctgatatactcacaatcagaggaagaccatcagcaccatctccgtcaggtgttgggaaagttgcgggaacatcaattgtatgccaagcttagcaagtgtgagttctggttgtccgaagtcaaattcttggggcacgtgatatctgctaaaggagttgctgtggaccccgaaacagtgaccgccgtcaccgaatggaagcaacccaagacagttactcaagtccgcagtttcttgggtttggcaggatactatcggagattcatcgagaacttctccaaaatcgctcgacccatgacacagttgttgaagaaagaagagaagtttgtgtggagcccgcaatgcgagaaggcgttccaaactctcaaagaaaagctggtttcctcgccagtgttaatcttgccggatactcgcaaggatttcatggtgtattgtgatgcttcgcgccaaggattggggtgcgtgctcatgcaggatggtcatgtggtagcctatgcatcacgccaactacgacctcatgaaggcaactaccctacgcatgacttggaattagccgcagtggttcatgctctaaaaatctggcggcactatctcattgggaatcgctgcgaaatatataccgatcataagagtttgaaatacatcttcacccagtcggacctgaatcttcggcaaaggagatggttagaactcatcaaggattatgatgtgggaatacactatcatcctggtaaggccaacgtggttgccgacgctctaagtcgaaagagccattgcaacacccttaacgtccgtggcattccacccgaacttaaccaacagatggaagccctgaacctaaacatagttggtcgtggatttttggccgcgttggaagccaagcccaccttgctcgatcaaatccgcgaggctcagaagaatgatccggacatgcatggactcctcaagaatatgaaacagggcaaagccgctggtttcacggaggatgaacacggaaccttatggaacggaaagcgggtatgcgttccagatagcagagaacttaaacagctgatacttcaggaagctcacgaaagtccttattccattcacccgggcagtaccaagatgtacttagacttgaaggagaaatactggtgggtcagcatgaagcgggaaattgcagagtttgtggcactatgtgatgtgtgccagcgtgtcaaggcagagcaccagcgaccggccggacttctccagcctctccaagtgccggaatggaaatgggatgaaattgggatggatttcatcaccggccttccaaaaacccaaggtggatatgattctatatgggtaattgtggatcgactaacaaaggtagctcgatttattcctgtgaagaccacttatggagggaacaaactagcggagctctacttcgctaggatcgtgagtctccatggtattcccaagaaaatcgtatctgataggggaagccaattcacctctcacttttggaagaagctccaagaagagctgggtactcgattgaatttcagcaccgcctatcacccgcagacagatggacagaccgagcgtctaaatcagatcctagaagatatgctccgcgcatgtgtcctagacttcgggaagacttgggataagagtctcccctatgccgagttctcctacaacaacagctatcaagccagcatacaaatggcaccctatgaagcgttgtacgggcgcaaatgccggacaccgctattgtgggaccaagttggagaaagccaagtgttcgggactgatatcctgagagaagctgaagctaaagtcagaatcattcgggataatctaaaggtggcacagtcccggcagaaaagttatgccgataaccgacgccgtgatctggaattcgcagtggatgattttgtgtaccttcgggtcacgccattgcgaggggtgcacaggtttcggacaaaagggaagctcgcacctcggtatgtgggacctttccgtatcgtcgctcgacgcggagaagtcgcttaccagctggagttgcccgcctccttgggcaatgtgcatgatgtgttccatgtgtcgcaactcaagaaatgtcttcgagtgccatccgagcaggccaactcagagcaaattgaagttcgcgaagacttgacgtatgtggagaagccagtgaaaatcctggacaccatggacggcctcctgggcagcctcctcggcttctcggaggcggatgttggcgcactccagatcgcagcagagggggaggaccccttgggggatgagggatgcctccacggagctgagattcagcacccgttggaccaccatcctgaagtcctcagggtcccagtcctatttgcgcccctggtgggtcctcatgatgtcctcgggcccggagtactcccaggcgccccgggcgcgccgctggagcggcgcgatccggcgacgaaggtagtcgccgaacaccatggcccctgtgagcccctgggatcgcaggcccgccaggcggtcaagaacggcgtcgtagccgtctcccagatctaccgtcgaccgccagctggaggcctgcgccgggggctggctcggaagtcggaggcgcgcttcgtcgacgaggggggtgtagaaccagtcgctcttccagtcgtcccactttttgcggaggacgcagggaatgtagcggttcagcacctgcccccgcggctggaagtagcagccaccgactaccgtcggcggcgacaccggctgaacggtgaagaaccaccggaacagccggagagatggccaacgtcattatcgcgttgggggtga

SEQ ID NO: 14283 - DNA, 7845 bp, Oryza sativa
  Clone ID: TFbOSC900232j.C1.o8.gm
atggctatgacaatagggctgacgtcagcacggagggggtgcggcgccggcaagcggggcccactggtcagcggctcaggggagagcggttcaccgtggaccgggaccacgcgggtggtccaccgccgttccacggaaccaacggcccagatcgccctcggggccgatcggacgggcggcgatagaggcggagatgtgggcgcggcggcggttgcgggcgcggtggcgcggcgggaggttggggaagggcccgacaggcttggaaggagaacttcagggtgtgacacccgcccccgggcggagggaggccacgacgcgtcggggcacgacgccgcctcacttacggtgacggcggctcgccccgaggcgcgcttcaggcggcgggtgtccttctgcggcatcccccccgaggaggagggcccatcgatcggccacggccttgaggcggtccacggctccaacatcgtcgggggcctcgggaagccggaggcgtcccgacggtctctacggggagcaggacgctcgaatcaatatcgagcgacgccgggacgagcgccgagctgcccgcatggggaaggcgcctcctcatctggagtgccgcgttcctccccacgagacggccctccccccacgctcagccctggagggactggttgtagggcattcgtggcgagtcttcggaatgtccggtggcccccgaagtttcgccccaacctcacggagaagtatgatggcagcatcaatccctccgagttcctccagatctacaccacgatcatcgtggcggcagggggcgacgaccgggtcatggcgaattatttccaaatggccctcaagggtcaggcgcgcggctggctgatgacccagccccccgacttcatccactcctgggaggacctgtgccagcagttcgtcacgaactttcagggcacatatccccgcccaggagaagaggcggacctacacgctgtgcggtggaaggacgacgagtccctccgctcgtacatacagcgcttctgccaggtccgcaacactattccatgcattccggcccacgcagtcgtttatgcgttttggaatggcatgcggcataaccgcatgctggagaagatcgcctccaaggagcccaagaccaccgccgagctgttcgagctggcggacaaggtggcttggaaggaggcgtgggcctggaactcccccggcaccgctgatgggccctcatgggccccgtgcaagggaaaggccaccggcgataagccaagctccactgctccatccggtgagggccggtcggcagacaagtggtgcttgggtcgacgagagggcaaagcccccgcgaccccagccgatgaccgacgaggggaagcgaagaagaaggcccccaccgatgatggtgataacagcgaggatctggagttccagatacctcagggaaccgtcgccacgctcgacctggggggagggggggcttgcgctcacacctcccgccgaggcttcaaggccataaggcgagagcttctagccaccgtcccaacccacgaagcggctcggaaggcgcactggtcggaggtgaagctcacctttgaccagagcgaccatttgacagtgctcgctcgaggtgggaagttggccctcgtggtctccccgaccattcacaacgttaggatgaagcgagtcctggttgacgggggggccagcttgagcatcatctccccagccgccttcaatgcgctcaaggccccggggatgaagctccagccgtcgctgccgatcatcggcgtgactccgggacacacgtggcccctcggccacgtcgagctcccgataaccttcggcgactccaccaacttccgtaccgagcggatcgacttcgatgtggcggacctcaatctgccctacaacgcggtcctgggcagacctgcgttggtgaagttcatggccgccacccactacgcctacctccagatgaagataccgggccctagtggtcccatcaccgtctttggcgatgtcaaagtcaccctcgcctgcgcggagcagcgcgccgacaacctggcagtggccacggagccacaggccccggaggcctccgcgtcccacgcctccaagaagcgcctcacctcggctgacgaggaaagcgcgctcgtctccttcctgcgggcaaactccgacgtcttcgaatggaagccgtcggacatgcccggggtccctagggaggtgatcgagcaccgcctcgccatgcggctggatgcgcgacccgtccggcaaaaagtgcggtgtcaagccccggagcggcaggccttcatccgagaggaagtggcgcggctcctggaggctgactttatccgcgaggttatccatccggagtggttggcgaacccggtggtcgtcccgaaggccaacggtaagctccggatgtgcattgactacacggacctcaacaaggcatgccctaaagatcccttccctttaccacgcatagatcagatagtcgactccactgcgggatttactctcccgaaatcttcgccggcgcatcaatggagcccgagatcgccgcgccgatttccttcccctccggccgccctctctcactcccaaccctatttaaacgctccccgtgcctccctcctccgtttccgccgtccgccgctcgctctccccgtcggattcgagctcgcgccgtcgtcctctctctccgccgtcgccgccgagctccggttcgccgccgtcgtcgccccggacctcctcccgcttcggcgtcgcctccttcggcttcgccgcgttctcgtcgacctcgtccactcctccgtttcgcccgccgaccgccggagcaccatcgtcctcgtcgacccgagccgcgccgccgcctctctccgcttcggtcgccgttcccgtcgtcgccgtcaacccgggatggccggcagcgtcacccgtcgtggtttggacatgactggtttcgtcttggagctgcggggcatgtgcgtggtcctggggtatccacatggagtggactaccaggccaggccgcttccggagcaggagggggacgatgcagagccccacgctgcttgggaggtcactgcagtgatcctcgctggctctcccgagcggacttcgctgacagtcaccgcgggtggagactctttccccgccgcctgccagagcgccgctctcctcgccatcggcactcttcaccagcgctacccggacgagttgcagcactcgccctaccgctaccaccctcgtcgcggaggagcccgcgaccacgccaccttccgggatgctagctcggaggatgacgctaccatcgtgcacttggcgcgcatggtggaggcgtacgacgcggctcgtatcgacttccatcagatggtgcgccgtgggatggtcgagaacaacttgaagatcctggagctgcgtcaggagaacctgcagctcaagaaggacctagacgcggtggaggcgcagctgcatcagctcaagatcgcccagggagagatctgccgccccaagcgtcgccgcgtctgccgcagccagaagatcaccgcccgcaagagcacctccaggcctgagcttatggtgatgaccaggagaaatgctaacaccggtgatggcaaccaacctgaaggcagcaaccacaaccatcagggcaacccacctccacctcctcccccgcctccacccccaccaccagataccaacgccattctcacccaaatcctcgcccagcaggccaacatgatgactgctttcctccaccacctccaaaatccgccacaacttaatcctccaccaccacccccacaacactctaaactcgccgagtttctccgtatccgcccacctaccttctctagctccaacaaccccgtggatgcgttggattggttgcatgccgtggggaaaaagctagacactgtgcagtgcagcgatgaggagaaagtcatcttcgccgcccaccagctgcatggacccgcatctctatggtgggaccatttccaggctatgcagccggagggacagcctgttacttgggcccgcttcaccgccgctttccggagaacccatgtgcccgccggagtcgtggcccttaagaaaagagaattccgagagttgaagcaaggcaaccgctccgtgatggagtatttgcacgagttcaacaacctggcccgttacactccggaggatgtgcggaaagatgaggagaagcaagaaaagttcctggcaggaatggaccctgagctgtccgtccgtctagtctctggggactatccggatttccaacgtctggtggacaagagcatccgcttggaagccaagcacaaggaactggagtcgcacaagcgccgcttggcgaatttccgcaaccaacagggtgctaaccaaagggtccgctacaccaatccctatccagggggatcctcctcgcagcagcaacaacagcagcagcaacctcgctccgcgcctcgacctcaattcgtggtgcgcgtcccacagccgcagcagcaacagaatcaacaagggactcgagcgccccgtcctcctacgccaactgtgcagcctggtcaaggccgcagggacgcttcaggtccgcagcgtctgtgcttcaactgcttcgagcccgggcactttgcggataaatgcccgaagccaaggcgtcagcaaggccaagcgcctccccgccccaacaacggtggtaaggacgtcagtcggggtcgtgtgaaccatgtgacggccgaggacgtgctgacaactccagacgtcatcgttggtacgttcctcattcattccatccctgctaccattttgttcgactctggagcttcccactcgtttatatctgtgccattcgtggggagaaatcagttgggggtagaaaggcttagaaaccctctgctcatcaccacccctggaggggttatgacagcaaagtattatagccctgccgtccctatagaaattcaggggattccttttccctcggatctgatcctgctagacaccaagaacttggatataggactgtcagaaatccccatcgtcagagagttcggagacgtgtttccggaagaactacctggtatgccgcctaaacgagagattgagttccggatagatcttgctccaggaaccactcctctgtacaagcgaccctaccgtatggcagcaaatgaactggccgaagttaagaaacagttggaagagctgaaagaaaaggggtatatacgtccgagtacttccccctggggtgctcctgtgatttttgtggagaagaaagacaagacgaagaggatgtgcgttgactacagagctctcaatgaagtcaccatcaaaaacaagtaccctcttccccggatcgacgatctgttcgatcagcttaaaggtgccactgtattctccaagattgatcttcgttccggatatcaccaattacgtattcgcgaagaagatattccgaagaccgcattcaccacgcgatacggactgtttgaattcacggtgatgtcgttcggtttaaccaatgcccctgccttcttcatgaacttaatgaacaaagtgttcatggaatacttggataagtttgtggtggttttcattgatgacattctgatatactcacaatcagaggaagaccatcagcaccatctccgtctggtattgggaaagttgcgggaacatcaattatatgccaaacttagcaagtgtgagttctggttgtccgaagtcaaattcttagggcacgtgatatctgctaaaggagttgctgtggaccccgaaacagtgaccgccgtcaccgattggaagcaacccaagacagtcactcaagttcgcagtttcttaggtttggcaggatactaccggaggttcatcgagaacttctccaaaatcgctcgacccatgacacagttgttgaagaaagaagagaaatttgtgtggagcccgcaatgcgagaaggcgtttcaaactctcaaagaaaagttggtttcctcgccagtgttaatcttgccggatactcgcaaggacttcatggtgtattgtgacgcttcgcgccaaggattggggtgcgtactcatgcaggatggtcatgtggtggcctatgcctcacgccagctacggcctcatgaaggcaactaccctacccatgatttggagttagcagcggtggttcatgctctaaaaatctggcggcattatctcattgggaatcgctgtgaaatatatactgatcataagagtttgaaatacatcttcacccagtcggatctgaatcttcggcaaaggagatggttagaactcatcaaagattatgatgtgggaattcactatcatcctggtaaggccaacgtggttgccgacgctctaagtcggaaaagccactgcaacactcttaacgtccgtggcattccactcgaacttaatcaacagatggaagccctgaacctaagcatagttggtcgcggattcttgactacgttggaagccaagcccaccttgctcgatcaaatccgcgaggctcagaagaatgatccagacatgcatggactcctcaagaatatgaaacagggtaaagccgctggtttcacagaggatgaacacggaaccctatggaacggaaatcgagtatgcgttccagataacagagaacttaaacagttgatacttcaggaagctcacgaaagtccttattccatccaccctggcagcacgaagatgtacttagacttgaaggagaaatactggtgggttagtatgaagcgggaaattgcagagttcgtggccctttgtgatgtgtgccagcgtgtcaaggcagagcaccaacgaccggccggacttctccaacctctccaagtacctgaatggaaatgggatgaaattgggatggatttcatcaccggacttccaaaaacccaaggtggatatgattctatatgggtagttgtggatcgattaaccaaggtagctcgattcattcctgtgaagaccacctatggagggaacaaactagccgagctctacttcgctaggatcacagatgggcagaccgagcgtctaaatcagatcctagaagatatgcttcgcgcatgtgtcctagatttcgggaagacctgggataagagtctcccctatgccgagttctcctacaataacagctaccaagccagcatacaaatggcgccttatgaagcgttgtatgggcgcaaatgccggacaccgctcctgtgggaccaagttggggaaagccaagtgttcgggactgatatcctgagagaagctgaagcgaaagtcagaaccattagggataatctaaaggtggcacagtcccagcagaaaagttatgcagataaccgtcgccgtgacctggaattcgcagtggatgattttgtgtaccttcgggtcacgccattgcggggtgtacacaggtttcagacaaaggggaagctcgcacctcggtatgtgggtcctttccgtatcgttgctcgacgcggagaagtcgcttaccagttggagctgcccgcctccttgggcaacgtgcatgatgtgttccatgtgtcgcaactcaagaaatgccttcgagtgccatccgagcaggccgactcagagcaaattgaagttcgcgaagacttgacctacgtggagaggccagtgaagatcctggacaccatggagcgcaggaccaggaaccgggtaatccgtttttgcaaggtccagtggagcaaccacgccgaagaagaagctacctgggagcgcgaagacgagctgaaggcagcccatcccgacctcttcgccaggcccacccgtcatcccctacctcgcgccgcgcccgccgcctcgcccgtgccctag

SEQ ID NO: 14284 - DNA, 5604 bp, Oryza sativa
  Clone ID: TFbOSC900247j.C1.o14.gm
atggatgaagtcgggggtcgatggacattctccagggcaaatgaaggctacacgagctgcggcccggtagtcgagatgtcgtggcagagggttggtgccctgctgcttggggctcagtcctgcctgcctgtcccggaggttccggccgtaggcgggattgggtcgatggccggcagcgtcacccgtcgtggtttggacatgactggcttcgtcttggagctgcggggcatgtgcgtggccctggggtatccacatggagtggactaccaggccaggccgcttccggatcaggagggtgacgacgcggagccccacgctggttgggaggtcaccgcagtgatcctctctggctctcccgagcggacttcgctggcagttaccgcgggtggagattccttccccgccgcttgccagaacgccgctctcctcgccatcggcactcttcaccagcgctacccggacgagttgcagcactcgccctaccgctaccaccctcgtcgcggaggagcccacgactacgccaccttccgggatgctagctcggaggatgacgctaccatcgtgcacctggcgcgcatggtggaggtgtacgacgcggctcgtatcgacttccatcagatggtgcgtcgcgggatggtcgagaacaatctgaagatcctggagctgcgtcaggagaacctgcagctcaagaaggacctagacgcggtggaggcgcagctgcatcagctcaagatcgcccagggagaggtctgccgccccaagcgtcgccgcgtctgccgcagccagaagatcaccgcccgcaagagcacctccaggcccgagcttgttcgtcagtccctggcgtggacttgcttcgtcgagacccctcgtgccgagcccgcgcccgtggttccccaggagggggaagcctccggcattggtagcacggaggctctttctctgtttgctggttctgtgtggggttttcagatggtgacgaccaggagaaatgctgccaccggtgatggcaaccaacccgaaggcagcaaccacaaccatcagggcaacccacctccacctcctcctccgcctccaccaccaccaccagacaccaacgccattctcacccaaatcctcgcccagcaagccaacatgatgactgctttcctccaccacctccaaaatccaccacaacataatgctccaccaccacccccacaacactctaaactcgccgagttcctccgtatccgcccacctaccttctctagctccaacaaccccgtggatgcgttggattggtttcatgccgtggggaaaaagctagacacggtgcagtgcagcgatgaggagaaagttatcttcgccgcccaccaactgcaggggcccgcatctctatggtgggaccatttccaggctacgcagccagaggggcagcctattacttgggcccgcttcaccgccgctttccggagaacccatgtgcccgccggagtcgtggcccttaagaaaagggaattccgagagttgaagcaaggcaaccgctccgtgatggagtatttgcatgagttcaacaacctagcccgttacgccccggaggatgtgcgggaagatgaggagaagcaagaaaagttcttggcaggaatggaccctgaactgtccgtccgtctagtctctggggactatccggattttcaacgattggtggacaagagcatccgcttggaagccaagcacaaggagctggagtcgcacaagcgccgcttggcgaatttccgcaatcaacagggtgctaatcaaaggggccgctacaccaatccctatccagggggatcctcctcgcagcagcaacaacagcagcagcaacctcgccccgcgccccgacctcaattcgtggtgcgcttcccacagccgcagcaacagcagaatcaacaagggactcgtgcgccccgtcctcctacgccaacggtgcagcctggtcaaggccgcagggacgctcaaggtcagcagcgtctgtgcttcaactgcttcgagcccgggcactttgcggataaatgcccaaagccaaggcgtcagcaaggccaagcgcctccccgctccaacaacggcgggaaggatgtcattcggggtcgtgtgaatcacgtgacggccgaggacgtgctgacaactccagacgtcatcgttggactgtcagaaatccccatcgtcagggagttcggagatgtgtttccggaagaactacccggtatgccgcccaagcgagagattgagttccggatagatcttgctccaggaaccactcctctgcacaagcgaccctaccgtatggcagcaaatgaactggccgaagtaaagaaacagttggaagagttgaaagaaaaggggtacatacgtccgagtacttccccatggggtgctcctgtgatttttgtagagaagaaagacaagacgaagaggatgtgcgtcgattacagagctctcaatgaagtcaccatcaaaaacaagtaccctcttccccggatcgatgatctattcgatcagcttaaaggtgccactgtattctccaagattgatcttcgttccggatatcaccaattacgtattcgtgaagaagatattccgaagaccgcattcaccacgcgatacggactgtatgaattcacggtgatgtcattcggtttaaccaatgctcttgcattcttcatgaacttaatgaacaaagtgttcatggaatacttggataagtttgttgtggtgttcattgatgacattctgatatactcacaatccgaggaagaccatcagcaccatctccgtctggtgttgggaaagttgcgggaacatcaattgtatgccaagcttagcaagttcatcgagaacttctccaaaatcgctcgacccatgacacagttgttgaagaaagaagagaaatttgtgtggagcccgcaatgcgagaaggcgtttcaaactctcaaggaaaagctggtttcctcgccggtgttaatcttgccggatactcgcaaggacttcatggtgtattgtgacgcttcgcgccaaggattggggtgcgtgctcatgcaggacggtcatgtagtagcctatgcctcacgtcagctacgacctcatgaaggcaactaccctacacatgacttggagttagccgcggtggttcatgctctaaaaatctggcggcactatctcattgggaatcgctgtgaaatatataccgaccataggagtttgaaatacatcttcacccagtcggatctgaatcttcggcaaaggagatggttagaactcatcaaagactatgatgtgggaattcactatcatcctggtaaggccaacgtggttgccgacgctctaagtcgaaagagccattgcaacactcttaacgtccgtggcattccacccgaacttagtcaacagatggaagccctgaacctaagcatagttagtcgcggattcttggctgcgttagaagccaagcctaccttgctcgatcaaatccgcgaggctcagaagaatgatccggacatgcatggactcctcaagaatatgaaacagggtaaagccgctggttttacagaggatgaacacagaaccctatggaacggaaagcgggtatgcgttccagataacagagaacttaaacagctgatacttcaggaagctcacgagagcccttattccattcacccgggcagtacaaagatgtacctagacttgaaggagaaatactggtgggttagcatgaagcgggaaattgcagagtttgtggccctatgtgatgtgtgccagcgtgtcaaggcagagcaccaacgaccggccggacttctccaacctctccaagtaccagaatggaaatgggatgaaattgggatggatttcatcaccggacttccaaaaacccaaggtggatatgattctatatgggtagttgtggatcgattaaccaaggtagcacggttcattcccgtaaagaccacctatggagggaacaaactagccgagctctacttcgctaggatcgtgagtctccatggcgttcccaagaaaatcgtatctgataggggaagccaattcacctctcacttttggaagaagctccaagaagagctgggtactcgattgaatttcagcaccgcctatcacccgcagaaagatggacagaccgagcgtctaaatcagatcctagaagatatgctccgcgcatgtgtactagatttcgggaagacctgggataagagtctcccctatgccgagttctcctacaataacagctatcaagccagcatacaattggcaccttatgaagcgttgtacgggcgcaaatgccggacaccgctattgtgggaccaagttggagaaagccaagtgttcgggactgatatcctgagagaagctgaagctaaagtcagaatcattcgggataatctaaaggtggcacagtcccggcagaaaagttatgcagataatcgtcgccgtgacctggaattcgcagtgggtgattttgtgtaccttcgggtcacgccattgcgaggtgtacacaggtttcagacaaaagggaagctcgcacctcggtatgtgggtcctttccgtatcgttgctcgacgcggagaagtcgcttaccagttggagctgcccgcctccttgggcaacgtgcatgatgtgttccatgtgtcgcaactcaataaatgccttcgagtgccatccgagcaggccgactcagagcagattgaagttcgcgaagatttgacctacgtggagaggccagtgaaaatcctggacaccatggagcgcaggaccaggaaccgggtaatccgtttttgcaagctccagtggagcaaccatgccgaagaagaagctacctgggagcgtgaagacgagctgaaggcagcccatcccgatctcctcgccaccgcccgcgcccgcgggtgcggtgacgcgtgggacccacggcgccggccggcgtcagccgcgtgcgcccggtccaccgtggaccgtgagggtgacgcgtgggccccactcccgtggacccgccccacggtccacggtggaccgggcgcacgcggctggcggcggtcggcgccgtgggtcccgcgcgtcagccgcacccgcgggcgcgggcggctgacggccgggcccacttggcagccgcgagggcgcgcccgagggcggcctcgccggcgcggccgacgggagcggcgcgcccgcgccccgatggtcaccgccggcgaccaccggcgcggcggagcggcgcccgagagagaggagggaagggggaaggcgaacggcggtcctcggctcaccccgggacaacgacgacgacgagaacggcggccggagcggaggaagacggcggcgcggctcgggatgacgatggcgacggcgctccgacggtcggcgagcgaaacggaggcgcggacgaggtcgacggcgatgcggcgatgccgagggaggtggcgccgagtaaggaggaagtccggagcggcggcggcggcggaacggagctcggcggcgatggcggagagagcggagcacggcgcgagcacgaatccgacggcgagagcgagcggcgagcggcggaaacggaagagcggagctcgggcaacgtttaaatag

SEQ ID NO: 14285 - DNA, 5283 bp, Oryza sativa
  Clone ID: TFbOSC900255j.C1.o19.fg
atggaggtggatgaagtcgggggtcgatggacattctccagggcaaatgaaggctacacgagctgcggcccggtagtcgagatgtcatggcacagggccggtgtcctgctgctaggggctcagtcctgcctgcctgtcccgggggttccggccgtaggtgggattgggtcggtactcttgtctatggctaggatgggttggaaactatgtcacgtcttccgtctgtatatcgtggtgatggccggcagcgtcacccgtcgtggtttggacatgactggtttcgtcttggagctgcggggcatgtgcgtggccctggggtatccacacggagtggactaccaggccaggccgcttccagagcaggagggtgacgatgcagagccccacgctgcttgggaggtcactgcagtgatcctcgctggctctcccgagcggacttcgctgacagtcaccgcgggtggagactccttccccgccgcttgccagagcgccgctctcctcgccatcggcactcttcaccagcgctacccggacgagttgcagcactcgccctaccgctaccaccctcgtcgcggaggagcccgcgaccacgccaccttccgggatgctagctcggaggatgacgctaccatcatgcacttggcgcgcatggtggaggcgtacgacaaggctcgtatcgacttccatcagatggtgcgccgtgggatggtcgagaacaacctgaagatcctggagctgcgtcaagagaacctgcagctcaagaaggacctggacgcagtggaggcgcagctgcatcagctcaagatcgcccagggagagatctgccgccccaagcgccgccgcgtctgccgcagccagaagatcaccgcccgcaagagcacctccaggcccgagcttgttcgtcagtccctggcgtggacttgcttcgtcgagacccctcgtgccgagcctgcgcccgtggttccccaggagggggaagcctccggcgttggtagcacggaggatatggtgatgaccaggagaagtgctaacaccggtgatggcaaccaacctgaaggcagcaaccacaaccatcagggcaacccacctccacctcctcctccgcctccaccaccaccaccagacaccaacgccattctcacccaaatcctcgcccagcaggccaacatgatgactgctttcctccaccacctccaaaatccgccacaacttaatgctccaccaccacccccacaacactctaaactcgccgagtttctccgcatccgcccacctaccttctctagctccaacaaccccgtggatgcgttggattggttgcatgccgtgggaaaaaagctagacactgtgcagtgcagcgatgaggagaaagtcatcttcgccgcccaccagctgcagggacccgcatctctatggtgggaccatttccaggctacgcagccagagggacagcctattacatgggctcgcttcaccgccgctttccgaagaacccatgtgcccgccggagtcgtggctcttaagaaaagggaattccgagagttgaagcaaggcaaccgctccgtgatggagtatttgcacgagttcaacaacctggcccgttacgctccggaggatgtgcgggaagatgaggagaagcaagagaagttcctggcaggaatggaccctgagctgtccgtccgtctagtctccagggattatccggatttccaacatctggtggacaagagcatccgcttggaagccaagcacaaggaactggagtcgcacaagcgccgcttggcgaatttccgcaaccaacagggtgctaaccaaagggtccgctacaccaatccctatccagggggatcctcctcgcagcagcaacagcagcagcagcaacctcgctccgcgcctcgacctcaattcgtggtgcgcgtcccacagccgcagcagcagcagaatcaacaagggactcgtgcgccccgtcctcctccaccgattgtgcagcctggtcaaggccgcagggacgctcaaggtccgcagcgtctgtgcttcaactgcttcgagcccgggcactttgcggataaatgcccgaagccaaggcgtcagaaaggccaagcgcctccccgccccaacaatggtggtaaggacgtcattcggggtcgtgtgaatcatgtgacggccgaggacgtgctgacaactccagacgtcatcgttggtacgttcctcattcattccatccctgctaccattttgttcgactctggggcttcccactcgtttatatctgtgccattcgtggggagaaatcagttgggggtagaaaggcttagaaaccctctgctcatcaccacccctggaggggttatgacagcaaagtattatagccctgccgtccctatagaaattcaggggattccttttccctcggatctgattctgctagacaccaagaacttggatgtgatccttgggatgaattggttggctcaattccaaggagtagtggattgcgcgagacgcactgtcactctgtaccgagggccggaacaaccggttgttttctttgcacccccaacctcagtcagaagttcagaacttcatcagatagaactgtcagaaattcccatcgtcagagagttcggagacgtgtttccggaagaactacctggtatgccgcctaagcgagagattgagttccggatagatcttgcttcaggaaccgctcctctgtacaagcgaccctaccgtatggcagcaaatgaactggccgaagttaagaaacagttggaagagttgaaagaaaaggggtatatacgtccgagtacttccccctggggtgctcctgtgatttttgtggagaagaaagacaagatgaaaaggatgtgcgttgactacagagctctcaatgaagtcaccatcaaaaacaagtaccctcttccccggatcgatgatctgttcgatcagcttaaagaggaagaccatcagcaccatctccatctggtattgggaaagctgcgggaacatcaattgtatgccaaacttagcaagtgtgagttctggttgtccgaagtcaaattcttagggcacgtgatatctgctaaaggagttgctgtggaccccgaaacagtgaccgccgtcaccgattggaagcaacccaagacagtcactcaagttcgcagtttcttaggtttggcaggatactacaggagattcatcgagaacttctccaaaatcgctcgacccatgacacaattgttgaagaaagaagagaaatttgtgtggagcccgcaatgcgagaaggcgttccaaactctcaaagaaaagctggtttcctcgccggtgttaatcttgccggatactcacaaggacttcatggtgtattgtgacgcttcgcgccaaggattggggtgcgtgctcatgcaggatggtcatgtggtggcctatgcctcacgccagctacggcctcatgaaggcaactaccctacccatgatttggagttagccgcggtggttcatgctctaaaaatctggcggcactatctcattgagaatcgctgtgaaatatatactgatcataagagtttgaaatacatcttcactcagtcggacctgaatcttcgacaaaggagatggttagaactcatcaaggattatgatgtgggaattcactatcatcctggtaaggccaacgtggttgccgacgctctaagtcaaaaaagccattgcaacactcttaacgtccgtggcattccacccgaacttaatcaacagatggaagccctgaacctaagcatagttagtcgcggattcttggctgcgctggaagccaagcccaccttgctcgatcaaatccgtgaggctcagaagaatgatccagacatgcatggactcctcaagaatatgaaacagggtaaagccgctggtttcacagaggatgaacacgggaccctatggaacggaaatcgagtatgcgttccagataacagagaacttaaacagttgatacttcaggaagctcacgaaagtccttattccatccaccctggcagcacgaagatgtacttagacttgagggagaaatactggtgggttagtatgaagcgggaaattgcagagttcgtggccctttgtgatgtgtgccagcgtgtcaaggcagagcaccaacgaccggccggacttctccaacctctccaagtacctgaatggaaatgggatgaaattgggatggatttcatcaccggacttccaaaaacccaaggtggatatgattctatatgggtagttgtggatcgattaaccaaggtagctcgattcattcctgtgaagaccacctatggagggaacaaactagccgaactctacttcgctaggatcgtaagtctccatggcgttcctaagaaaatcgtatctgataggggaagccaattcacctctcacttttggaagaagctccaaaaagagctgggtacccgattaaactttagcaccgcgtatcacccgcagacagatgggcagaccgagcgtctaaatcagatcctagaagatatgcttcgcgcatgtgtcctagatttcgggaagacctgggataagagtctcccctatgccgagttctcctacaacaacagctatcaagccagcatacaaatggcaccttatgaagcgttgtatgggcgcaaatgccggacaccgctaatgtgggatcaagttggggaaagccaagtgttcgagactgatatcctgagagaagctgaagctaaagtcagaaccattcgggataatctaaaggtggcacagtctcggcagaaaagttatgcagataaccgtcgccgtgacctggaattcgcagtggacgattttgtatatcttcgggtcacgccattgcgaggtgtacacaggtttcggacaaaagggaagctcgcacctcggtatgtgggtcctttccgtatcgttgctcgacgcggagaagtcgcttaccaattggagctgcccgcctccttgggcaacgtgcatgatgtgttccatgtgtcgcaactcaagaaatgccttcgagtgccatccgagcaggccgactcagagcaaattgaagttcgcgaagacttgacctacgtggagaggccaatgaagatcctggacaccatggagcgcaggaccaggaaccgggtaatccgtttttgcaaggtccagtggagcaaccacgccgaagaagaagctacctgggagcgcgaagacgagctgaaggcagcccatccagatctcttcgccagttcttccgaatctcggggtcgagattccgtttaa

SEQ ID NO: 14286 - DNA, 5418 bp, Oryza sativa
  Clone ID: TFbOSC900260j.C1.o1.fg
atggatgaagtcgggggtcgatggacattctccaggacaaatgaaggctacacgagctgcggcccgatggccggcagcgttacccgtcgtggtttgcacatgactggcttcgtcttggagctgcggggcctgtgcgtggtcttggggtatccacatggagtggattaccaggccaggccgctcccggagcaggagggtgaggatgcagagcctcacgctggttgggaggtcactgcagtgatcctctccggctctcctgagcggacttcgctggcagtcaccgcgggcggagattccttccccgccgcttgccagaacgccgctctcctcgccatcggcacccttcaccagcgctacccggacgagttgcagcactcgccctaccgctaccacccccgtcgcggaggagccagcgaccacgccaccttccgagacgccagctcggaggatgacgctaccgtcgtgcatctggcacgcatggtggaggcgtacgacgtggctcgtatcgacttccaccagatggtgcgtcgtggcatggtggagaacaacatgaagatcctggagctgcgtcaggagaacctgcagctcaagaaggacctcgacgcgttggaggcgcagctgcaccagctcaaggtcgcccagggtgagatctgccgtcccaagcgtcgccgcgtctgccgcagccagaagatcaccgcccgcaagagcacctccaggcccgagcttgttcgtcagtccctggcatggacttgcttcgtcgagacccctcgtgccgagcctgcgcccgtggttccccaggagggggaagcctccggcgttggtagctcggagggtgcgctgttgctcaccttccgccctggcccgtcgcagcgctctccttctctgtttgctggttctgtgtggagtttacagatggtgtcgaccaggagaaatgttaacaccggtgaaggcaaccaacccgaaggcagcaaccccaacccccaaggcaatccacctccaccaccaccaccagacaccaacgccattctcactcaaatcctcgcccagcaagccaacatgatgaatgctttcctccaccacctccaaaatccaccacaacagaatgctccaccaccacctccccaacactccaaactcgccgaatttctccgcatccgcccacccaccttctctagctccaacaatcctgtagatgcgttggattggttgcatgccgtggggaagaagctggacacggtgcagtgcagcgacgaagagaaagtcatcttcgccgcccatcagctgcagggacccgcatctctatggtgggaccatttccaggccacgcagccagagggacaaccgattacttgggctcgcttcaccgccgccttccggagaacccatgtgcctgccggagtcgtggctctcaagaagaaggaattccgagagttgaagcaaggcaaccgctccgtaatggagtatttgcatgagttcaacaatctagcccgttacgctccggaggatgtgcgggaagatgaggagaagcaagagaagttcttggcaggaatggaccccgagctgtctgttcgtctagtctctggagactatcctgattttcaacgactggtggacaagagcatccgcttggaagccaagcacaaggagctggaatcgcacaagcgccgcttggcgaatttccgcaatcaacagggtgctaaccagagggtccgctacaccaatccctacccagggggatcctcctcgcagcagcagcagcagcagcagcagcaatctcgctccgcgcctcgaccccaattcgtggtgcgcgtcccacagccgcagcagcagcagaatcagcaagggactcgtgcgccccgtcctcctactccagctgggcagcccgttcaaggccgcagggacgcttcaggtccgcagcgtctgtgcttcaactgcttcgagcccgggcactttgcggataaatgcccgaagccaaggcgtcagcaaggccaagcgcctccccgctccaacaacagtggcaaggacgtcctccgtggtcgtgtgaaccacgtgacggccgaggacgtgctgacaactccagacgtcatcgttggtacgttcctcgtccattccatccctgctacaattttgttcgactctggagcttcccactcgtttatatctgtgccattcgtggggaaaaatcagttgggggtagaaaggcttagaaaccctctgctcatcaccacccctggcggggttatgacagcaaagtattatagccctgccgttcctatagaaattcaggggattccttttccttcggatctgatcctgctagacacaaagaacttggacgtgatccttgggatgaattggttggctcaattccaaggagtagtggattgcacgagacgcactgtcactctgtatcgagggccagaacaaccggttgttttctttgcacctccaacctctgtcagaagttcagaactgcatcagataggtccgtcagaaatccccatagtcagagagttcgaagatgtgtttccagaagaactacctggtatgccgcccaagcgagagattgagttccggatagatcttgttccaggaaccactcctctgcacaagcgaccctaccgtatggcagcaaatgaactggccgaagtcaagaaacagttggaagagttgaaagaaaaggggtatatacgtccgagtacttccccatggggtgctcctgtgatttttgtagagaagaaagacaaaacgaagaggatgtgcgttgactacagagctctcaatgaagtcaccatcaaaaacaagtaccctcttccccggatcgatgatctgttcgatcagcttaaaggtgccactgtattctccaagattgatcttcgttccggatatcatcaattacgtattcgtgaagaagatattccgaagaccgcattcactacgcgatatgggctgtatgaattcacggtgatgtcgttcggtttgaccaatgcacctgccttcttcatgaacttaatgaacaaagtgttcatggaatacttggataagtttgttgtggttttcatcgatgacattctaatatactcacaatcagaagaagaccatcagcaccatctccgtctggtattgggaaaactgcgggaacatcaattgtatgccaagcttagcaagtgtgagttctggttgtccgaagtcaaattcttagggcacgtgatatctgctaagggagttgctgtggaccccgaaacagtgaccgccgtcaccgattggaagcaacccaagacagtcactcagattcgcagtttcttaggtttggcaggatattaccggagattcatcgagaacttctccaaaatcgctcgacccatgacacagttgttgaagaaagaagagaaatttgtgtggagcccgcaatgcgagaaggcgttccaaactctcaaggaaaagctggtttcctcgccagtgttaatcttgccggatactcgtaaggatttcatggtgtattgtgatgcttcgcgccaaggattggggtgtgtgctcatgcaggacggtcatgtggtagcctatgcttcacgtcagctacgtcctcatgaaggcaactaccctacgcatgatttggagttagcagcggtggttcatgctctaaaaatctggcggcactatctcattgggaaccgctgcgaaatatatactgatcacaagagcttgaagtacatcttcacccagtcggatctgaatcttcggcaaaggagatggttagaactcatcaaggattatgatgtgggaatacactatcatcctggtaaggccaacgtggttgccgacgctctaagtcgaaagagccactgcaacactctcaacgtccgaggcattccgcccgagcttaatcaacagatggaagccctgaacctaagcatagttggtcgcggattcttggccgcgttggaagccaagcctaccttgctcgatcaaatccgcgaggctcagaagaatgatccggacatgcatggactcctcaagaatatgaaacagggtaaagccgcaggtttcacagaggatgaacacggaactctatggaacgggaagcgggtatgcgttcccgataacagagaacctaaacagctgatacttcaggaagctcacgaaagtccttattccattcacccgggcagtaccaagatgtacttagacttgaaggagaaatactggtgggtcagcatgaagcgggaaattgcagagtttgtggctctatgtgatgtgtgccagcgtgtcaaggcagaacaccaacgaccggctggacttctccaacctctccaagtgccggaatggaaatgggatgaaattgggatggatttcatcaccggccttccaaaaacccaaggtggatatgattctatatgggtaatagtggatcgattaaccaaggtagctcgatttattcctgtgaagaccacctatggagggaacaagctagcggagctctacttcgctaggatcgtgagtctccatggcgttcccaagaaaatcgtatctgataggggaagccaattcatctctcacttttggaagaagctccaagaagagctgggtactcggttgaatttcagcaccgcctatcacccgcagacagatggacagaccgagcgtctaaatcagatcctagaagatatgctccgcgcatgtgtcctagatttcgggaagacttgggataagagtctcccctatgccgagttctcctacaataacagctaccaagccagcatacaaatggcaccttatgaagcgttgtacgggcgcaaatgccgaacaccgctattgtgggaccaagtcggagaaagtcaagtgttcgggaccgatatcctgagagaagctgaagctaaagtcagaatcattcgggataatctaaaggtggcacagtcccggcagaaaagttatgcagataaccgacgccgtgatctggaattcgcagtggatgattttgtgtatcttcgggtcacgccattgcgaggtgtgcacaggtttcagacgaaagggaagctagcacctcggtatgtgggtcccttccgtatcatcgctagacgcggagaagttgcttaccagctggagttgcccgcctccttgggtaacgtgcatgatgtgttccacgtgtcgcagctcaagaaatgtctccgagtgccatccgagcaggccgactcagagcaaattgaagttcgcgaagacttgacctatgtggagaggccagtgaaaatcctggacaccatggagcgcaggaccaggaaccgagtaatccgtttttgcaaggtccagtggagcaaccacgccgaagaagaagctacttgggagcgcgaagacgagctgaaggcagcccatcccgatctcttcgccagttcttccgaatctcggggtcgagattccgtttaa

SEQ ID NO: 14287 - DNA, 5337 bp, Oryza sativa
  Clone ID: TFbOSC900286j.C1.o20.fg
atgtcatggcacagggccggtgtcctgctgctaggggctcagtcctgcctgcctgtcccgggtgttccggccgtaggtgggattgggtcggtactcttgtctatggctaggatgggttggaaactatgtcacgtctttcgtctgtataccgtggtgatggccggcagcgtcacccgtcgtggtttggacatgactggtttcgtcttggagctgcggggcatgtgcgtggtcctggggtatccacatggagtggactaccaggccaggccgcttccggagcaggagggggacgatgcagagccccacgctgcttgggaggtcactgcagtgatcctcgctggctctcccgagcggacttcgctgacagtcaccgcgggtggagactctttccccgccgcctgccagagcgccgctctcctcgccatcggcactcttcaccagcgctacccggacgagttgcagcactcgccctaccgctaccaccctcgtcgcggaggagcccgcgaccacgccaccttccgggatgctagctcggaggatgacgctaccatcgtgcacttggcgcgcatggtggaggcgtacgacgcggctcgtatcgacttccatcagatggtgcgccgtgggatggtcgagaacaacttgaagatcctggagctgcgtcaggagaacctgcagctcaagaaggacctagacgcggtggaggcgcagctgcatcagctcaagatcgcccagggagagatctgccgccccaagcgtcgccgcgtctgccgcagccagaagatcaccgcccgcaagagcacctccaggcctgagcttatggtgatgaccaggagaaatgctaacaccggtgatggcaaccaacctgaaggcagcaaccacaaccatcagggcaacccacctccacctcctcccccgcctccacccccaccaccagataccaacgccattctcacccaaatcctcgcccagcaggccaacatgatgactgctttcctccaccacctccaaaatccgccacaacttaatcctccaccaccacccccacaacactctaaactcgccgagtttctccgtatccgcccacctaccttctctagctccaacaaccccgtggatgcgttggattggttgcatgccgtggggaaaaagctagacactgtgcagtgcagcgatgaggagaaagtcatcttcgccgcccaccagctgcatggacccgcatctctatggtgggaccatttccaggctatgcagccggagggacagcctgttacttgggcccgcttcaccgccgctttccggagaacccatgtgcccgccggagtcgtggcccttaagaaaagagaattccgagagttgaagcaaggcaaccgctccgtgatggagtatttgcacgagttcaacaacctggcccgttacactccggaggatgtgcggaaagatgaggagaagcaagaaaagttcctggcaggaatggaccctgagctgtccgtccgtctagtctctggggactatccggatttccaacgtctggtggacaagagcatccgcttggaagccaagcacaaggaactggagtcgcacaagcgccgcttggcgaatttccgcaaccaacagggtgctaaccaaagggtccgctacaccaatccctatccagggggatcctcctcgcagcagcaacaacagcagcagcaacctcgctccgcgcctcgacctcaattcgtggtgcgcgtcccacagccgcagcagcaacagaatcaacaagggactcgagcgccccgtcctcctacgccaactgtgcagcctggtcaaggccgcagggacgcttcaggtccgcagcgtctgtgcttcaactgcttcgagcccgggcactttgcggataaatgcccgaagccaaggcgtcagcaaggccaagcgcctccccgccccaacaacggtggtaaggacgtcagtcggggtcgtgtgaaccatgtgacggccgaggacgtgctgacaactccagacgtcatcgttggtacgttcctcattcattccatccctgctaccattttgttcgactctggagcttcccactcgtttatatctgtgccattcgtggggagaaatcagttgggggtagaaaggcttagaaaccctctgctcatcaccacccctggaggggttatgacagcaaagtattatagccctgccgtccctatagaaattcaggggattccttttccctcggatctgatcctgctagacaccaagaacttggatgtgatccttgggatgaattggttggctcaattccaaggagtagtggattgcgcgagacgcactgtcactctgtaccgagggccggaacaaccggttgttttctttgcacccccaacctcagtcagaagttcagaacttcatcagataggactgtcagaaatccccatcgtcagagagttcggagacgtgtttccggaagaactacctggtatgccgcctaaacgagagattgagttccggatagatcttgctccaggaaccactcctctgtacaagcgaccctaccgtatggcagcaaatgaactggccgaagttaagaaacagttggaagagctgaaagaaaaggggtatatacgtccgagtacttccccctggggtgctcctgtgatttttgtggagaagaaagacaagacgaagaggatgtgcgttgactacagagctctcaatgaagtcaccatcaaaaacaagtaccctcttccccggatcgacgatctgttcgatcagcttaaaggtgccactgtattctccaagattgatcttcgttccggatatcaccaattacgtattcgcgaagaagatattccgaagaccgcattcaccacgcgatacggactgtttgaattcacggtgatgtcgttcggtttaaccaatgcccctgccttcttcatgaacttaatgaacaaagtgttcatggaatacttggataagtttgtggtggttttcattgatgacattctgatatactcacaatcagaggaagaccatcagcaccatctccgtctggtattgggaaagttgcgggaacatcaattatatgccaaacttagcaagtgtgagttctggttgtccgaagtcaaattcttagggcacgtgatatctgctaaaggagttgctgtggaccccgaaacagtgaccgccgtcaccgattggaagcaacccaagacagtcactcaagttcgcagtttcttaggtttggcaggatactaccggaggttcatcgagaacttctccaaaatcgctcgacccatgacacagttgttgaagaaagaagagaaatttgtgtggagcccgcaatgcgagaaggcgtttcaaactctcaaagaaaagttggtttcctcgccagtgttaatcttgccggatactcgcaaggacttcatggtgtattgtgacgcttcgcgccaaggattggggtgcgtactcatgcaggatggtcatgtggtggcctatgcctcacgccagctacggcctcatgaaggcaactaccctacccatgatttggagttagcagcggtggttcatgctctaaaaatctggcggcattatctcattgggaatcgctgtgaaatatatactgatcataagagtttgaaatacatcttcacccagtcggatctgaatcttcggcaaaggagatggttagaactcatcaaagattatgatgtgggaattcactatcatcctggtaaggccaacgtggttgccgacgctctaagtcggaaaagccactgcaacactcttaacgtccgtggcattccactcgaacttaatcaacagatggaagccctgaacctaagcatagttggtcgcggattcttgactacgttggaagccaagcccaccttgctcgatcaaatccgcgaggctcagaagaatgatccagacatgcatggactcctcaagaatatgaaacagggtaaagccgctggtttcacagaggatgaacacggaaccctatggaacggaaatcgagtatgcgttccagataacagagaacttaaacagttgatacttcaggaagctcacgaaagtccttattccatccaccctggcagcacgaagatgtacttagacttgaaggagaaatactggtgggttagtatgaagcgggaaattgcagagttcgtggccctttgtgatgtgtgccagcgtgtcaaggcagagcaccaacgaccggccggacttctccaacctctccaagtacctgaatggaaatgggatgaaattgggatggatttcatcaccggacttccaaaaacccaaggtggatatgattctatatgggtagttgtggatcgattaaccaaggtagctcgattcattcctgtgaagaccacctatggagggaacaaactagccgagctctacttcgctaggatcgtaagtctccatggcgttcccaagaaaatcgtatctgataggggaagccaattcacctctcacttttggaagaagctccaagaagagctgggtacccgattaaacttcagcaccgcgtatcacccgcagacagatgggcagaccgagcgtctaaatcagatcctagaagatatgcttcgcgcatgtgtcctagatttcgggaagacctgggataagagtctcccctatgccgagttctcctacaataacagctaccaagccagcatacaaatggcgccttatgaagcgttgtatgggcgcaaatgccggacaccgctcctgtgggaccaagttggggaaagccaagtgttcgggactgatatcctgagagaagctgaagcgaaagtcagaaccattagggataatctaaaggtggcacagtcccagcagaaaagttatgcagataaccgtcgccgtgacctggaattcgcagtggatgattttgtgtaccttcgggtcacgccattgcggggtgtacacaggtttcagacaaaggggaagctcgcacctcggtatgtgggtcctttccgtatcgttgctcgacgcggagaagtcgcttaccagttggagctgcccgcctccttgggcaacgtgcatgatgtgttccatgtgtcgcaactcaagaaatgccttcgagtgccatccgagcaggccgactcagagcaaattgaagttcgcgaagacttgacctacgtggagaggccagtgaagatcctggacaccatggagcgcaggaccaggaaccgggtaatccgtttttgcaaggtccagtggagcaaccacgccgaagaagaagctacctgggagcgcgaagacgagctgaaggcagcccatcccgacctcttcgccagttcttccgaatctcggggtcgagattccgtttaa

SEQ ID NO: 14288 - DNA, 5379 bp, Oryza sativa
  Clone ID: TFbOSC900290j.C1.o5.fg
atgtcatggcacagggccggtgtcctgctgctaggggctcagtcctgcctgcccgtcccgggtgttccggccgtaggtggggttgggtcggtactcttgtctatggctaggatgggttggaaactatgtcacgtcttccgtctgtataccgtggtgatggccggcagcgtcacccgtcgtggtttggacatgactggtttcgtcttggagctgcggggcatgtgcgtggtcctggggtatccacacggagtggactaccaggccaggccgcttccggagcaggagggtgacgatgcggagccccacgctgcttgggaggtcactgcagtgatcctcgctggctctcccgagcggacttcgctaacagtcaccgcgggtggagactccttccccgccgcttgccagagcgccgctctcctcgccatcggcactcttcaccagcgctacccggacgagttgcagcactcgccctaccgctaccaccctcgtcgcggaggagcccgcgaccacgccaccttccgggatgctagctcggaggatgacgctaccatcgtgcacttggcgcgcatggtggaggcatacgacgcggctcgtatcgacttccatcagatggtgcgccgtgggatggtcgagaacaacttgaagatcctggagctgcgtcaagagaacctgcagctcaagaaggacctagacgcggtggaggcgcagctgcatcagctcaagatcgcccagggagaggtctgccgccccaagcgtcgccgcgtctgccgcagcctgaagatcaccgcccgcaagagcacctccaggcctgagcttgttcgtcagtccctggcgtggacctgcttcgtcgagacccctcgtgccgagcctgcgcccgtggttccccaggagggggaagcctccggcattggtagcacggaggatgcgctgttgctcaccttccgtcctggcccgtcgcagcggagaaatgctaacaccggtgatggcaaccaacctgaaggcagcaaccacaaccatcagggcaacccacctccacctcctcctccgcctccacccccaccaccagataccaacgccattctcacccaaatcctcgcccagcaggccaacatgatgactgctttcctccaccacctccaaaatccgccacaacttaatgctccaccaccacccccacaacactctaaactcgccgagtttctccgcatccgcccacctaccttctctagctccaacaaccccgtggatgcgttggattggttgcatgccgtgggaaaaaagctagacactgtgcagtgcagcgatgaggagaaggtcatcttcaccgcccaccagctgcagggacccgcatctctatggtgggaccatttccaggctacgcagccagagggacagcctattacatgggctcgcttcaccgccgctttccgaagaacccatgtgcccgccggagtcgtggcccttaagaaaagggaattccgagagttgaagcaaggcaaccgctccgtgatggagtatttgcacgagttcaacaacctggcccgttacgctccggaggatgtgcgggaagatgaggagaagcaagagaagttcctggcaggaatggaccctgagctgtccgtccgtctagtctctggggactatccggatttccaacgtctggtggacaagagcatccgcttggaagccaagcacaaggaactggagtcgcacaagcgccgcttggcgaatttccgcaatcaacagggtgctaaccaaagggtccgctacacaaatccctatccagggggatcctcctcgcagcagcagcaacctcgctccgcgcctcgacctcaattcgtgcctggtcaaggccgcagggacgctcaaggtccgcagcgtctgtgcttcaactgcttcgagcccgggcactttgcggataaatgcccgaagccaaggcgtcagcaaggccaagcgcctccccgccccaacaacggtggtaaggacgtcgttcggggtcgggtgaaccacgtgacggccgaggacgtgctgacaactccagacgtcatcgttggtacgttccccattcattccatccctgctaccattttgttcgactctggagcttcccactcgttcatatctgtgccattcgtggggagaaatcagttgggggtagaaaggcttagaaaccctctgctcatcaccacccctggaggggttatgacagcaaagtattatagccctgccgtccctatagaaattcaggggattccttttccctcggatctgattctgctagacaccaagaacttggatgtgatccttgggatgaattggttggctcaattccaaggagtagtggattgtgcgaggcgcactgtcactctgtaccgagggccggaacgaccggttgttttctttgcacccccaacctcagtcagaagttcagaacttcatcagatagaactgtcagaaattcccatcgtcagagagttcggagacgtgtttccggaagaactacctggtatgccgcctaagcgagagattgagttccggatagatcttgctccaggaaccgctcctctgtacaagcgaccctaccgtatggcagcaaatgaactggccgaagtcaagaaacagttggaagagttgaaagaaaaggggtatatacgtccgagtacttccccctggggtgctcctgtgatctttgtggagaagaaagacaagacgatgaggatgtgcgttgactacagagctctcaatgaagtcaccatcaaaaacaagtaccctcttccccggatcgatgatctgttcgatcagcttaaaggtgccactgtattctccaagatcgatcttcgttccggatatcaccaattacgtattcgtgaagaagatattccgaagaccgcattcaccacgcgatacggactgtatgaattcacggtgatgtcgttcggtttaaccaatgctcctgccttcttcatgaacttaatgaacaaagtgttcatggaatacttggataagtttgtggtggttttcattgatgacattctgatatactcacaatcagaggaagaccatcagcaccatctccgtctggtattgggaaagctgcgggaacatcaattgtatgccaaacttagcaagtgtgagttctggttgtccgaagtcaaattcttagggcacgtgatatctgctaaaggagttgctgtggaccccgaaacagtgaccgccgtcaccgattggaagcaacccaagacagtcactcaagttcgcagtttcttaggattggcaggatactaccggagattcatcgagaacttctccaaaatcgctcgacccatgacacagttgttgaagaaagaagagaaatttatgtggagcccgcaatgcgagaaggcgtttcaaactctcaaagaaaagctggtttcctcgccagtgttaatcttgccggatactcgcaaggacttcatggtgtattgtgacgcttcgcgccaaggattggggtgcgtgctcatgcaggatggtcatgtggtggcctatgcctcacgccagctacgacctcatgaaggcaactaccctacccatgatttggagttagcagcggtggttcatgctctaaaaatctggcggcactatctcattgggaatcactgtgaaatatatactgatcataagagtttgaaatacatcttcacccagtcggatctgaatcttcggcaaaggagatggttagaactcatcaaggattatgatgtgggaattcactatcatcctggtaaggccaacgtggttgccgacgctctaagtcgaaaaagccattgcaacactcttaacgtccgtggcattccacccgaacttaatcaacagatggaagccctgaacctaagcatagttagtcgtggattcttagctgcgctggaagccaagcccaccttgctcgatcaaatccgcgaggctcagaagaatgatccagacatgcatggactcctcaagaatatgaaacagggtaaagccgctggtttcacagaggatgaacacggaaccctatggaatggaaatcgggtatgcgttccagacgttcgggaacttaaacagttgatacttcaggaagctcacgaaagtcgttattccatccaccctggcagtacgaagatgtacttagacttgaaggagaaatactggtgggttagcatgaagcgggaaattgcagagtttgtggccctgtgtgatgtgtgccagcgtgtcaaggcagagcaccaacgaccggccggacttctccaacctctccaagtacctgaatggaaatgggatgaaattgggatggatttcatcaccggacttccaaaaacccaaggtggatatgattctatatgggtagttgtggatcgattaaccaaggtagctcgattcattcctgtgaagaccacctatggagggaacaaactagccgaactctacttcgctaggatcgtaagtctccatggcgttcccaagaaaatcgtatctgataggggaagccaattcacctctcacttttggaagaagctccaagaagagctgggtacccgattaaacttcagcaccgcgtatcacccgcagacagatgggcagaccgagcgtctaaatcagatcctagaagatatgcttcgcgcatgtgtcctggatttcgggaagacctgggataagagtctcccctatgccgagttctcctacaataacagctaccaagccagcatacaaatggcaccttatgaagcgttgtatgggcgcaaatgccggacaccgctaatgtgggatcaagttggggaaagccaagtgttcgggactgatatcctgagagaagctgaagctaaagtcagaaccattcgggataatctaaaggtggcacagtcccggcagaaaagttatgcagataaccgtcgccgtgacctggaattcgcagtggacgattttgtatatcttcgggtcacgccattgcgaggtgtacataggtttcggacaaaagggaagctcgcacctcggtatgtgggtcctttccgtatcgttgctcgacgcggagaagtcgcttaccaattggagctgcccgcctccttgggcaacgtgcatgatgtgttccatgtgtcgcaactcaagaaatgccttcgagtgccatccgagcaggccgactcagagcaaattgaagttcgcgaagatttgacctacgtggagaggccagtgaaaatcctggacaccatggagcgcaggaccaggaaccgggtaatccgtttttgcaaggtccagtggagcaaccacgccgaagaagaagctacctgggagcgcgaagacgagctgaaggcagcccatcccgatctcttcgccagttcttccgaatctcggggtcgagattccgtttaa

SEQ ID NO: 14289 - DNA, 4695 bp, Oryza sativa
  Clone ID: TFbOSC900319j.C1.o26.fg
atggatactacgtcacttccctgccacgagctcattgagggtaccccatctcatccactgcacatgtgctcctacctccttgatgccacaggttggggagaagggcaacaaggtaggaggaggtcgtcggcaagccaaaatatgaccggtgagaggctaacccatcgtgtggagtctgttatgagggtatccgagtttagctcgttgcccgcgtcttgtgctgggagctcggatcacgtcgtgtggttgtggggatggacgcagctagagcatggcgtgagaagtggtcttggtggtttagccacacgatcgctggggaaattcctaacaattggtatcagagcacggtttaggaagtggactcgtgaccgcgcattggaaggcgtcttcatgccgcgtcgtcgctcgtcgtcaccgatcgtgcgcactcctcatgactccggcggccgcgccacgggcagcggcgggggtgaccgcgggctggtgatccaccgcgtggtgaaagaaggaggcggctcggtgaactacccgctgctgaccaagaccaactacaacgactgggcgctactgatgaagatcaagctgcaggctcgctgcctgtgggcggcgatcgagcccgacggcgtggacgtccctctgcatgaggaccggatggctcttgacgctatctgcagtgccgtgccgccggagatgattggcaccctggcgaccaaagcgtcggcccgggaagcctgggaatgcatcaagacaatgcgagtcggcaacgaccggattcgcaaggcgagtgcacagaaagtgcgctctgagtatgaatcgcttgcgttccgcggtgacgagaccgtggaagatttcgctctacggctcacaaccatcgtcaaccaacttgcaaccctcggtgatcctgaacctgctgataaagtcgtcgaaaagtaccttcgggtagctcgtcccaggttcaatcaactcatcttgtctattgaaactcttctcgatatctctactctgtccatggaggaagttactggcagactaaaagccgctgaggattctgggcaatcctcgtcgcacaccgccgatgggaagctgtacctaactgaggaggagtgggctgaacgtcagaagaagaaggatcaagaggcaaagcggggtgactcgggcggctctggcggccgcggcaagcgccgtggcgggagagggcgcactggtggcggcgggactgcgagccccgagagcacgaactctggttcggcgcgcaagggagacaaattccgaaattgcggcaaacttgggcactgggcgaaggactgcaggagcaagtccaagcgcgaagaacaggctcacgtcgcccaggaggatgaagaagagcacaccttgatgttgctcaccggcggctgcgttgacacggtcgacgcggcggcaccggagggcgacacgcccacaccgccccaccaagccgtggtggaactcgtggagatgaaagtatttgcagcgctcgacgacgcggctgaccatgatcccgggcgctggattatggattccggcgcgtcaaaccatatgacgggcagcaggatggcgttcgccgacctcgacacgaacatcaccgggaacgtgcgactcggcgatggatccgtggtccggatcgcaggacggggcacaattctctttgcctgcaagaatggtgagcaccgcactctgtcgaacacctattatcttccccgtcttgctgccaatattatcagcattgggcaattggatgagaccggcttcaaagtgctggcagaggatggcatcatgcgggtctgggatgagcagcggcgtctgcttgcccggatccctcgcaccccagggcgactgtacatgcttgacatcaacctggcgcgcccggtctgtttggcggcacacgccgacgaagacgcgtggcgctggcatgctcgcctcgggcacataaacttcagggcgctctgcaagatgggaaaggaggagctggtacgtggtctaccatgtttgtcacaggttgatcaggtctgtgaggcctgtctcgccaggaaacaccggaggtcgccgttcccgcggcaggcactttgccggtctgacgagccgctggcgctgctacatggagatctctgtggaccgatcacgccggcgacacccagtggcaaccgctatttccttctactcgtcgacgactacagccggtacatgtgggtcgccctcctctccaccaaagatgcggcgccggctgccatcaagcgtattcaggcggtggcagaaaggaagagtggacgcaagctccgcgcgttgcggacggatcgcgggggagaattcacgtctacacagttcgccgagtactgcgccgagctgggaatgcggcgcgagctcacggcgccctactctccgcaacagaacggcgttgtcgagcggcgaaaccaatccgtggtgggcacggcgcggagtatgctcaaggtgaaggggctgccaggtatgttttggggagaggcgataaataccgccgtgtatctgctcaacaggtcgtcgtccaagggtatcggcggcaagaccccgtacgcgctgtggaacggcgttccgccggccgtgcaccatctgcgcacgtttgggtgtgtggcacacgtgaagacgaccaccccgaacctgaagaaactggatgacaggagtcgtccaatgatctttgtcggctacgagccggggtccaaggcgtatcgcgcctatgatccggctactcggcgtgttcacatctcccgtgacatcgtcttcgacgaagcagcccagtgggactgggatgctgaggcggccgctgatctcgacaccgacttcgtcgttgagtacaccacggtgtaccatcctggctcgctgtcaggaacacgccaagacgctggggagccgcctgctcgatcttcatcatcgccgcaaacgccatcagactcaccgacagccggccgaacaccttcggtgcatggcgatgcgccggcggttgaatttgtgtcgccaccaactggagcagctgctaatcttgatgcagaccacgacgacgcaccactccgtttccgcacgatggacaatgtgctggggccggccatgctgccaggtctcgctaatcgtgaggtccaggaagagctgatgatggtgagcggagaagaaccggcaacgttcgctcaagctgaacgcgacgaggattggcgtcgggcaatgctcgatgaaatctcttcgatagaggagaacaagacctggaggctcgtcgatctgccttcgggacatcggccaattgggctgaaatgggtgtataaactgaagaaagatgctcagggcgtcgtcgtcaaacacaaggcgagattggtggcaaagggctacgtgcagagggctggaattgactttgatgaggtattcgctcctgttgctcgtcttgattctgttcgtttgttgctcgctctcgctgcgcaggaaggttggatggtgcatcatatggacgttaaatcagcgttcctcaatggggaactgattgaggaggtgtatgttgttcagccaccggggtttgagatcgatggacaggagaacaaggtttacaggcttgataaggcgctgtatggtcttcgccaagcacccagagcttggaacaccaagctagactgcacactgaagaaacttggcttcaagcagagcccgttggagcatgggctgtacgcgcgcggcgatggcagtgggcgactgctcgtcggtgtgtatgtggatgatctggtaattgtcgggggtgacagtggcatgatcaagggattcaaagagcagatgaaggctgaatttaagatgagtgatcttggtcctttgagtttttatcttgggatcgaggtacatcaagaagctggaatcatcactttaaagcaagcagcgtatgcgtcgcgtattgtggagaaggctgggctcaccggctgcaacccctgtgcaacaccgatggaaccacgtctaaagctgagcaaggaaagtgcaggatcgctagttgatgcgacagaatacagaagtctagtgggaagcttgcgctatctggtgaacacccgaccagaccttgcatattcggttggttatgtcagtcgtttcatggagaaacccacggacgaacacttggcggcagtgaagcgcatcataaggtatgttgctggtaccattcatcttgggtgccgctatgtgaaggaagttgaaggaggactgcagggttacagtgacagtgatatggctggagacattgacactcgcaagagcaccacaggagtaattttctttctcggcaaaaatcctgttagctggcagtctcaaaaacagagagttgtagcactctcctcctgtgaatctgagtatattgcagctgcaacagctgcatgccagggcatttggcttgcccggctcctcggtgacctcaggaatgcagcaactgaagtcgtcgatctcagggtggacaaccaatccgctctggccctgatgaagaaccctgtttttcacgatcgaagtaagcacattcaaacaaaatttcatttcattcgtgaagccgtggagaatggggaaatcacaccgagttacatcggcacagaagggcaacttgcagatatcctgacgaagccgctttctcgaatcaagtttcaggagctgcgggaaaaaagaaggaactatatacatacatgtgtattctcctaa

SEQ ID NO: 14290 - DNA, 4158 bp, Oryza sativa
  Clone ID: TFbOSC900321j.C1.o10.fg
atgtcgtggcacagggccggtgtcctgctgctaggggctcagtcctgcctgcctgtccagggggttccggccgtaggtgggattgggtcggtactcttgtctatggctaggatgggttggaaactatgtcacgttttccgtctgtataccgtggtggctacgcagccagaggggcagcctattacttgggcccgcttcaccgccgccttccggaggacccatgtgcccgccggagtcatggcccttaagaaaagggagttccgagagttgaagcaaggcaaccgctccgtgatggagtatttgcatgagtttaacaacttggcccggtacgccccggaggatgtgcgggaagatgaggagaagcaagagaagttcttggcaggaatggacccggagctgtctgtccgtctagtctccggtgactatccggatttccaacgtctggtggacaaaagcatccgcttggaagccaagcacaaggaactggagtcgcacaagcgtcgcttggcgaatttccgcaaccaacagggtgctaaccaaaggatccgctacaccaatccctatccagggggatcttcctcgcagcagcagcaacctcgctccgcgcctcgacctcaattcgtggtgcgcgtcccacagccgcagcaacagcagagccagcaagggacccatgcgccccgtcctcctacgccagccgcgcagtctggtcaaggccgcagggacgttcaaggtccgcagcgtctgtgcttcaactgcttcgagcccgggcactttgcggataaatgcccgaagtcgaggcgccagcaaggccaagcgcctccctgctccaacaacggtggtaaggatgtcattcggggtcgtgtgaaccacgtgacggccgaggacgtgctgacaactccagacgtcatcgttggtacgttcctcatccattccatccctgctaccattttgttcgactctggagcttcccactcgtttatatctgtgccattcgtggggagaaatcagttgggggtagaaaggcttaggaaccctctactcatcaccacccctggaggggttatgacagcaaagtattatagtcctgccgtccctatagaaattcaggggattccttttccctcggatctgattcttctagacaccaagaacttggatgtgatccttgggatgaattggttggctcaattccaaggagtagtggattgtgcaagacgcactgtcactctgtaccgagggccggaacaaccggttgttttctttgcacctccaacctctgtcagtagttcagaacttcatcagataggactgtcagaaatccccattgtcagagagttcggagacgtgtttccggaagaactacccggtatgccgcccaagcgagagattgagttccggatagatcttgctccaggaaccactcctctgtacaagcgaccctaccgtatggcagcaaatgaactggccgaagttaagaaacagttggaagagttgaaagaaaaggggtatatacatccgagaacttccccctggggtgctcctgtgatttttgtggagaagaaagacaagacgaagaggatgtgcgttgactacagagctctcaatgaagtcaccatcaaaaacaagtaccctcttccccggatcgatgatctgttcgatcagcttaaaggtgccacggtattctccaagattgatcttcgttctggatatcaccagttgcgcatccgtgaagaagatattccgaagaccgcattcaccacgcgatacggactgtatgaattcacggtgatgtcgttcggtttaaccaatgctcctgccttcttcatgaacttaatgaacaaagtgttcatggaatacttggataagtttgttgtggttttcattgatgacattctggtatactcacaatcagaggaagaccatcagcaccatctccgtctggtgttgggaaagttgcgggaacatcaattgtacgccaaacttagcaagtgtgagttctggttgtccgaagtcaaattcttagggcacgtgatatccgctaaaggagttgctgtggatcccgaaacagtgaccgccgtcaccgattggaagcaacccaagacagtcactcaaattcgcagtttcttaggtttggcaggatactaccggaggttcatcgagaacttctccaaaatcgctcgacccatgacacagttgttgaagaaagaggagaaatttgtgtggagcccgcaatgcgagaaggcgttcaaaactctcaaagaaaagctggtttcctcactagtgttaatcttgccggatactcgcaaggacttcatgctacggcctcatgaaggcaactaccctacccatgatttggagttacccgcggtggttcatgctctaaaaatctggcggcactatctcattgggaatcgctgtgaaatatatactgatcataagagtttgaaatacatcttcacccagtcggatctgaatcttcggcagaggagatggttagaactcatcaaggattatgatgtgggaattcactatcatcctggtaaggccaacgtggtcgccgacgctctaagtcgaaaaagccattgcaacactcttaacgtccgtggcattccacccgaacttaatcaacagatggaagccctgaatctaagcatagtgggtcgcggattcttggctgcgttggaagccaagcccaccttgctcgatcaaatccgcgaggctcagaagaacgatccggacatgcatggactcctcaagaatatgaaacaaggtaaagccgctggtttcacagaggatgaacacggaaccctatggaacggaaatcgggtatgcgttccagataacagagaacttaaacagctgatacttcaggaagctcacgaaagtccttattccatccaccctggcagtacgaagatgtacttagacttgaaggagaaatactggtgggttagtatgaagcgggaaattgcagagttcgtggccctttgtgatgtgtgccagcgtgtcaaggcagagcaccaacgaccggccggacttctccaacctctccaagtaccagaatggaaatggaatgaaattgggatggatttcatcaccggacttccaaaaacccaaggtggatatgattctatatgggtagttgtggatcgattaaccaaggtagctcgatttattcatgtgaagaccacctatggagggaacaaactagccgagctctacttcgctaggatcgtgagtctccatggcgttcctaagaaaattgtatccgataggggaagccaattcacctctcacttttggaagaagctccaagaagagctgggtacccgattaaatttcagcaccgcgtatcacccgcagacagatggacagaccgagcgtctaaatcagatcctagaagatatgcttcgcgcatgtgtcctagatttcgggaatacctgggataagagtctcccctatgccgagttctcctacaataacagctaccaagccagcatacaaatggcaccttatgaagcgttgtatgggcgcaaatgccggacaccgctattgtgggaccaagttggggaaagccaagtgttcgggaccgatatcctgagagaagctgaagctaaagtcagaaccattcgggataatctaaaggtggcccagtctcggcagaagagttatgcagacaaccgacgccgtgacctggaattcgcagtggatgactttgtgtatcttcgggtcacgcccttgcgaggtgtacacaggtttcagacaaaggggaagctcgcacctcggtttgtgggtcctttccgtatcattgctcggcgcggagaagtcgcttaccagttggagctgcccgcctccttgggcaacgtgcatgatgtgttccatgtgtcgcaactcaagaaatgtcttcgagtgccatccgagcaggccgactcagagcaaattgaagttcgcgaagacttgacctacgtggagaggccagtgaaaatcctggacaccatggagcgaaagaccaggaaccgggtaatccgtttttgcaaggtccaatggagcaaccacgccgaggaagaagctacttgggagcgtgaagacgagctgaaggcagcccatcccgatctcttcgtcagttcttccgaatctcggggtcgagattccgtttaa

SEQ ID NO: 14291 - DNA, 5490 bp, Oryza sativa
  Clone ID: TFbOSC900321j.C1.o18.gm
atggcggccggatcttccgcgccgtttccccctcgtccggccgctctgtccccctcccgaccctatataaaccctccccgtgcctccctccaccgttttcgccactcgccgctctctctccccgccggaatcgagctcgcgccgtcgccctctctctccgtcgtcgccgccgagctccggtccgccgccgttgtcgccccggaccacctctcccctcggcgccgcctccttcggcttcgccgcatccccggcgaccttgtccacccctccgtttcgctcgccgaccgccggagcaccgtcgaccccatccacccgagccgcgccaccgccttcctccgctccggtcgccgtttccgtcgtcgccgtcgacccggggtgagccgtggaccgccgcttcttttcccccttcccttcccctctctcggccgccgctccgccgtgcctatggccgccgccggcgaccataggggcgcgggcgtgctgcctcccgccgctgcgccggcgtggccgccttcgggcgcaccgtgcggctgccgcgtggggcccggctatcagccgcccgcgccctcggcacctcggccatataaggaccggtcttcgggcctctgttgcaaagcactaccgtacttccacatgtctagtgggacaaatgaaggctacacgagctgcggcccggtagtcgagatgtcatggcacagggctggtgtcctgctgctaggggctcaatcctgcctacctgtcccggaggttccggccgtaggtgggattgggtcgatggccggcagcgtcagtcgtcgtggtctggacatgactggtttcgtcttggagctgcggggtatgtgcgttgtcctggggtatccgcatggactggactaccagggcaggccgctcccggagcaggaggtcaccgcgggtggagattctttctccgccgcttgccagagcgccgctctcctcgccatcagcactcttcaccagcgctacccggacgagctgcagcactcgccctaccgctaccaccctcgtcgcggaggagcccgcgactacgccaccttccgggatgctagctcggaggatgacgctaccatcatgcacctggcgcgcatggtggaggcgtacgacgcggctcgtatcgacttccatcagatggtgcgccgtgggatggtcgagaacaacctgaagatcctagagctgcgtcaggagaatctgcagctgaagaaggacctagacgcagtggaggcacagctgcatcagctcaagatcgcccagggagaggtctgtcaccccaagcgtcgccgcgtctgccgcagccagaagatcaccgcccgaaagagcacctccaggcccgagcttgttcgtcagtccctggcgtggacttgcttcgtggagacccctcgtgccgagcccgcgcccgtggttcctcaggagggggaagcctccggcgtcggtagcacggaggatgcgctgttgctcaccttccgtcctggcccgtcgcagcgctccaacaaccccgtggatgtgttggattggttgcatgccgtggggaaaaagctagacactgtgcagtgcagcgatgaggagaaagtcgtcttcgccgcccaccaactgcagggacccgcatctctatggtgggatcatttccaggctacgcagccagaggggcagcctattacttgggcccgcttcaccgccgccttccggaggacccatgtgcccgccggagtcatggcccttaagaaaagggagttccgagagttgaagcaaggcaaccgctccgtgatggagtatttgcatgagtttaacaacttggcccggtacgccccggaggatgtgcgggaagatgaggagaagcaagagaagttcttggcaggaatggacccggagctgtctgtccgtctagtctccggtgactatccggatttccaacgtctggtggacaagagcatccgcttggaagccaagcacaaggaacttgagtcgcacaagcgtcgcttggcgaatttccgcaaccaacagggtgctaaccaaaggatccgctacaccaatccctatccagggggatcttcctcgcagcagcagcaacctcgctccgcgcctcgacctcaattcgtggtgcgcgtcccacagccgcagcaacagcagagccagcaagggacccatgcgccccgtcctcctacgccagccgcgcagtctggtcaaggccgcagggacgttcaaggtccgcagcgtctgtgcttcaactgcttcgagcccgggcactttgcggataaatgcccgaagtcgaggcgccagcaaggccaagcgcctccagacgtcatcgttggtacgttcctcatccattccatccctgctaccattttgttcgactctggagcttcccactcgtttatatctgtgccattcgtggggagaaatcagttgggggtagaaaggcttaggaaccctctactcatcaccacccctggaggggttatgacagcaaagtattatagtcctgccgtccctatagaaattcaggggattccttttccctcggatctgattcttctagacaccaagaacttggatataggactgtcagaaatccccattgtcagagagttcggagacgtgtttccggaagaactacccggtatgccgcccaagcgagagattgagttccggatagatcttgctccaggaaccactcctctgtacaagcgaccctaccgtatggcagcaaatgaactggccgaagttaagaaacagttggaagagttgaaagaaaaggggtatatacgtccgagtacttccccctggggtgctcctgtgatttttgtggagaagaaagacaagacgaagaggatgtgcgttgactacagagctctcaatgaagtcaccatcaaaaacaagtaccctcttccccggatcgatgatctgttcgatcagcttaaaggtgccacggtattctccaagattgatcttcgttctggatatcaccagttgcgcatccgtgaagaagatattccgaagaccgcattcaccacgcgatacggactgtatgaattcacggtgatgtcgttcggtttaaccaatgctcctgccttcttcatgaacttaatgaacaaagtgttcatgaaatacttggataagtttgttgtggttttcattgatgacattctggtatactcacaatcagaggaagaccatcagcaccatctccgtctggtgttgggaaagttgcggaaacatcaattgtatgccaaacttagcaagtatgagttctggttgtccgaagtcaaattcttagggcacgtgatatccgctaaaggagttgctgtggatcccgaaacagtgaccgccgtcaccgattggaagcaacccaagacagtcactcaaattcgcagtttcttaggtttggcaggatactaccggaggttcatcgagaacttctccaaaatcgctcgacccatgacacagttgttgaagaaagaggagaaatttgtgtggagtccgcaatgcgagaaggcgttcaaaactctcaaagaaaagctggtttcctcgccagtgttaatcttgccggatactcgcaaggacttcatggtgtattgtgacgcttcgcgccaaggattggggtgcgtgctcatgcaggacggtcatgtggtggcctatgcctcacgccagctacagcctcatgaaggcaactaccctacccatgatttggagttagccgcggtggttcatgctctaaaaatctggcggcactatctcattgggaatcgctgtgaaatatatactgatcataagagtttgaaatacatcttcacccagtcggatctgaatcttcggcagaggagatggttagaactcatcaaggattatgatgtgggaattcactatcatcctggtaaggccaacgtggtcgccgatgctcaaagtcgaaaaagccattgcaacactcttaacgtccgtggcattccacccgaacttaatcaacagatggaagccctgaatctaagcatagtgggtcgcggattcttggctgcgttggaagccaagcccaccttgctcgatcaaatccgcgaggctcagaagaacgatccggacatgcatggactcctcaagaatatgaaacaaggtaaagccgctggtttcacagaggatgaacacggaaccctatggaacggaaatcggagttcgtggccctttgtgatgtgtgccagcgtgtcaaggcagagcaccaacgaccggccggacttctccaacctctccaagtaccagaatggaaatgggatgaaattgggatggatttcatcaccggacttccaaaaacccaaggtggatatgattctatatggcaccgcgtatcacccgcagacagatggacagaccgagcgtctaaatcagatcctagaagatatgcttcgcgcatgtgtcctagatttcgggaagacctgggataagagtctcccctatgccgagttctcctacaataacagctaccaagccagcatacaaatggcaccttatgaagcgttgtatgggcgtaaatgccggacaccgctattgtgggaccaagttggggaaagccaagtgttcgggaccgatatcctgagagaagctgaagctaaagtcagaaccattcgggataatctaaaggtggcccagtctcggcagaagagttatgcagacaaccgacgccgtgacctggaattcgcagtggatgactttgtgtatcttcgggtcacgcccttgcgaggtgtacacaggtttcagacaaaggggaagctcgcacctcggtttgtgggtcctttccgtatgattgctcggcgcggagaagtcgcttaccagttggagctgcccgcctccttgggcaacgtgcatgatgtgttccatgtgtcgcaactcaagaaatgtcttcgagtgccatcccagcaggccgactcagagcaaattgaagttcgcgaagacttgacctacgtggagaggccagtgaaaatcctggacaccatggagcgaaggaccaggaaccggtccaccgccgtcgtcgccccggaccttctcccgcttcggcgccgcctccttcggtttcgccgcaacctcgccgacctcgtccacccctccgtttcgctcgccgaccgccggaacgccgccgtccccgtctacccgagccgcgccgccgccttcctccgctccggtcgccgttcccgttgtcgccgtcgacccggggtgagctgtggaccgccgattcgtttcccccttcccttccctctctcgggcgccgctccgccgcgccggtggtcgccggcggcgaccatcgtggcgcgggtgcgccgcctcccgtcggctgtgccggcgtggccgccttcgggcgcgccccgcggctgccatgtggggcccggccgtcagccgcccgcgccctcggacgctgcagcttcggaagatccgctcttcgtggaggttgaagccgacgtttgggaaagcgagcaaggcaagtcacatcatctttga

SEQ ID NO: 14292 - DNA, 5262 bp, Oryza sativa
  Clone ID: TFbOSC900325j.C1.o13.fg
atgtcatggcacagggccggtgtcctgctgctaggggctcagtcctgcctacctgtcccgggggttccggccgtaggtggggttgggtcggtactcttgtctatggctaggatgggttggaaactatgtcacgtcttccgtccgtataccgtggtgatggccggcagcatcaaccgtcgtggtctggacctgactggcttcgctttggagctgcggggcatgtgcgttgtcctggggtatccgcatggggtggactaccagggcaagcagctcccggagcaggagggtgacgatgcagagccccacgctacttgggaggttactgtagtgatcctcactggctcacccgagaggacttcgttggcagtcaccgcggatggtgcgtcgtgggttggtcgagaacaacaagcagatcctggagctgcattaggagaatctgcagctgaagaaggacctagacgcagtggaggcgcagctgcgtcagctcaagatcgcccagggagaggtctgtcgccccaagcgtcgccgcgtctgccgcagcctgaagatcaccgcccgcaagagtacctccaggcccgagcttgttcgtcagtccctggcgtggacctgcttcgtcgagacccctcgtgccgagcccgcgcccatggttcctcaggaggatggagcctccggcgttggcagcacggaggatgcgctgctgctcaccttccgccctggcccgtcgcagcagtagacgagcagttagtaggattgcgtatggtgacaaccaggagaagtgctgttaccggtgaaggcagtcaccccgaaggcagcaaccacaacaaccatggcagcccacatccacctcctcctccgcctccaccaccaccaccagacaccaacgccattctcactcaaatcctcgcccagcaggccaacatgatggctgctttcctccaccacatccaaaatctgccacaacataatgctccaccaccacccccacaacactctaaactcgccgagttcctccgcatccgtccacctaccttcgctagctccaataaccccgtggatgcgttggattggttgcatgccgtggggaaaaagttagacaccgtgcagtgcagcgatgaggagaaagtcatcttcgccgctcaccaactgcaggggcccgcatctctatggtgggaccatttccaggctacgcagccagaagggcagcctattacttgggcccgcttcaccgccgctttccggagaacccatgtgcctgccggagtcatggcccttaagaaaagggaattccgagagctgaagcaaggcaaccgctccgtgatggagtatttgcatgagtttaacaacctggcccggtatgccccggaggatgtacgggaagatgaggagaagcaagagaagtttttggcaggaatggaccctgagctgtccgtgcgcctggtcttcggggactattcggatttccaacgtctggtggacaagagcatccgcttggaagtcaagcacaaggaactggagtcgcacaagcgtcgcttggcgactttccgcaatcaacagggggctaaccaaagggtccgctacaccaatccctatccagggggatcgtccttgcagcagcaacctcgctccgcgccccgacctcaattcgtggtgcgcgtcccacagccgcagcaacagcagagtcagcaagggactcgtgcgccccgtcctcctacgccagccatgcagcctggtcaaggccgcggggacgttcaaggtcagcagcgtctgtgcttcaactgcttcgagcctgggcactttgcggataaatgcccaaagccgcggcgccagcaaggccaagcgcctccccgccccaacaacggtggtaaggatgtcattcggggtcgggtgaaccacgtgacggccgaggacgtgctgacaactccagacatcatcgttggtacgttcctcattcattccatccctgctaccattttgttcgactctggagcttcccactcgtttatatctgtgccattcgtggggagaaatcagttgggggtagaaaggcttaggaaccctctgctcatcaccacccctggaggggttatgacagcaaagtattatagccctgccgttcctatagaagttcagggaattccttttccctcggatctgattcttctagacaccaagaacttggatgtgatccttgggatgaattggttggctcaattccaaggagtagtggattgtgcaagacgcaccgtcactctgtaccgagggccggaacaaccagttgttttctttgcacccccaacctctgtcggtagttcagaacttcatcagataagactgtcgaaaatccccatcgtcagagagttcggagacgtgtttccggaagaactacctggtatgccgccgaagcgagagattgagttccggatagatcttgctccaggaaccactccccagtacaagcgaccctaccgtatggcatcaaatgaactggccgaagtcaagaaacagttggaagagttgaaagaaaaggggtatatacggccgagtacttccccctggggtgctcctgtgatttttgtggagaagaaagacaagacaaagaggatgtgcgttgactacagagctctcaatgaagttaccatcaaaaacaagtaccctcttccccggatcgatgatctgttcgatcagcttaaaggtgccactgtattctccaagattgatcttcattccggatatcaccaattacgtattcgtgaagaagatatccctaagaccgcattcaccacgcgatacggactgtatgaattcacggtgatgtcgttcggtttaaccaatgctcctgccttcttcatgaacttaatgaacaaagtgttcatggaatacttggataagtttgttgtggtttttattgacgacattctggtgtactcacaatcagaggaagaccatcagcaccatctccgtctggtgttgggaaagttgcgggaacatcaattgtatgacaaacttagcaagtgtgagttttggttgtccgaagtcaaattcttagggcacatgatatctgctaaaggagtcgctgtggaccccgaaacagtgaccgccgtcactgattggaagcaacccaagacagtcactcaaattcgcagcttcttgggtttggcaggatactaccggaggttcatcgagaacttctccaaaatcgctcgacccatgacacagttgttgaagaaagaagagaaatttgtgtggagcccgcaatgcgagaaagcgttccaaactctcaaagaaaagctggtttcctcgccagtgttaatcttaccggatactcgcaaggacttcattgtgtattgtgacgcttcgcgccaaggattggggtgcgtgctcatgcaggaaggtcaggtggtagcctatgcctcacgccaactacggccccatgaaggcaattaccctacccatgatttggagttagccgctgtggttcatgctctaaagatctggcagcactatctcattgggaatcgctgtgaaatatatactgatcataagagtttgaaatacatcttcactcagtcggatctgaatcttcggcagaggagatggttagaactcatcaaggattatgatgtgggaattcactatcatcctggtaaggccaacgtggtcgccgacgctctaattcgaaaaagccattacaacactcttgacgtccgtggcattccacccgaacttaatcaacagatggaagccctgaacctaagcatagttggtcgtggattcttggctacgctggaagccaagcttaccttgctcgatcaaatccgcgaggctcagaagaatgatccggatatgcgtggactcctcaagaatatgaaacagggtaaagccgctggtttcacagaggatgaacacggaaccctatggaacggaaatcgggtatgtgttccagacgacagagaacttaaacagctgatacttcaggaagctcacgaaagtccttattccatccaccctggcagtacgaagatgtacttagacttgaaagagaaatactggtgggttagtatgaagcgggaaattgcagagttcgtggccctttgtgatgtgtgccagcgtgtcaaggcagagcaccaacgaccggccggacttctccaacctctccaagtaccagaatggaaatgggatgaaattgggatggatttcatcaccggacttccaaaaacccaaggtggatatgattctatatgggtagttgttgaccgattaaccaaggtagctcggttgattcctgtgaagaccacctatggagggaacaaactagccgagctctacttcgctaggatcgtgagtctccatggcgttcctaagaaaattgtatctgataggggaagccaattcacctctcacttttggaagaagctccaagaagagctgggtacccgattaaatttcagcaccgcgtatcacccgcagacagatggacagaccgagcgtctaaatcagatcctagaagatatgcttcgtgcatgtgtcctagatttcgggaagacctgggataagagtctcccctatgccgagttctcttacaataacagctaccaagccagcatacaaatggcaccctatgaagcgttgtatggacgcaaatgccggacaccgctattgtgggaccaagttggggaaagccaagtgttcaggactgatatcctgagagaagctgaagctaaagtcagaaccattcgggataatctaaaggtggcacagttccggcagaagagttatgcagataaccgacgccgtaatctgaaatttgcagtggacgattttgtgtaccttcgggtcacgccattgcgaggtgtacacaggtttcagacgaaagggaagctcacacctcggtttgtaggtcctttccgtatcattgctcgacgcggggaagtcgcttaccagttggagctgcccacctccttgggcaacgtgcatgatgtgttccatgtgtcgcaactcaagaaatgtcttcgagtgccatccgagcaggccgattcagagcaaattgaagttcgcgaagacttgacctacgtggagaggccagtgaaaatcctggacaccatggaacgcaggaccaggaaccgggtaatccctttttgcaaggtccaatggagcaaccacgctgaggaagaagctacttgggagcgtgaagacgagatgaaagcagcccatcccgatcttttcgccagttcttccgaatctcggggtcgagattccgtttaa

SEQ ID NO: 14293 - DNA, 3144 bp, Oryza sativa
  Clone ID: TFbOSC9333j.C1.o2.gm
atggttatgccgatggtgacgaccagaagaaatgctgccaccggtgatggcaaccaacccgaaggcagcaaccacaaccaccagggtaacccacctccacctcctcctccgcctccaccaccaccaccagacaccaacgccattctcacccaaatcctcgcccagcaagccaacatgatgactgctttcctccaccacctccaaaatccaccacaacataatgctccaccacctccccaacactctaaactcgccgagttcctccgcatccgcccacctaccttctctagctccaacaaccccgtggatgcgttggattggttgcatgccgtggggaaaaagctagacacggtgcagtgcagcgatgaggagaaagttatcttcgccgcccaccagctgcagggacccgcatctctatggtgggaccatttccaggctacgcagccagaggggcagcctattacttgggcccgcttcaccgccgctttccgaagaacccatttcaataacctggcccgttacgctccagaggatgtgcgggaagatgaggagaaacaggagaagttcttggcaggaatggaccccgagctgtccgtccgtctagtctccggggactatccggatttccaacgactggtggacaagagcatccgcttggaagccaagcacaaggaactggagtcgcacaagtgccgcttggcgaatttccgcaatcagcagggtgctaaccagagggtccgctacaccaatccctatccagggggatcctcctcgcagcagcaacaacagcagcagcagcaacctcgctccgcgcctcgacctcaattcgtggtgcgcatcccacagccgcagcagcagcagaatcaacaagggactcgtgcgccccgtcctcctacgccaactgtgcagcctggtcaaggccgcagggacgctcaaggtcagcagcgtctgtgcttcaactgcttcgagcccgggcactttgcggataaatgcccaaagccaaggcgtcagcaaggccaagcgcctccccgctccaacaacggcgggaaggatgtcattcggggtcgtgtgaaccacgtgacggccgaggacgtgctgacaactccagacgtcatcgttgaactgcatcagattggactgtcagaaatccccattgtcagagagttcggagacgtgtttccggaagaactacctggtatgccgcccaagcgagagattgagttccggatagatcttgctccaggaaccactcctctgcataagcgaccctaccgtatggcagcaaatgaactggccgaagtaaagaaacagttggaagagttgaaagaaaaggggtacatacgcccgagtacttccccatggggtgctcctgtgatttttgtagagaagaaagacaagacgaagaggatgtgcgtcgactacagagctctcaatgaagtcaccatcaaaaacaagtaccctcttccccggatcgatgatctgttcgatcaacttaaaggtgccactgtattctccaagattgatcttcgttccggatatcaccaattacgtattcgtgaagaagatattccgaagaccgcattcaccacgcgatacgggctgtatgaattcacggtgatgtcgttcggtttaaccaatgcacctgccttcttcatgaacttaatgaacaaagtgttcatggaatacttggataagtttgttgtggttttcattgatgacattctgatatactcacaatcagaggaagaccatcagcaccatctccgtctggtgttgggaaagttgcgggaacatcaattgtatgccaagcttagcaagtgtgagttctggttgtccgaagtcaaattcttagggcacgtgatatcagctaaaggagttgctgtggaccccgaaacagtgaccgccgtcaccgattggaaacaacccaagacagttactcaagtccgcagtttcttaggtttggcaggatactaccggagattcatcgagaacttctccaagatcgctcgacccatgacacagttgttgaagaaagaagagaaatttgtgtggagcccgcaatgcgagaaggcgtttcaaactctcaaggaaaagctggtttcctcgccggtgttaatcttgccggatactcgcaaggacttcatggtgtattgtgacgcttcgcgccaaggattggggtgcgtgctcatgcaggacggtcatgtggtagcctatgcctcacgtcagctacgacctcatgaaggcaactaccctacccatgatttggagttagcagcggtggttcatgctctaaaaatctggcggcactatctcattgggaatcgctgtgaaatctatactgatcataagagtttgaaatacatcttcactcagtcggacctgaatcttcggcaaaggagatggttagaacttatcaaagactatgatgtgggaattcactatcatcctggtaaggccaacgtggttgccgacgctctaagtcgaaagagccattgcaacactcttaacgtccgtggcattccacccgagcttaaccaacagatggaagccctgaacctaagcatagttagtcgtggattcttggccgcgttggaagccaagcccaccttgctcgatcaaatccgcgaggctcagaagaacgacccggacatgcatggactcctcaagaatatgaaacagggtaaagccgctggtttcacagaggatgaacacggaaccctatggaacggaaagcgggtatgcgttccagataacagagaacttaaacagctgatacttcaggaagctcacgaaagtccttattccatccaccctggcagtacgaagatgtacttagacttgaaggagaaatactggtgggttagtatgaagcgggagattgcagagtttgtggccctacgtgatgtgtgccagcgtgtcaaggcagagcaccagcgaccggccggacttctccaacctctccaagtacctgaatggaaatgggatgaaattgggatggatttcatcaccggacttccaaagacccaaggtggatatgattctatatgggtagttgtggatcgattaaccaaggtagctcgattcattcctgtgaagaccacctatggagggaacaaactagcggagctctacttcgctaggatc

SEQ ID NO: 14294 - DNA, 5473 bp, Oryza sativa
  Clone ID: TFbOSC9352j.C1.o1.np
acgagccttagatcccaagccttagcaatattttcaaaactaaaaatcctgtcttaattgtgaaaaccctctagtctctctctgtcctgctgcttcatttatcgccaaaatctgacttttaaatgttgcttttctttttgtttttgtttgtagatggccggcagcatcagccgtcgtggtctggacctgactggtttcgtcttggagctgcggggcatgtgcgttgtcctggggtatccgcatggagtggactaccagggcaggctgctcctggagcaggagggtgacgatgcagagccccacgctgcttgggaggttactgcagtgatcctcactggctcacccgagaggacttcgttggcagtcaccgcgggtggagattctttctccgccgcttgccagaacgccgctctcctcgccatcggcactcttcaccagcgctacccggacgagttgcagcactcgccctaccgctaccaccctcgccgcggaggagcccgcgactacgccaccttccgggatgctagctcggaggatgacgctaccatcatgcacctggcgcgcatggtggaggcgtacgatgcggctcgtatcgacttccatcagatggtgcgccgtgggatggtcgagaacaacatgaagatcctggagctgcgtcaggagaatctgcagctgaagaaggacctagacgcagtggaggcgcagctgcatcagctcaagatcgcccagggagaggtctgtcgccccaagcgtcgccgcgtctgccgcagccagaagatcaccgcccgcaagagcacctccaggcccgagcttgttcgtcagtccctggcgtggacttgcttcgttgagacccctcgtgccgagcccgcgcccgtggttcctcaggagggggaagcctccggcgttggtagcacggaggatctctctctgtttgctggttctgtgtggggttttcagatggtgacgaccaggagaagtgctgccaccggtgatggcaaccaacctgaaggcagcaaccacaacaaccatggcagcccacctccacctcctcctccgcctccaccaccaccaccagacaccaacgccattctcactcaaatcctcgcccagcaggccaacatgatgactgctttcctccaccacctccaaaatccgccacaacagaatgctccaccaccacccccacaacactctaaactcgccgagttcctccgcatccgtccacctaccttctctagctccaacaaccccgtggatgcgttggattggttgcatgccgtggggaaaaagctagacaccgtgcagtgcagcgatgaggagaaagtcgtcttcgccgcccaccaactgcaggggcccgcatctctatggtgggaccatttccaggctacgcagccagaggggcagcctattacttgggcccgcttcaccgccgccttccggaggacccatgtgcccgccggagtcatggcccttaagaaaagggaattccgagagttgaagcaaggcaaccgctccgtgatggagtatttgcatgagtttaacaacctggcccggtacgccccggaggatgtacgggaagatgaggaaaagcaggagaagttcttggcaggaatggaccctgagctatccgtgcgtctagtctccggtgactatgcggatttccaacgtctggtggacaagagcatccgcttggaagccaagcacaaggaactggagtcgcacaagcgccgcttggcgaatttccgcaatcatcagggtgctaaccaaagggtccgctacaccaatccctatccagggggatcgtcctcgcagcagcaacagcagcaacaacctcgctccgcgccccgacctcaattcatggtgcgcgtcccacagccgcagcaacagcagagtcaacaagggactcgtgcgccccgtcctcctatgccagccgtgcagcctggtcaaggccgcagggacgttcaaggtccgcagcgtctgtgcttcaactgcttcgagcccgggcactttgcggataaatgcccgaagccgaggcgccagcaaggccaagcgcctccccgctccaacaacggtggtaaggatgtcattcggggtcgtgtgaaccacgtgacggccgaggacgtgctgacaactccagacgtcatcgttggtacgttcctcattcattccatccctgctaccattttgttcgactctggagcttcccactcgtttatatctgtgccattcgtggggagaaatcagttgggggtagaaaggcttaggaaccctctgctcatcaccacccctggaggggttatgacagcaaagtattatagtcctgccgtccctatagaaattcaggggattccttttccctcggatctgattcttctagactccaagaacttggatgtgatccttgggatgaattggttggctcaattccaaggagtagtggattgtgcaagacgcactgtcactctgtaccgagggccggaacaaccggttgttttctttgcacccccaacctctgtcagtagttcagaacttcatcagataggactgtcagaaatccccatcgtcagagagttcggagacgtgtttccggaagaactacccggtatgccgcccaagcgagagattgagttctggatagatcttgctccaggaaccactcctctatacaagcgaccctaccgtatggcagcaaatgaactggccgaagttaagaaacagttggaagagttgaaagaaaaggggtatatacgtccgagtacttccccctggggtgctcctgtgatttttgtggagaagaaagacaagatgaagaggatgtgcgttgactacagagctctcaatgaagtcaccatcaaaaacaagtaccctcttccccggatcgatgatctgttcgatcagcttaaaggtgccacggtattctccaagattgatcttcgttccggatatcaccagttgcgcatccgtgaagaagatattccgaagaccgcattcaccacgcgatacggactgtatgaattcacggtgatgtcattcggtttaaccaatgctcctgccttcttcatgaacttaatgaacaaagtgttcatggaatacttggataagtttgttgtggttttcattgatgacattctggtatactcacaatcagaggaagaccatcagcaccatctccgtctggtgttggggaagttgcgggaacatcaattgtatgccaaacttagcaagtgtgagttctggttgtccgaagtcaaattcttagggcacgtgatatctgctaaaggagttgctgtggaccccgaaacagtgaccgccgtcactgattggaagtaacccaagacagtcactcaaattcgcagtttcttaggtttggcaggatactaccggaggtttatcgagaacttctccaaaatcgctcgacccatgacatagttgttgaagaaagaagagaaatttgtgtggagcccgcaatgcgagaaggcgttccaaactctcaaagaaaagctggtttcctcgccagtgttaatcttgccggatactcgcaaggacttcatggtgtattgtgacgcttcgcgccaaggattggggtgcgtgctcatgcaggacggtcatgtggtggcctatgcctcacgccagctacggcctcatgaaagcaactaccctacccatgatttggagttagccacggtggttcatgctctaaaaaatctggcggcactatctcaatgggaatcgctgtgaaatatatactgatcataagagtttgaaatacatcttcacccagtcggatctgaatcttcggcagaggagatggctagaactcatcaaggattatgatgtgggaattcactatcatcctggtaaggccaacgtggtcaccgacgctctaagtcaaaaaagccattgcaacactcttaacgtccgtggcattccacccgaacttaaccaacagatggaagccctgaatctaagcatagtgggtcgtggattcttggctgcgttggaagccaagcccaccttgctcgatcaaatccgcgaggctcagaagaacgacccggacatgcatggactcctcaataatatgaaacagggtaaagccgctggtttcacagaggatgaacacggaaccctatggaacggaaatcgggtatgcgttccagataacagagaacttaaacaactgatacttcaggaagctcacgaaagtccttattccatccaccctagcagtacgaagatgtacttagacctgaaggagaaatactggtgggttagtatgaagcgggaaattgcagagttcgtggccctttgtgatgtgtgccagcgtgtcaaggcagagcaccaacgaccggccggacttctccaacctctccaagtaccagaatggaaatgggatgaaattgggatggatttcatcaccggacttccaaaaacccaaggtggatatgattctatatgggtagttgtggatcgattaaccaaggtagctcgatttattcttgtgaagaccacctatggagggaacaaactagccgagctctacttcgctaggatcgtgagtctccatggcgttcccaagaaaatcgtatctgataggggaagccaattcacctctcacttttggaagaagctccaagaagagctggatacccgattaaatttcagcaccgcgtatcacccgcagacggatggacagaccgagtgtctaaatcagatcctagaagatatgcttcgcgcatgtgtcctagatttcgggaagacctgggataagagtctcccctatgccgagttctcctacaataacagctaccaagccagtatacaaatggcaccttatgaagcgttgtatgggcgcaaatgccggacaccgctcttgtgggaccaagttggggaaagtcaagtgttcgggactgatatcctgagagaagctgaagcgaaggtcagaaccattcgggataatctaaaggtggcacagtcccggcagaaaagttatgcagataaccgtcgccgtaacctggaattcgcagtggacgattttgtgtaccttcgggtcacgccattgcgaggtgtacacaggtttcagacaaaagggaagctcgcacctcggtttgtgggtcctttccgtatcattgcccgacgcggagaagtcgcttaccagttggagctgcccgcctccttgggcaacgtgcatgatgtgttccatgtgtcgcaactcaagaaatgtcttcgggtgccgtccgagcagaccgactcagagcaaattgaagttcgcgaagacttgacctacgtggagaggccagtgaaaatcctggacaccatggagcgcaggaccaggaaccgggtaatccgtttttgcaaggtccaatggagcaaccacgccgaggaagaagctacctgggagcgtgaagacgagctgaaggcagcccatcccgatctcttcgccagttcttccgaatctcggggtcgagattccgtt

SEQ ID NO: 14295 - DNA, 3639 bp, Oryza sativa
  Clone ID: TFbOSC9451j.C1.o1.fg
atgtccgggccggccttggcgccgcccgtccccagctgcccaatctgcccctcggcagatcatggccgtccatccgtggcccgcatggccggccgcgttgtcacgaccggaaataacccaacgggcgttcctgacgtgcgtgcattaatccttgtcccaggaggcaaggcccagcacacacagagacaaacgagaaacagcggaagactagggcgacgaccacaggcgcagcagcagcagaatcagcaagggactcgtgcgccccgtcctcctacgccaactgtgcagcctggtcaaggccgcagggacgctcaaggtcagcagcgtctgtgcttcaactgcttcgagcccgggcactttgcggataaatgcccgaagccaaggcgtcagcaaggtcaagcgcctccccgccccaacaacggcgggaaggatgtcattcggggtcgtgtgaaccacgtgacggccgaggacgtgctgacaactccggacgtcatcgttggtacgttcctcattcattccatccctgctactattttgttcgactctggagcttcccactcgtttatatctgtgccattcgtggggaaaaatcagttgggggtagaaaggcttagaaaccctctgctcatcaccacccctggaggggttatgatagcaaagtattatagccctgccgttcctatagaaattcaggggattccttttccctcggatctgattctactagacaccaagaacttggatgtgattcttgggatgaattgggagttcggagaggtgtttccggaagaactacccggtatgccgcccaagcgagagattgagttccgaatagatcttgctccaggaaccactcctctgcacaagcgaccctaccgtatggcagccaatgaactggccgaagtcaagaaacagttggaagagttgaaagaaaaagggtatatacgtccgagtacttccccatggggtgctcctgtgatttttgtagagaagaaagacaagacgaagaggatgtgcgtcgactacagagctctcaatgaagttaccatcaaaaacaagtaccctcttccccggatcgatgatctgttcgatcagcttaaaggtgccactgtattctccaagatcgatcttcgttccggatatcaccaattacgtattcgtgaagaagatattccgaagaccgcattcaccacgcgatacggactgtatgaattcacggtgatgtcgttcggtttaaccaatgcacctgccttcttcatgaacttaatgaacaaagtgttcatggaatacttggataagtttgttgtggttttcattgatgacattctgatatactcccaatcagaggaagaccatcagcaccatctccgtctggtgttgggaaagttgcgggaacatcaattgtatgccaaacttagcaagtgtgagttctggttgtccgaagtcaaattcttagggcacgtgatatctgctaaaggagttgctgtggaccccgaaacggtgaccgccgtcactgattggaagccacccaagacagtcactcaagtccgcagtttcttaggtttggaaggatactatcggagattcatcgagaacttctccaaaatcgctcgacccatgacacagttgttgaagaaagaagagaaatttgtgtggagcccgcaatgcgagaatgcgtttcaaactctcaaggaaaagctggtttcctcgccagtgttaatcttgccggatactcgcaagacttcatggtgtattgtgacgcttcacgccaaggattgggcctatgcctcacgtcagctacgacctcatgaaggcaactaccctacacatgacttggagttagccgcggtggttcatgctctaaaaatctggcggcactatctcattgggaatcgctgtgaaatatataccgatcataagagtttgaaatacatcttcacccagtcggatctgaatcttcggcaaaggagatggttagaactcatcaaagactatgatgtgggaattcactatcatcctggtaaggccaacgtggttgccgacgctctaagtcgaaagagccattgcaacactcttaacgtccgtggcattccacccgaacttaatcaacagatggaagccctgaacctaagcatagttggtcgtggattcgtggctgcgttagaagccaagcctatcttgctcgatcaaatccgcgaggctcagaagaatgatccggacatgcatggactcctcaagaatatgaaacagggtaaagccgctggtttcacggaggatgaacacggaaccctatggaacggaaatcgggtatgcgttccagatagcagagaacttaaacagttgatactactggaagctcacgaaagtccttattcaatccaccctggcagtacgaagatgtacttagacttgaaggagaaatactggtgggttagcatgaagcgggaaattgcagagttcgtggctctgtgtgatgtgtgccagcgtgtcaaggcagaacaccaacgaccggccggactcctccaacctctccaagtgccagaatggaaatgggatgaaattgggatggatttcatcaccggacttccaaaaacccaaggcggatatgattctatatgggtagttgtggatcgattaaccaaggtggctcgattcattcctgtgaagaccacctatggagggaacaagctagcggagctctacttcgctaggatcgtgagtctccatggcgttcccaagaaaatcgtatctgataggggaagccaattcacctctcacttttggaagaagctccaagaagagctgggtactcgattgaatttcagcaccgcctatcacccgcagacagatggacagaccgagcgtctaaatcagatcctagaagatatgctccgcgcatgtgtcctagatttcgggaagacctgggataagagtctcccctatgccgagttctcctacaataacagctatcaagccagcatacaaatggcaccttatgaagcgttgtacgggcgcaaatgccggacaccgctcttgtgggaccaagttggagaaagccaagtgttcgggactgatatcctgagagaagctgaagctaaagtcagaatcattcgggataatctaaaggtggcacagtcccggcagaaaagttatgcagataaccgtcgccgtgacctggaattcgcagtgggcgattttgtataccttcgggtcacgccattgcgaggtgtacacaggtttcagacgaaagggaagcttgcacctcggtatgtgggtcctttccgtatcaatgctcggcgcggagaagtcgcttaccagttggagctgcccgcctccttgggcaacgtgcatgatgtgtttcatgtgtcgcaactcaagaaatgtcttcgagtgccatccgagcaggccgactcagagcagattgaagttcgcgaagatttgacctacgtggagaggccagtgaaaatcctggacaccatggaacgcaggaccaggaaccgggtaatccgtttttgcaaggtccagtggagcaaccacgcagaagaagaagctacttgggagcgtgaagacgagctgaaggcagcccatcccgatctcttcgccagttcttccgaatctcggggtcgagattccgtttaa

SEQ ID NO: 14296 - DNA, 924 bp, Oryza sativa
  Clone ID: TFbOSC101197j.C1.o7.hg
atgcaagaggagtcagatcttaggaagcacgtggacgtcttcaatcagttggttgtggatctaagtaagttagatgtgaaactggatgatgaagacaaggccataattcttctgtgctcgcttccaccgtcgtatgaacatgtggtgactaccctgatgcacggcaaggatactatcaaaactgaggagataatttcgtcgttgcttgcacgagacttgagaagatcaaagaaaaacgaggcaatggaggcttctcaggctgagagtttgctggtcaaggcaaagcatgatcatgaagcgggggtgttgaagagcaaggagaagggggcacggtgctataagtgtcatgagtttggacatataaggaggaattgtccgttactgaagaagaggaaagatggcattgcaagtttagcagctcgtggtgatgattcagatagcagtagtcatgagattcttacagtgtctaacgagaagtctggagaagcgtggatgttggactcagctagttcctatcacgtggattctgataggaagaccatgaatatcatgaaggacggcaagactgttatgattggtgagaggacaagctcatgtttgtacaagttacaagggagtgctgttgcaggtggagtcatggaagatgggtatgctggtgttgctgtgcacgatcctgaaggcggcgagcctggccatagcgagagggagcggctgccggcggcgaccggccgtaaaattggattctccatgccgagtactccatttcccctctcattacacatccaatccatcgccggaatgctgccggcgctgcctcccggcgtcgccgctctgttcggccgcagccagccgcatggcgcgccgccgctccagggcgccctagctttggccgtcgccaccctgggactcctctcgcctcactaa

SEQ ID NO: 14297 - DNA, 1671 bp, Oryza sativa
  Clone ID: TFbOSC21248j.C1.o6.fg
atggctgctttcaacagggagatgactagacgtggtgctcaggttgatggcggtggaagcgattggcgatccaatcgatgggtcggacacttcgggcgggtggctcggactttccgatgttgtcagagatacgaagaagcccaggaggtcagggtcgcggcggtgtgcgcgtcttgcgtcgaagccgagcagagggcgagattcgtacccgattttcacagaggcggaggtggtttgggcggtgaggtcacgggcggctggaggcgcatccttgcaggcggtgcgtggcggcgtggtactcggcggcgtccgtcggagctcgagcaggagcttgcggcggcggctgcagcggttctcggcgaggaaccggtgcaggtcttcagcggcggcgctccaaggcggtgcggcagcctcttgcggggccagcggctccccaaggtccggcggcgcgacggctcctcgcagatgaggctgaaggatctgttggctcaacaggggatatccaaggctcttgaggagacgatgccggaaaagatggatgttggcaagtgggtggaaatgaaggcacaggcaactgcaataatacgcttgagtctctcggattttgtcatgtaccaggtcatggatgaaaaaacgccgaaggaaatttgggacaagttggcaagcctgtatatgtccaagtcgctgacgagtaagttgtatctcaaacaacagctgtatggtttgcagatgcaagaggagtcagatcttaggaagcacgtggacgtcttcaatcagttggttgtggatctaagtaagttagatgtgaaacttgatgatgaagacaaggccataattcttctgtgctcgcttccaccatcgtttgaacatgtggtgactaccttgacgcacggcaaggatactgtcaaaactgaggagataatttcgtcgttgcttgcacgagacttgagaagatcaaagaaaaacgaggcaatggaggcttctcaagctgagagtttgctggtcaaggcaaagcatgatcatgaagcaggggtgtcgaagagcaaggagaagggggcacgatgctataagtgtcatgagtttggacatataaggaggaattgcccgttactgaagaagaggaaaggtggcattgcaagtttagcagctcgtggtgataattcagatagcagcagtcatgagattctcacagtgtctaatgagaagtctggagaagcgtggatgttggactcagctagttcctatcacgtgacatcgaagtgggagtggttctcttcatacaaatctggtgattttggtgttgtttacttgggcaatgacacgagttatcgtgttattggagtgggcgatatcaagttcaagatgtatgatggaaacgaggtgctactttcagatgtgagacacgtgccaggactaaggaagagtttgatttctcttgggagcctacatgagacaggttggttgtatcaggtggattctgataggaagaccatgaatatcatgaaggacggcaagactgttatgactggtgagaggacaagctcatgtttgtacaagttacaaggaagtgctgttgcaggtggagtcatggaagatgggcatgctggtgttgctgtgcacgatcctgaaggcggcaagcctggcgtaggctcgtcgggcggctcggcatga

SEQ ID NO: 14298 - DNA, 1227 bp, Oryza sativa
  Clone ID: TFbOSC400049j.C1.o5.fg
atggcggcaacagcggtttccaaatttgaggtggtgaagttcgatggcaccgggaatttcgttctctggcagatgaggctgaaggatctgttggctcaacaggggatatccaaggcacttcaggagacgatgccggaaaagattgatgctgacaagtggaatgagatgaaggcacaggcagctgcaacaatacgcttgagtctctcggattctgtcatgtaccaggtcatggatgaaaaatcgccgaaggaaatttgggacaagttggcaagcctacatatgtccaagtcgctgacgagtaagttgtatctcaaacagcagctgtatggtttgcaggtgcaagaggagtcagatcttaggaagcacgtggacgtcttcaatcagttggttgtggatctaagtaagttagatgtgaaactggatgatgaagacaaggccataattcttctgtgctcgcttccactgtcgtatgaacatgtggtgactaccctgacgcacggcaaggatactgtcaaaactgaggagataatttcgtcgttacttgcacgagacttgagaagatcaaagaaaaacgaggcaacgaaagcttctcagggtaagagtttgctggtcaaggataagcatgatcatgaagcgggggtgtcgaagagcaaggagaagggggcacggtgctataagtgtcatgagtttggacatataaggaggaattgcccgttactgaagaagaggaaaggtggcattgcaagtttagcagctcgtggtgatgattcagatagcggtagtcatgagattctcacagtgtctgacgagatgtctggagaagcgtggatgttggactcagctagttcctatcatgtgacatcgaagcgggagtggttctcttcatacaaatctggtgattttggtgttgtttacttaggcgatggcacgagttatcgtgttgttggagtgggcgatgtcaatttcaagatgtatgatggaaacgaggtgctactttcagatgtgagacacgtgccgggattaaggaagagtttgtttcgcttgggagcctacatgagacaggacggcaagactgttatgactggtgagaggacaagctcatgtttgtacaagttacaagggagtgctgttacaggtggagtcatggaagatgggtatgttggtgttgctgtgcatgatcctgaaggcggcgagcctggcgtaggctcgtcgggtggctcggcgtga

SEQ ID NO: 14299 - DNA, 1278 bp, Oryza sativa
  Clone ID: TFbOSC400601j.C1.o65.fg
atggcggcgacggtggtttccaaatttgaggtggtgaagttcgatggcaccgggaatttcgttctctggcagatgaggctgaaggatctgttggctcagcaggggatatccaaggttcttgatgagacgatgccggaaatgatggatgctgataagtgggatgagatgaaggcgcaggtagctgcaacaatacgcttgagtctctcagattccgtcatgtaccaggtcatggatgaaaaatcaccgaaggaaatttgggacaagttggcaagcctgtatatgtccaagtcgctgacgagtaagttgtatctcaaacaacaactgtatggtttgcagatgcaagaggagtcagatcttaggaagcatgtggatgtcttcaatcagtttgttgtggatctaagtaagttagatgtgaaattggatgatgaagacaaggccataattcttctgtgctcgcttccaccgtcttatgaacatgtggtgactaccctgacgcacggcaaggatactgtcaaaactgaggagataatttcgtcgttgcttgcacgagacttgagaagatcaaagaaaaacgaggcaacagaggcttctcagggtgagagtttgctggtcaaagcgaagcatgatcatgaaacaggggtgtcgaagagcaaggagaagggggcacggtgctataagtgtcatgagtttggacatataaggaggaattgcccgttactgaagaagaggaaaggtggcattgcaagtttagcagctcgtggtgatgattcagatagcagcagtcatgagattctcacagtgtctgacgagaagtctggagaagcgtggatgttggactcagctagttcctatcatgtgacatcgaagcgggagtggttctcttcatataaatctggtgattttggtgttgtttacttgggcgatgacacgagttattgtgttgttggagtgggcgatgtcaagttcaagatgtatgatggaaacgagatgctactttcagatgtgagacacgtgccgggactaaggaagagtttgatttcgcttgggagcctacatgagacgggttggttgtatcaggtggattctgataggaagaccatgaatatcatgaaggacggcaagactgttatgactggtgagaggacaagctcatgtttgtacaagttacaagggagtgctgttgcaggtggagtcatggaaaatgggtatgctggtgttgctgtgcacgatcctgaaggcggcgagcctggcataggctcatcgggcggctcggcgtga

SEQ ID NO: 14300 - DNA, 1278 bp, Oryza sativa
  Clone ID: TFbOSC400934j.C1.o66.fg
atggcggtgacggtggtttccaaatttgagatggtgaagttcgatggcactggaaatttcgttctctggcagatgaggctgaaggatctgttggctcaacaggggatatccaaggctcttgaggagacgatgccggaaaagatggatgctggcaagtgggaggagatgaaggcgcaggcagctgcaacaatacgcttgagtctctcggattctgtcatgtatcaggtcatggatgaaaaaacaccgaaggaaatttgggacaagttggcaagcctgtatatgtccaagtcgctgacgagtaagttgtatctcaaacaacagctgtatggtttgcagatgcaagaggagtcagatcttaggaagcacgtggacgtcttcaatcagttggttgtggatctaagtaagttagatgtgaatctgtatgatgaagacaaggccataattcttctgtgctcgcttccaccgtcgtatgaacatgtggtgactaccctgacgcacggcaaggatactatcaaaactgaggagataatttcgtcgttgcttgcacgagacttgagaagatcaaagaaaaacgaggcaatggaggcttctcaggctgagagtttgctggtcaaggcaaagcatgatcatgaagcgggggtgtcgaagagcaatgagaagggagcacggtgctataagtgtcatgagtttggacatataaggaggaattgcccgttactgaagaagaggaaagatggcattgcaagtttagcagctcgtggtgatgattcagatagcagcagtcatgagattctcacagtgtctaacgagaagtctggagaagcgtggatgttggactcagctagttcctatcacgtgacatcgaagcgggagtggttcttttcatacaaatctggtgattttggtgttgtttacttgggcgatgacacgagttatcatgttgttggagtggacgatgtcaagttcaagatgtatgatggaaacgaggtgctactttcagatgtgagacacgtgccgggactaaggaagagtttgatttcgcttgggagcctacatgagacaggttggttgtatcaggtggattttgataggaagaccatgaatatcatgaaggacggcaagactgttatgactggtgagagaacaagctcatgtttgtacaagttacaagggaatgctgttgcaggtggagtcatggaagatgggtatgctggtgttgctgtgcacgatcctgaaggcggcgagcctggcgtaagctctacgggcggctcggcgtga

SEQ ID NO: 14301 - DNA, 1116 bp, Oryza sativa
  Clone ID: TFbOSC401810j.C1.o11.fg
atgccgccgattggaactttacgccttccatggggacgtttgcggtctattggccctgacgtcgaaccgttggttgtaaagcctgacaaaacccaaaccaaaggtcgaagtgctgctcctggcaccctacgcctcgccgcgtacaacgtggtttttcttaagtcctcgcgcaggaggcaaatttatgccgcgaagggcaactgtgatatttaccgaggcgcaggaaaagaaaggaaatggagggatcgtacctacattgctgtgaagatgaataatgcgtacgttgtggaggcgtacggtagggatgaaaaccgatcgaatacggacttcgaagccgatgctgactctaagccgatgactacttcgggctttccaaattccactgttaacagtcatatgcaagaggagtcagatcttaggaagcacgtggacgtcttcaatcagttggttgtggatctaagtaagttagatgtgaaactggatgatgaagacaaggccataattcttctgtgctcgcttccaccgtcgtatgaacatgtggtgactaccctgatgcacggcaaggatactatcaaaactgaggagataatttcgtcgttgcttgcacgagacttgagaagatcaaagaaaaacgaggcaatggaggcttctcaggctgagagtttgctggtcaaggcaaagcatgatcatgaagcgggggtgttgaagagcaaggagaagggggcacggtgctataagtgtcatgagtttggacatataaggaggaattgtccgttactgaagaagaggaaagatggcattgcaagtttagcagctcgtggtgatgattcagatagcagtagtcatgagattcttacagtgtctaacgagaagtctggagaagcgtggatgttggactcagctagttcctatcacgtggattctgataggaagaccatgaatatcatgaaggacggcaagactgttatgattggtgagaggacaagctcatgtttgtacaagttacaagggagtgctgttgcaggtggagtcatggaagatgggtatgctggtgttgctgtgcacgatcctgaaggcggcgagcctggcgtaggctcgtcgggcggctcggcgtga

SEQ ID NO: 14302 - DNA, 1446 bp, Oryza sativa
  Clone ID: TFbOSC402366j.C1.o6.gm
atggcggcgatggtggtttccaaatttgaggtggtgaagttcgatggcaccgggaatttcattctctggcagatgaggctgaaggatctattggctcaacaagggatatccaaggctcttgaggagacgatgccggaaaagatggatgctggcaagtgggaggagatgaaggcgcaggcagctgcaacaatacgcttgagtctctcggattctgtcatgtacccggtcatggatgaaaaaacgccgaaggaaatttgggacaagttggcaagcctgtatatgtccaagtcgctgacgagtaagttgtatctcaaacaacagctgtatggtttgcagatgcaagaggagtcagatcttaggaagcacgtggacgtcttcaatcagttggttgtggatctaagtaagttagatgtgaaacttgatgatgaagacatggccataattcttctgtgctcgcttccaccgtcatatgaacatgtggtgactaccctgatgcacggcaaggatactgtcaaaactgaggagaaaatttcatcgttgcttgcacgagacttgagaagatcaaacaaaaacgaggcaatggaggcttctcaggctgagagtttgctggtcaaggcaaagcatgatcatgaagcgggggtgtcgaagagcaaggataagggggcacggtgctataagtgtcatgagtttggacatataaggaggaattgcccgttactgaagaagaggaaaggtggcattgcaagtttagcagctcgtggtgatgattcagatagcagcagtcatgagactctcacagtgtctaatgagaagtctggagaagcgtggatgttggactcagctagttcctatcacgtgacatcgaagcgggagtggttctcttcatacaaatctggtgattttggtgttgtttacttgggcgatgacacgagttatcgtgttgttggagtgggtgatgtcaagttcgagatgtatgatggaaacgaggtggattttgataggaagaccatgaatatcatgaaggacggcaagactgttatgactggtgagaggacaagctcatgtttgtacaagttacaaggaagtgctgttgcaggtggagtcatggaagataggcatgctggtgttgctgtgcacgatcctgaaggcgggccccgtcgggaggcccgccaccagtgccatatggagcccgtctccgcagggagaacccaatccgaaggcctaggaagccagctgagcccgaagagggcagttcgctcccaggagttcggagtcaaccggaaggcccgggggatcccaaagcccagtcaagggcctctgaaggccctagagctggttcaagggatctggaggcccatgagccggctcaaaggctccagagctcttgccatggctccaaagccgaagcctacagaggacaccgggaataactatggggcactataa

SEQ ID NO: 14303 - DNA, 1275 bp, Oryza sativa
  Clone ID: TFbOSC406022j.C1.o7.fg
atggcgacaacggtggtttccaaatttgaggtggtgaagttcgatggcaccgggaatttcgttctctggcagatgaggctgaaggatctgttggctcaacaggggatatccaaggctcttgaggagacgatgccggaaaagatggatgctggcaaatgggaggagatgaaggcgcaggcagctgcaacaatacgcttgagtctctcggattctgtcatgtaccaggtcatggatgaaaaaacgtcgaaggaaatttgggtcaagttgacaagtctgtatatgtccaagtcgctgacgagtaagttgtatctcaaacaacagctgtatggtttgcagatgcaagaggagtcagatcttaggaagcacgtggacgtcttcaatcagttggttgtggatctaagtaagttagatgtgaaactggatgatgaagacaaggccataattcttctgtgctcgcttccaccatcgtatgaacatgtggtgactatcctgacgcacggcaaggatactatcaaaactgagataatttcgtcgttgcttgcacgagacttgagaagatcaaagaaaaacgaggcaatggaggcttctcaggctgagagtttgctggtcaaggcaaagcatgatcatgaagcgggggtgtcgaagagcaaggagaagggggcacggtgctataagtgtcatgagtttggacatataaggaggaattgcccgttactgaagaagaggaaagatggcattgcaagtttagcagctcgtggtgatgattcagatagcagcagtcatgagattctcacagtgtctaacgagaagtctggagaagcgtggatgttggactcagctagttcctatcatgtgacatcgaagcgggagtggttctcttcatacaaatctggtgattttggtgttgtttacttgggtgatgacacgagttatcgtgttgttggagtgggcgatgtcaagttcaagatgtatgatggaaacgaggtgctactttcagatgtgagacacgtgccgggactaaggaaaagtttgatttcgcttgggagcctacatgagataggttggttgtatcaggtggattctgataggaagaccatgaatatcatgaaggacggcaagactgttatgactggtgagaggacaagctcatgtttgtacaagttacaagggagtgctgttgcaggtggagtcatggaagatgggcatgctggtgttgctgtgcacgatcttgaaggcggcgagcctggcgaaggctcgtcgggcggctcggcgtga

SEQ ID NO: 14304 - DNA, 1221 bp, Oryza sativa
  Clone ID: TFbOSC4861j.C1.o1.fg
atggcggcaacggtggtttccaaatttgaggtggtgaagttcgatggcaccgggaatttcgttctctggcagatgaggctgaaggatctgttggctcaacagaggatatccaaggctcttgaggagacgatgctggaaaagatggatgctggcaagtgggaggagatgaagacgcaggcagctgcaacaatatgcttgagtctctcggattctgtcatgtaccaggtcatggatgaaaaaacgccgaaggaaatttgggacaagttggcaagcctgtatatgtccaagtcgctgacaagtaagttgtatctcaaacaacagttgtatggtttgcagatgcaagaggagtcagatcttaggaagcatgtggacgtcttcaatcaattggttgtggatctaagtaagttagatgtgaaactggatgatgaagacaaggccataattcttctgtgctcgcttccaccgtcttatgaacatgtggtgactaccctaacgcacggcaaggatactgtcaaaactgagataatttcgtcgttgcttgcacgagacttgagaagatcaaagaaaaacgaggcaatggaggcttctcaggctgagagtttgctggtcaaggcaaagcatgatcatgaagcgggggtgtcgaagagcaaggagaagggggcacggtgctataaatgtcatgagtttggacatataaggaggaattgtccgttactgaagaagaggaaaggtggcattgcaagtttagcagctcatggtgatgattcagatagcagcagtcatgagattctcacagtgtctaacgagaagtctggagaagcgtggatgttggactcagctagttcctatcacgtgacatcgaagcgggagtggttctcttcatacaaatctgtgggcgatgtcaagttcaagatgtatgatggaaacgaggtgctactttcagatgtgagacacgtgccgggactaaggaagagtttgatttcgcttgggagcctacatgagacaggttggttgtatcaggtggattctaataggaagaccatgaatatcatgaaggacggcaagactgttatgactggtgagaggacaagctcatgtttgtacaagttacaaggaactgctgttgtaggtggagtcatggaagatgggcatgctggtgttgctgtgcacgatcctgaaggcggcgagtctagcgtaggctcgtcaggcggcttggcgtga

SEQ ID NO: 14305 - DNA, 4430 bp, Oryza sativa
  Clone ID: TFbOSC900064j.C1.o39.np
gactacgttggtgattctgaggatgatgcggaccaacgacgacttcgcttcaaccgcctggtatggctcgtcgtcggccacgccgtgaggtacggaataatgatgattcatttggtaagattaaattcactattcctacttttgatggtaagtatgaccatgatgcttatctttcaggggagttagcagtagatcaaaagtttgcttgccatgatgttcctgtggataagagggttagggctgccggtagtgaatttactgattttgcttctgtttggtggagtaaataccatcgtactcatataaatgctttgccacttacttgggatggtttgaaatgaattatgcatgctagatttgtaccttcatattatgcacgtgacatgttaaataagctacaacaattgaaacagggtgatactagtgtggaagaatattaccaagcgctgcaaatgggtatgttatgttatgggttagtagaggacgaggaggctgccatggctcgattcttggtgggcttagaccgagaaatttatgatattcttagttacaaagagtataataatatgactcagttatttcactatgcctgtaaagctgaaagggaagtgcagggatgacgtgcgcaaacaagggctatcattcctgcaggtagaactccatggacggctcgatgtggcgctgccccagctggtcacgcatcagcttcgacatcgacatcagcaccctccaacagcaacaaagcgcggccaacaccttctgcggcctcccgtcatgctgcagaggctgcagcaaagcccgccaagagtgcctcctccgttgtttccacgggcagaacaagagatgtttagtgccaccgttgcaagggctttgggcacatgcagcgtgactgccctagcaagcgtgttttggtagtcaaggatgatggtgagtactcgtttgctagtgatttcgatgaagatacacttggattgcttgcaactaacaacaaaggtagcgaggaagaggaacacgtcggggctgatgttgcggaccaatatgagagacttattgtgcaacgtgtcttgagtgcacaaatgggcaaagtagagcagaaccagtggcataacctttttcagacgaagtgtgtcgtcaacaagcgttcctgctgcacaatcatcgatggaggtagttgtaggaacttggtaagtacggagatggttacaaagctagctttgcagacgaaaccacatccccacccatactatattcagttgttcaacaacagtggccgcattaaggtaacacaactggtgagattaaattttgcaattggttcttactatgattttgttgactgtgatgtcgtacctatgcatgcttgctccttgctgttgggtaggccttggcaatatgataaagacacgttgcatcatgatagaaccaatcaatactcctttatgcataatggaaagaaaattgtgttgcatcctatgactcctgaagttgtttttgagaatgatgttgctagagctaacaaagagaaaaatcataacaagaaaggttctaaatctaaccatagcaaggatactgtgattaaattgaatggtccttgtttgcatgccactaaatctgatattgtcaatttggatacaagtgacactgtttgctatgctctcatttgcaaggatgccttgttttcttttgagaatatgcctgtctcttttcctcctgcaatcactaaccttttgcaagagtatgaggatgtgatccccaaggacatacctctgggcctgccacggtgcgtggaattgagcatcaaatcgacttgatcccaggagcttcgttacccaatcgtgcgccataccgaaccaaccccgaggaaaccaaggagattcagcgtcaggttcaggacttgcttgacaaagggtacgtacgtgaatctcttagtccatgtgctgttccggtgattttggatcatggcgtatgtgtgttgattgtagagctattaataacattaccattagatattgtcatcctaggttagatgatatgcttgatgaattgagtggctctactgttttctctaaagttgatttgcgtagtggttaccaccaaattggtataaagttgggcgatgaatggaaaacgacatttaaaacaaaatttgggttatatgagtggttagtgatgccctttggtttaactaatgcaccaagcactttcatgaggttgatgaatgaggttttgcttcctttcattgaaaaatttgtggtggtatactttgatgacattctgacttatagcaaatctttggaggaccatctcgatcatttacgtgttgtttttaaagctttacgtgatgcacgtttgtttgataaccttgagaagtgcaatttttgcaccgatcgagcctcgtttcttggctatgttgtcactccacaggagattgaggttgatcaagccaaggttcaggcaattcagagttggtcgactcctaaaacggtttcacaggtgcggagctttctaggactcgtggggttttatcgccattttgtgcgggatttcagcaccattgctgcaccattgaatgagcttacaaagaagggagtgcctttcacttggggcacatcacaagagaatgccttcacatgttgaaagataagttgacacatgcatctctcctccaacttccagattttaataagacttttgaacttgagtatgatgctagtgggattggattgggtggtgttttggtacaagaaggaaaacatgttgcatattttagtgaaaaattgagtgggcctgttctgaattactctacttatgataaggaattgtatgctcttgtgcgcactttaaaaacatggcagcattatttgtggcccaaggaatttgtcatacattctgatcatgagtctttgaagcatattcatagtcaaggaaaactgaaccgtagacatgctaaatgggttgaatttattgaatcttttccttatgttattaaacacaagaaagggaaggaaaatgtcattgctgatacactgtctaggagatatactttgttgacacaacttgacaacaaattttttggcctagaaatgattaaagaccaatatgtacatgatgatgatttcaaagatgtgttgctgcattgtaaggatggaaagacatggaacaaattcttcttgaatgatgggtttgtttttagagctaagaagctatgcattccagctagctccgttcgcttgttgttgttgtaggaagcacatggaagtgatttgatggggcattttggtgccaagaagacggtggacatccttgctggtcattttttttggccaaagatgagacgagatgtagatcgattcgttgctcgctgtgctacatgtcaaaaggctaagtcacgttttaatccacatggtttgtatattcctctccctgttcctactattccttggaagatatttcaatggattttgtgttaggattgcctaggaccaatagggggtgtgatagcatttttgtggttgtggatagattttctaaaatgtcacatttcataccatgtaataaaactgatgatgcttctcatatcgctgatttgttctttcgagaaattgttcgcttgcatggtgtgccaaacacaattgtttctgatcgtgacacgaaatttcttagctatttttggagaactttgtgggctaaattggggactaagcttttgtttactactacttgtcatccccaaactgatggacaaacagaagtggtgaatagaaccttgtctactatgcttagggctgtttcgaagaaaaatatcaagatgtgggaagaatgcttgcctcatattgaatttgcttataactgttccttgcattctactacaaagatgtgcccatttcaatttgtgtatggtttgttgcctcgtgctcccattgatttgattgctttgccatctcctgaaaaactgaattttgatgctaagcaacgtgctaagttgatgttaaagctgcatgagacaactaaagaaaacatcgagcgcatgaatgctaagtataagtttgctggtgacaaaggtagaagggaattgaattttgaacctggagatttggtttggttgcatttgcgaaaagaacggtttcctgacttgcaaaaatctaaattgatgcctagagctgatggtccatttaaagtgttagccaaaattaatgagaatgcatataagcttgatttgcctgcagattatggggttagtcccacatttaacgttgcagatttgaagccatatttgggcgaagaagatgaacttgagtcaaggatgactcaaatgcaagaaagggagtatgatgaggacatcaataccaacgatatatacatccacacctccacaagtacaacttcatggtcctattacccacgctcatgcacgtcaactcaactatcag

SEQ ID NO: 14306 - DNA, 3417 bp, Oryza sativa
  Clone ID: TFbOSC400483j.C1.o14.gm
atggcaagccgacgtcgggcgtcaaccagcaatgatgaaacccagacacctgacctaaccaccctggccggagttatggccactcaaacccaacttctgcaagccattgcaaacaatcaaggcaaccacgaaggatcaagctttggagagtttatgagcaccaagccacccacgttcactacgacagacgagcctatggaggcagaagattggctacgtatcatagagaagaaactgacccttatccgggtgcgcgaagccgacaaagtgatcttcgcagtaaaccaactggagggacccgctggtgattggtgggatacttacaaggaagctcgggaagaggatgctggagaacccacttgggaagagttcactgcagcatttcgcgagaacttcgtgcctgctgcggtaatgcgtatgaagaagaacgagttcagaaggctgcgacaagggaacacaacggtgcaggaatatctgaaccggttcactcagctggcccgctatgcaattggagaccttgcaaatgaagaggaaaagatcgacaagttcatagaagggctgaatgatgaattgcgtggacctatgattgggcaagaccatgagagcttccagagcctgatcaacaaagtcgttaggctggagaatgaccaaaggactgtagagcacaaccgcaagaggaggcttgctatgaatcgcccacctcagggagtgcctcagcgactcaagggagccacttcgtctgggtggaaaccccctattgtggcgaccaaccgccccgccgcacctagcaatttcaacaggccggttgcaattcagaaccgcacccctacaccaactctggctgcccctggagccaagaagaatgtggactgcttcaattgcgaggagtatgggcactacgccaacaactgccctcatccacgcaaaactcctgtccgtactagcgctaatgcaatgactgttcgtgggactactatccctattgccggacgaggtctattcaagactccgcaaactaacaggaccgctaccagatttgggcgcggacaagtgaaccatgtccgagctgaagaggcccaggaagatcagggcatactaatggactaccgttcactgaacgaagtaactatcaagaataagtatccactaccacggattgatgatctcttcgatcaacttaaaggagctaaggtgttctctaagatcgacctccgatcaggatatcaccaactgaaaattaggaccggggatatacccaagaccacgttctcaacgcgctatggattgtatgagttcacagtaatgtcatttggattaaccaacgccccggcatactttatgaatcttatgaacaaagtgttcatggattacttggacaaatttgtggtagtattcatcgatgatattttaatctactccaaggatgaggaagagcatgtggagcacttgcgattggtactcgagaaacttcgaaagcataagttatatgcaaaatttagcaaatgtgagttctggttgaaggaagttgcttttctaggccacgtgatctcagccggtggagtagcagtggatcctgctaaagtggaggctgttacgaaatggaaagcacccaagtctgtgactgaaattcggagttttctaggcttggccggatactaccgaaggttcattgaggggttctctaagatagcccgaccgatgacacaactactcaagaaggaaaagaagtttgtgtggtcagaacagtgtcaggaaagctttgagcagctcaaagaaaagctgacctcggcgcctattctagttcttcccgacatcaggaaagactttgttatatattgtgatgcatcaaggcaaggactaggaggagtactgatgcaggacagaaaggttgtggcctatgcgtcacgacaattgcgaccacacgaggaaaactaccccacccatgacctagaactcgcagctgtggttcatgcgctaaagatttggagacactatctgattggaaaccattgcgatatctacactgaccacaagagtctgaagtatattttcacccagtcagatctcaacttgaggctaaggcgatggctggaattaatcaaggactacgatctagaggttcactatcaccccggcaaggcaaacgttgtggccgatgctttgagtcggaagagccattgccatcatctgaggacggaagggatggatgtgcaaaggaattttcaaccgatgaaaaaggtgttctatggtacaaaaagaggatctatgtacccgaacagggatctgaaggagggttactggtggcccaacatgaagagagatgtgaccgaatacgtagcgctctgcgacgtatgccagatggtgaaggctgagcaccagaggccggcaggtgaacgtgcggtatttggacccgacattatcaaagaggccgaagagaagctaccagaaaacatcgccgatgtgcatccagtcttccatgtgtcccaattaaagaagtgcttgcgagtgccggaggagcaagctccgttggaggaaattcatattagcaatgatctcacgtacccagagcatccagttcggatactggatgaagtagaaaagaggactagggccaaagtgtggcatatgtacaaggtacaattgagtaatcacactgaggataaagccacttgggaaagtgaagaattcttgaagacagaatacccgcatctgttcgaagaccgccctaacccccctcccactctgccccgcgcgtggccgccccgagccccgcgctgccgttccatcgcctcgagccccgcgccgccgtcacgtcgccgcccgtcgccgcgtgtcatcgccgtcgccgtcgccgtcgcgttatctcgcgccccgtgccgccgttgctgcgccgtcgccgtcggccgtcctatcgccgctcgcccgtcgggtcaccgcctcgcgccacgcgccccgcgcgccgctcgcccgtcgcgtcgccgcctcgcgccccgcaccctgccgcgccgctcgcccgtcatcgttgcatcgccgtcgccgtcgcgccgagccccgcgccgcgccgcccgcccgtcgccatcgccgccagccacaccgcgcaccgcctgtcgcgtcgccatgaggccgcccacccctcccccgcgcccttatagaactcggcccctccccttctccaccccacacccatcctcaccatttcccccccctctcctccttctccacgcgccgccgccgtcgtgccgccgcgccgccgccttcgtgcgccgcgccgtcgcctcgaagccgccgcgccgcgccaggtgtggtgccgagcgttgccgccttgcgccgccgccgccgactggcaccgacggtaagattgggtggtatctgggaaaggctagtaccgtccccggtcaattaaagaccgagccatga

SEQ ID NO: 14307 - DNA, 1116 bp, Oryza sativa
  Clone ID: TFbOSC8260j.C1.o3.np
ttgtctcctctcgcccttcggcatttctttgtcaaacggttttcaaaattctcctcccaatctctccaattcttttagttgtcacacctagaggaccagccgtcagcttcatgtctgttcagaagtcaagtcaagtcaaatctcaagcttcgcgcagaaggagcaacaattggtcagcatgagggacaatttcaacggatcaggatcccatcagtttcatggatcaactcagctcaattctaatagtattccacgtcagcctcttgaagatcagcctcaaccccaagtcatggctaatcaaactcagatagtggaagagttgttacaacagatgcgacgtcggtaccaaatataccagatgcaacagatgcaacgacaatgtcaggagtcacgtcaatgtcacccaccgcaggtgcgagatcagatgccagcccggaacccgaatcagagtcagagtcaggagttcccaatatcagcaccgaagacccctgtcaaaatgcagtccagatccccgaagataacgacagccaagtcaacgtcagaccaaaggacagtaagtgctacctgttatgactgtggtgagcaaggtcattatgtaaggaactgtccatggaaggtgttcgccaggtcacctgaaaaagacgagaagtagtgcccagggagtaaccaagctccaagtcagtctaccgacaagaaggatggtactttgcagcccaactctggagcgaacaggacagtgatatggaagatggataatggcaggaccatgatcatcaccggttcagaatttactcctgaagacgcagcaaggatacccaagcgtcagagaggaagaaataccttccgaggagcgcgtcagctaacccgtcatctcataaagtacggtccgcccagacccgaagatgatgaatcaggagaacggttttctgctgatgacaatgacgacaacgatgatgataatgatgacaatgatgatgcgacccttgactgtttcagggaaagagagtgaagttcaaagcatgtgctagatgtgggatagtcggacacactgctagctattgcctccccacatgccgctgtggtgaatatacccattactcagatgcatgcctgcag

SEQ ID NO: 14308 - DNA, 4911 bp, Oryza sativa
  Clone ID: TFbOSC13851j.C1.o2.fg
atgccgcgctacaagcctgagtacttgtttggttttgagggatttgtccaggagttgcgtaccataggatttgggactgcccctttgtatgcccagattcctcatgatcgtcacgaagagaagtgccgagtcaaagtcaccttgaacagtaatagtgaagatatcccatcagtgatgttcgaagctggaggaggaaactacatccatgcatgtcaggaggtggcaaggatcgccataggagagctccgcgatcgctacagtgatcagttggctgacactgagtatcgctaccatcctcgccaaccccagggaagtgaccgtggcagctaccttgagactgaggggattgagaatgatgctaccacaaggcatttggttgagatgctgtgggctatggatgaaacccgcgcggaggttgtgctagcagctcaagatcgtgaagaccggaatcgtggtaagatttgcaggctagaggacaaggtggatcgtttgaagaaggaactagccgcgttgaagggagaagcaccaccgcagaaggccaggattcatcttaccgcaaggaagagagctctatttgtccctcgctaccaattggcgccaaaggtccgtgtggtggagaaagaagttaccccagccctagcggatcctccggtcgtcaataacaagttagcagaatttattcgtgtgaggccgcccactttctctagcaccactaatcctgttgaagctggcgattggttgcatgccatagagaagaagttggatttgcttcagtgcactgatcaggagaaggtctcatttgcatcacatcagctgcatggccctgcctctaagtggtgggatcacttccgccttaacagaactactgctgaacctatcacttggcttgaattcaccgctgctttccggaagacgcatataccatcgggagcggtgtctctcaagaagaaggaattcaggtcgctcacccagggatctcgcacggtcaccgagtatctgcacgagttcaaccgtctggctcgttatgctccggaagatgtgcgcactgatgaagagcgccaggagaggttcttggaaggacttaatgatgagctttcttacccactcatgactggggattatcatgatttccagaagttagtggataaggctattcgccaggaggacaagtacaaccgcatggagcagaagaaacgccggattgctcacttcaaggcacaacaggggaatagtcagaggccgcgtcttactttaggaccccagtccatgccacagggaggttcttcgtctgttgttcgtccgcagtgtcagttcttcaacaacaatgctggcaacaacatccgcaatcaagctccacgccctgttgcagctccaacacagcaacagcctgccaagagggagcaaggtagcaagcccggggtgtgcttcaactgtggagacccaggacattactctgacaagtgttcgaagccccgacgcgtgaaggttgtcccggcccagagcaactctaccgcaccagcatcaaaggctcgtgtcaatcatgttgctgctacagaagctcaaggtgctccagatgtgattttgggtacgttccttgtcaactcagttcctacaacagtgcttttcgattctggtgctacacattcatttttatctatgagttttgcgggaaatcatgggatggaagtagaagatcttatacgtcctttgatggttagtaccccaagtaatcaagcactctctttgcaacgtagcccctctgtcagaatagaaattcaagaagtaccatttctggccaatcttatcctgttagaatccaaagaccttgatgtcatcctagggatggactggttagccagatataaaggtgtgatagactgtgccaacagaaaagtaactctcaccagcaatgatggtcgagttgtaactgttcatgcattgtcttctgagtctttaaggtcaagactgaaccaaatgactttggaagagattcctatagtccgggagtatcccgatgtgttcccagacgatttacctggtatgccgcctaaaagggatatagagttcagaatagatttggtaccaggaacaactccgatccataagagaccttatagaatggcggccaatgaattagcagaagtcaagagacaagtagatgatttgcttcagaaaggatacatcagaccgagttcatctccatggggagctccggttatttttgtggaaaagaaagatcatacccagaggatgtgtgtggactatcgtgcactaaatgatgtgactatcaagaataagtacccgctgcccagaattgatgatttgtttgatcagcttaaaggtgccaccgttttctccaagatagatcttcgatcagggtatcaccagttgagaatcaaagaggaagatatacctaagacagcttttatcactaggtatgggttgtttgaatgtactgttatgtcttttggacttaccaatgcccccgctttcttcatgaacttgatgaataaggtgtttatggaatacctagacaagttcgtggtggtctttattgatgacattcttatctactctcgaacaaaagaagagcatgaagaacatcttcgccttgcactagagaagctacgagaacatcaactgtatgccaagtttagcaaatgtgaattttggttgtttgaagtgaagttccttggtcacgtcatctcagccggaggagttgccgtcgatcctagtaatgtggaatccgtaaccaactggaaacaaccaaagacagtttcagagattcgtagtttcctaggcctcgcaggatattatcggaggtttatagagaatttttccaagattgctaagcccatgacacgattacttcaaaaggatgtaaagtacaagtggtcagaagaatgtgagcagagttttcaagagttgaagaatcgcttaatatcagctcctattttgattttgcctgatccaaagaagggttttcaagtgtattgtgatgcatccaagcttgggttaggttgtgttctgatgcaagatgggaaggtggttgcctatgcatctcgtcagttacgtccgcatgagaagaacaaccctactcatgatcttgagttagctgcagttgttcatgcgttgaagatttggcgtcattatcttttcggtactcgtacagaggtatacaccgatcacaagagtttaaagtacatctttactcagccagatctgaacatgagacaacggagatggttggaattaattaaggattatgacatgggaattcattatcacccgggaaaggctaatgttgtagcaaatgctcttagcaggaaaggctattgcaatgctacggaaggacgacagttgccattggagttatgcaaggaatttgaaagattaaatttgggaattgtcagtagaggttttgttgcagccttagaagcaaagcccactctaattgatcaagttagagaagcccaaattaatgatcctgatattcaagaaatcaagaagaatatgagaagaggaaaagctatcagtttcttggaagatgagcaaggaactgtatggttgggcaagagaatctgcgtccccgacaacaaagatttaaaagatgcaattctgaaagaagctcatgatactttatactccattcaccctggtagtaccaagatgtaccaggatctcaaggaaagattttggtgggcaagtatgaagcgtgaaatcgcagaatatgtagcagtatgtgatgtttgtcagcgagtcaaggcagaacatcagaaacccgcaggtttgctgcagcctttgaagattcctgaatggaagtgggaggaaatcggtatggatttcatcactggtctacccagaacatcattaggccatgactctatttgggtgatagtcgacagacttaccaaagtggctcatttcattccggtaaagacaacttattccggaagtcgcttagcggaattgtatatggcaaggattgtgtgtttgcatggcgtccctaagaagatagtgtctgatcgaggcagtcagtttacttcaaatttttggaagaaacttcaggaagagatgggttctaagctgaactttagtactgcttatcatccgcagacagacggacaaaccgaaagggtgaatcaaattttggaagacatgttgagagcttgtgctctagatttcggtggaagttgggataagaatctaccctatgcagaattttcgtacaacaacagttatcaagctagtcttcagatggctccttacgaagcactgtatggtcggaagtgtcgcactccgcttttgtgggatcaaacgggagaacgtcaggttttcggaacggatatcctaagggaagcagaagaaaaagtaaagattatccaagagaggttgcgcgttgctcagtctcgtcagaagagttatgccgacaatcgtcgcagagatttggctttcgaagaaggagattatgtatacctgcgggttacgccgttacgaggtgttcatcgtttccaaaccaaagggaaattggcaccgcgttttgtgggaccttttaagattgtgagtcgaagaggtgaagtagcttatcagttagagttgcctccgtcaatggcgggaatacacgacgtgttccatgtgtctcagctgaagaaatgtttacgtgtacctacagaggaagcagatcctgatcgtatagagcttcaagaagatttaacttatgttgagaagccagtcagaattttggaagtaagcgagaggaataccaggaatcgcgttatacggttctgcaaggttcagtggagtaatcattcagaagaagaagccacttgggagcgagaagatgaattgaagtcagctcatcctcatctgttcgccagttcttctgaatctcgaggacgagattccgtttaa

SEQ ID NO: 14309 - DNA, 5240 bp, Oryza sativa
  Clone ID: TFbOSC33758j.C1.o1.np
atggccgactgtcccctcacgcaccaaggtcagactatgggaggcttcgttgcagagttgtcccgcatagcgtttgtgattggttttccaagggagccgcagtacaccagcattcaccccctcagtggcgaattcccgcatcaggtccgcttggagattcatgacatacccacctacctgcccaacatggaggtgacagcttgtgggggcacatttgagcatgcttgtgaggaggccgccctcaggatgatggcccatctgagggagctgcatgacggcgtcctgaacaccaccgcctaccgcttccacccttgccgcggttccagctccaacagcagcaccttcaagtcagcgtggggagagaacgacgtcaccttcggccacatgagtgacgtgatgaggagctacgacaagttgcacgccatgctccacaaagcgaccaagagtctcaacgaccagaagcttgtgaggatcgcagatctgcaggatgagaacgctcgactcaagaaggaggtccctaggctttagggacgtccaccgccaggaggagcccgcatccgcaccacgccaaggaagtcgaccacagctccagtgcgcatccagcttgcgcctaggaacccgccgcagcctccacctctagcaccgcctgcagctccggcgccagctccagttctagctccagctccatctaccgcagcatcttcagcccccgtgctagagttcggcttcactttcgtgccagcttcggcctacaggggtctagcaggtggcagtggaggatgcttcctttagatggtcaacactaggaatggcagccgtgcagcaggtgagggcaacaacagcgaagaacgcaccgacggtggataccccaacagtgcctccggcaatggtccgccaccgctccccgagaatccgactcttgcataagtgatggcccatcagacccagatgatggcagccatgatgtagcagatgcagcagcagcaccagcagatgcaccagaggatgcagcagcaggctgagcagcagcaacagcagtttggtccccctcccccttagtccaagctgctggagtttctacgagtcaggccacccaccttctccagcaccaccaaccccatggaggcaaatgactggctccatgccatagagaagaaactcaatcttctgcagtgcagtgataaggagaaagtcgccttcgccacacaccagctccagggtcccgcgtcagcttggtgggacaaccacatggctacccgtccgccaggcacagaggtcacctgggcagaattctgtcgcagcttcaggaaggctcaggtgctagacgaggatgtggcacaaaagaagagagtattccgggcactccaccaaggcaacaggacagtaaccgagtacttgcatgagttcaatcgcctagcgcgatatgcaccggaggatgtccgcactgacgcagagaaataggagaagttcctagcgagcctggatgacgaactgaccaaccagttgatctccggggattacgctaacttcgagaagctggtagacaaggcaatccgtcaggaggaccagcgcaacaaaatggataggaagagaaaggcaactcagttccgatccaaccaaggaagtcatcagcgaccgtgcttcacttccggataacagggtggacctaccaccatgattgttcgacagcatcatccttacaacccaagcaacttccatcccggcagcagtggcagccatcttggctaagggcagcacaaccgcggcgcagccccacgcccgccaatggcgccagttcagcagactgcacccgttcccccaaagaaggacaccggaggcaagccaggagcctgcttcaactatggtgagtctggtcacttcgccaacaagtgcccgaagccgaggcgcgctggacccaagtttgtccaggctcgggttaaccacgcgtccacagaagaggcgcaagcagcaccagaggtcgtattgggtacgtttcctgttaactcaatccctgcaacagtacttttcgattctgatgcaacgcattcattcatttcaaagaagtttgttggggtgcatgggttaagaaaagaagagcttagtacaccaatgagggttcataccccgggaaatagttcaacctcggtcagttatagcccttccgtgctaatagaaatccaaatatcacgatttctacccaacctcatccttctcgaatccaaagacctagatgtcatccttgggatggattggctgaccaagttcaagggtgtcattgattgtgcgaatcgcacagtcactttgaccaatgagaagggagaaaccatggtgtacaagtcaccagtctcaccgaatcagggaatctccttgaatcagattgaggtggaaaatccggtggtcaccgaggagaagggttcgaggaaattggaaggtattcccattgtctgcgagtatccagaagtgttccctgaggacctcactaccatgccacccaagagggagatcgaattccggattgatttggcaccgggaactgctccaatttacaagagaccgtacagaatgacagccaacgtgctagcagaggtcaagaagcaggttgatgagcaactgcagaaagggtacattcgaccaagtacttcaccttggggtgctccagtcattttcgtggagaagaaggacaaaacgaagagaatgtgtgtcgattattgcgcactcaatgaggtcaccatcaagaacaaatatcctttgccgcggatcgatgatctatttgatcagctgaaaggagccaaggtgttttccaaaatagacatacgatcaggctatcaccaattgagaatccgggaagaggataatcccaagacagccttcaccactcagtatgagttgtatgagtgcacggttatgtcttttgaactcaccaatgcacctgcattcttcatgaacctgatgaacaaagtgttcatggaatttctggataagtttgtcatggtattcattgacgacattcttatctattccaagtcggaagaagagcatgagcaacatctccgtctggtactcgagaagttgaaggagcactagttatatgccaagttcagtaagtgtgacttctggttgtcggaagtcaaatttctgggtcacgtcattacggcccaaggtgtggcagtggatccatcgaatgtggagtaagttacctagtggaccccacctaagacagtgtcacagatttggagtttccttggacttgcgggttatttccgtcggttcattgaaaatttctctaggattgccagacctatgactcagttgcttaagaaagaagaaaagttcaagtggacggccgagtgtgacaagagttttgaagagctcaagaataaattagtgtctgctccagttctgattctgcccgataagacgaaagacttccaagtcttctgcgacgcgtcccgccaagggctaggatgtgttctgatgcaagaaggtcaagtggtcgcatatgcctcgcggctattgcgcccacatgaaagcaattatcctacccatgatttagagttggcagcagtagtccacgctctaaaaatctggcggcactacctcgtcggtaaccgttgtgaagtttacacggatcacaagagtctgaagtatatcttcacccagcctgatttgaatctccgacagcgaagatggttggaattgataaaagattacgacatggggatacactaccatccaggcaaggctaatgtagtagcagacgctctgagcaggaaaagctactgcaacgccttgggtattggagacatgagtgacaagttgctacaagagcttgaacccctcaacttaggaattgtagaacacgggtacgtggctgcccttgaggcacagcccatgctcgtggaccaggtccgagcagctcaggtaaatgatcctgaaatagctgagctgaaaaagaatatgagggtcggaaaagcccaggatttccatgaagatgaacatggcacaatctggttgggagaaagatttgaaagacctgatactcaccgaggctcatcagactcaatactccattcatccaggaagtacaaagatgtataaagatctcaaggaaaaattttggtgggccagcatgagaagggaaatagtggagtttgtcgcactctgcgatgtttgtcagcgagttaaggcagaacatcagagacccgcaggattattacaacccctctagatcccggaatggaaatgggaagaaattggaatggatttcatcacgggtttgcccaggacatcatcagggcacgattgtatctacatgggtcatgtgtctgcatggggtacctaagaagattgtatctgatcgagggagtcagtttacctcaaaattttggcagaagctgcaagaggaattggggacccgtttaaatttcagcacagcttaccatcctcagacagatggccagaccgagagggtcaatcagatcttggaggatatgctgcgagcctgtgcactcgattttggcggagcttgggataagagtctgccttatgctgaattctcttacaacaacagctacgaggccagtttacaaatggctccatttgaagcattgtatggccggaagtgccgcacacctctcttttgggatcaaaccggcgaacgtcagttgttcgggacagaagtgctaactgaggcagaggagaaagtcagaactatcagggaaaggctgaggattgcacaatctcgacagaaaagctacacagacaaccgtcgaagagagctcacttttgaagtgggggattatgtgtaccttcgtgtcactccgctccggggagtgcaccgtttccagataaagggcaagttggcaccacgcttcgtgggaccatacaaaatcttggaacaaagaggagaagttgcatatcagctagaactcccatccaacatggccggtatacatgatgtgttccatgtgtctcagttaaagaagtgcttaagggtactgggagaacaagccaattcggagcacatcgatatccaagaagatctgacttatgtggagaagccagttcgcatccttgagaccaatgaaaggaggactagaaacaaggtcaccaggttctacagggttcagtggagccaccactcagaggaagaagcaacctgggaaagggaagatgagttgaaggccgcccatccgcacctcttcgccagctcttccgaatctcggggtcgagattccgtt

SEQ ID NO: 14310 - DNA, 4911 bp, Oryza sativa
  Clone ID: TFbOSC900091j.C1.o16.fg
atgccgcgctacaagcctgagtacttgtttggttttgagggatttgtccaggagttgcgtaccataggatttgggactgcccctttgtatgcccagattcctcatgatcgtcacgaagagaagtgccgagtcaaagtcaccttgaacagtaatagtgaagatatcccatcagtgatgttcgaagctggaggaggaaactacatccatgcatgtcaggaggtggcaaggatcgccataggagagctccgcgatcgctacagtgatcagttggctgacactgagtatcgctaccatcctcgccaaccccagggaagtgaccgtggcagctaccttgagactgaggggattgagaatgatgctaccacaaggcatttggttgagatgctgtgggctatggatgaaacccgcgcggaggttgtgctagcagctcaagatcgtgaagaccggaatcgtggtaagatttgcaggctagaggacaaggtggatcgtttgaagaaggaactagccgcgttgaagggagaagcaccaccgcagaaggccaggattcatcttaccgcaaggaagagagctctatttgtccctcgctaccaattggcgccaaaggtccgtgtggtggagaaagaagttaccccagccctagcggatcctccggtcgtcaataacaagttagcagaatttattcgtgtgaggccgcccactttctctagcaccactaatcctgttgaagctggcgattggttgcatgccatagagaagaagttggatttgcttcagtgcactgatcaggagaaggtctcatttgcatcacatcagctgcatggccctgcctctaagtggtgggatcacttccgccttaacagaactactgctgaacctatcacttggcttgaattcaccgctgctttccggaagacgcatataccatcgggagcggtgtctctcaagaagaaggaattcaggtcgctcacccagggatctcgcacggtcaccgagtatctgcacgagttcaaccgtctggctcgttatgctccggaagatgtgcgcactgatgaagagcgccaggagaggttcttggaaggacttaatgatgagctttcttacccactcatgactggggattatcatgatttccagaagttagtggataaggctattcgccaggaggacaagtacaaccgcatggagcagaagaaacgccggattgctcacttcaaggcacaacaggggaatagtcagaggccgcgtcttactttaggaccccagtccatgccacagggaggttcttcgtctgttgttcgtccgcagtgtcagttcttcaacaacaatgctggcaacaacatccgcaatcaagctccacgccctgttgcagctccaacacagcaacagcctgccaagagggagcaaggtagcaagcccggggtgtgcttcaactgtggagacccaggacattactctgacaagtgttcgaagccccgacgcgtgaaggttgtcccggcccagagcaactctaccgcaccagcatcaaaggctcgtgtcaatcatgttgctgctacagaagctcaaggtgctccagatgtgattttgggtacgttccttgtcaactcagttcctacaacagtgcttttcgattctggtgctacacattcatttttatctatgagttttgcgggaaatcatgggatggaagtagaagatcttatacgtcctttgatggttagtaccccaagtaatcaagcactctctttgcaacgtagcccctctgtcagaatagaaattcaagaagtaccatttctggccaatcttatcctgttagaatccaaagaccttgatgtcatcctagggatggactggttagccagatataaaggtgtgatagactgtgccaacagaaaagtaactctcaccagcaatgatggtcgagttgtaactgttcatgcattgtcttctgagtctttaaggtcaagactgaaccaaatgactttggaagagattcctatagtccgggagtatcccgatgtgttcccagacgatttacctggtatgccgcctaaaagggatatagagttcagaatagatttggtaccaggaacaactccgatccataagagaccttatagaatggcggccaatgaattagcagaagtcaagagacaagtagatgatttgcttcagaaaggatacatcagaccgagttcatctccatggggagctccggttatttttgtggaaaagaaagatcatacccagaggatgtgtgtggactatcgtgcactaaatgatgtgactatcaagaataagtacccgctgcccagaattgatgatttgtttgatcagcttaaaggtgccaccgttttctccaagatagatcttcgatcagggtatcaccagttgagaatcaaagaggaagatatacctaagacagcttttatcactaggtatgggttgtttgaatgtactgttatgtcttttggacttaccaatgcccccgctttcttcatgaacttgatgaataaggtgtttatggaatacctagacaagttcgtggtggtctttattgatgacattcttatctactctcgaacaaaagaagagcatgaagaacatcttcgccttgcactagagaagctacgagaacatcaactgtatgccaagtttagcaaatgtgaattttggttgtttgaagtgaagttccttggtcacgtcatctcagccggaggagttgccgtcgatcctagtaatgtggaatccgtaaccaactggaaacaaccaaagacagtttcagagattcgtagtttcctaggcctcgcaggatattatcggaggtttatagagaatttttccaagattgctaagcccatgacacgattacttcaaaaggatgtaaagtacaagtggtcagaagaatgtgagcagagttttcaagagttgaagaatcgcttaatatcagctcctattttgattttgcctgatccaaagaagggttttcaagtgtattgtgatgcatccaagcttgggttaggttgtgttctgatgcaagatgggaaggtggttgcctatgcatctcgtcagttacgtccgcatgagaagaacaaccctactcatgatcttgagttagctgcagttgttcatgcgttgaagatttggcgtcattatcttttcggtactcgtacagaggtatacaccgatcacaagagtttaaagtacatctttactcagccagatctgaacatgagacaacggagatggttggaattaattaaggattatgacatgggaattcattatcacccgggaaaggctaatgttgtagcaaatgctcttagcaggaaaggctattgcaatgctacggaaggacgacagttgccattggagttatgcaaggaatttgaaagattaaatttgggaattgtcagtagaggttttgttgcagccttagaagcaaagcccactctaattgatcaagttagagaagcccaaattaatgatcctgatattcaagaaatcaagaagaatatgagaagaggaaaagctatcagtttcttggaagatgagcaaggaactgtatggttgggcaagagaatctgcgtccccgacaacaaagatttaaaagatgcaattctgaaagaagctcatgatactttatactccattcaccctggtagtaccaagatgtaccaggatctcaaggaaagattttggtgggcaagtatgaagcgtgaaatcgcagaatatgtagcagtatgtgatgtttgtcagcgagtcaaggcagaacatcagaaacccgcaggtttgctgcagcctttgaagattcctgaatggaagtgggaggaaatcggtatggatttcatcactggtctacccagaacatcattaggccatgactctatttgggtgatagtcgacagacttaccaaagtggctcatttcatcccagtaaagacaacctattccggaagtcggttggcggaattgtatatggcaaggattgtgtgtttgcacggcgtccctaagaaaatagtgtctgatcgaggcagtcagtttacttcaaagttttggaagaagcttcaggaagagatgggttctaagctgaactttagtactgcttatcatccgcagacagacggacaaaccgaaagggtaaaccagattttggaagacatgttgagagcttgtgctttagacttcggtggaagttgggataagaatttgccttacgccgaattctcgtacaacaacagttatcaagctagtcttcagatggctccttacgaagcactgtatggtcggaagtgccgcactccacttttgtgggatcaaacgggagaacgtcaggttttcgggacggatatcctgagggaagcagaagaaaaggtgaaaatcattcaagaaagattgcgtgtggcccagtctcgtcataagagttatgccgacaatcgtcgtagagatctaagttttgacgaaggagattatgtgtaccttcgtgtcacgcctcttcgaggagttcatcgttttcacaccaatggaaaattggcaccgcgttttgtgggaccttataagattgtcagtagaagaggagaggttgcttatcagttggagttacctcaatctttggcaggaatccataatgtgttccatgtgtcgcaattgaaaaagtgtttaagggtacctaccgaagaagctaatcttgaacagatagaagtccaagaggatctgacctatgttgagaaaccaatccgtatcttgaaaatagatgagagaagaaccagaaatcgagttatccatttttgtaaagttcaatggagtaatcactcggaagaagaatcaacttgggaacgagaagatgaattgaagtcagctcatccgcatctgttcgccagttcttccgaatctcgaggacgagattctgtttaa

SEQ ID NO: 14311 - DNA, 4356 bp, Oryza sativa
  Clone ID: TFbOSC900107j.C1.o19.fg
atgaccaggagaagtgctaataccggtgatggcaaccaacccgaaggcatcaacctcaacaaccatggcagcccacctccacctcctcctccgcctccaccaccaccaccagacaccaacgccatcctcacccaaatcctcgcccagcaagccaacatgacggctgctttcctccaccacatccaaaatccaccacagcataatgctccacctccaccaccacccccgcaacactctaagctcgccgagttccttcgcattcgcccgcctaccttctccagctccaataaccccgtggatgccttggattggttgcatgcagtggggaagaagttagacactgtgcagtgcaacgatgaggagaaagtcatctttgccacccaccagctgcaggggcccgcatctctatggtgggaccacttccaggctacgcagcccgaggggcagcctatcacctgggcccgtttcaccgccgctttccggagaacccatgtgcctgccggagtcatggcccttaagaaaagggaattccgggagttgaagcaaggcaaccgctccgtgatggagtatttgcatgagtttaacaacctggcccggtacgccccggaggacgttcgggaagatgaggaaaagcaagagaagttcttggcgggaatggactctgagctgtccgtacgtctggtgtccggggactatccggatttccaacgtctagtggacaagagcatcctcttggaggccaagcacaaagaattggagtcgcacaagcgtcgcttggcgaatttccgcaatcaacagggggctaaccaaagggtccgctacaccaatccctatctagggggatcctcctcgcagcagcaacagcagcaacctcgctccgcgccccgacctcaatttgtggtgcgcgttccccagccgcagcaacctcagggccagcaagggccccgtgcaccccgtcctcctgcgccagctgtgcagcctggtcaaggccacagagacgtacaaggtcagcagcgtctgtgcttcaactgcttcgaacccgggcactttgcggaaaaatgcccgaagccacgacgccagcaaggccaagcgcctccccgccccaacaacggtggtaaggacgtcgctcggggtcatgtgaaccacgtgactgccgaggatgtgctgacaactccagacgtcatcgttggtacgctcctcatccattccatccctgctaccattttgttcgactctggagcttcccactcgtttatatctgtgacattcgtggggagaaatcagttgggtgtagaaaggcttaggaaccctatgctcatcaccacccctggaggggttatgacagcgaagtattatagccctgccattcccatagaaattcagggaattccgtttccctcggatctgattcttctagacaccaagaacttggatgtgatccttgggatgaattggttggctcaattccaaggagtagtggattgtgcaagacgcactgtcactctgtaccgagggccagaacaaccggttgttttctttgcacccccaacctctgtcagtagttcagaacttcatcagataggactgtcagaaatccccatcgtcagagagttcggagacgtgtttccggaagaactacccggtatgccgcccaagcgagagattgagttccggatagatcttgctccaggaaccactcctctgtacaagcgaccctaccgtatggcagcaaatgaactggccgaagttaagaaacagttggaagagttgaaaggaaaggggtatatacgtccgagcacttccccctggggtgctcccgtaatttttgtggagaagaaagacaagacaaagaggatgtgtgtcgactacagagctctcaatgaagttactatcaaaaacaagtaccctcttccccggatcgatgatctgttcgatcagcttaaaggtgccacggtattctccaaaattgatcttcgctccggatatcaccagttgcgcatccgtgaagaagatatcccgaagactgcattcaccatgcgatacgggctgtatgaattcacggtgatgtcgttcggtctgactaatgctcctgctttcttcatgaacttgatgaacaaagtgttcatggagtacttagataagtttgttgtggtcttcatcgacgacattctagtgtactcgcaatcagaggaagaccatcaacaacatctctgtctggtgttgggaaagttgcgggaacatcaattgtatgccaagcttagcaagtgtgagttctggttgtccgaagtcaaattcttagggcacatgatatctgctaaaggagtcgctgtggaccccgaaacagtgaccgccgtcaccgattggaagcaacccaagacagtcactcaaattcgcagtttcttaggtttggcaggatactaccggaggttcatcgagaacttctccaaaatcgctcgacctatgacacagttgttgaagaaagaagagaaatttgtgtggagcccgcaatgcgagaaggcgttcaaaacactcaaagaaaagctggtttcctcgccagtgttaatcttgccggatactcacaaagacttcatggtgtattgtgacgcttcgcgccaaggactggggtgcgtgctcatgcaggaaggtcatgtggtagcctatgcctcccgccagttacggcctcatgaaggcaactaccctacccatgatttggagttagccgcggtgagaagatggttagagctcatcaaggattatgatgtgggaatccactatcatcccggtaaggccaatgtggtcgccgacgctctaagtcgaaaaagccattgcaacactcttaacgtccgtggcattccacccgaacttaatcaacagatggaagccctgaacctaagcatagttggtcgcggattcttggctgcgttggaagccaagcctaccttgctcgatcaaatccgcgaggctcagaagaatgatccggacatgcgtggactcctcaagaatatgaaacatggtaaagccgctggtttcacagaggatgaacacggcaccctatggaacggaaatcgggaagctcacgaaagtccttattccatccaccctggcagtacgaggatgtacttagacttgaaggagaaatactggtgggttagtatgaagcgggaaattgcagagttcgtggccctttgtgatgtgtgccagcgtgtcaaagcagagcatcaacgaccggccggacttctccaacctctccaaataccagaatggaaatgggatgaaattgggatggattttatcactggacttccaaaaacccaaggtggatatgattctatatgggtagttgtggaccgactaaccaaagtagctcgctttattcctgtaaagaccacatatggaggaaacaaactagctgaactctatttcgccaggatcgtaagtctgcgtggcgttcccaagaaaatcgtatctgatcggggaagtcagttcacctctcacttttggaagaaactccaagaagagttgggtacccgattaaatttcagcaccgcgtatcatccgcagacagatggtcaaaccgagcgtctaaaccagatcctcgaggatatgcttcacgcatgtgtcctagatttcgggaaaacctgggataagagtctcccctatgccgagttctcctacaataacagctaccaagccagcatacaaatggcaccctatgaagcgttgtatggacgcaaatgtcggacaccgctattgtgggaccaagttggggaaagccaagtgttcgggaccgatatcctgagagaagccgaagctacggtcagaaccattcgggaaaacctaaaggtggcacagtctcggcagaagagttatgcagacaaccgacgccatgacctggaattcgcagtggatgactttgtgtatctccgggtaacgccattgcgaggggtacacaggtttcagacaaaagggaagctcgcacctcgattcgtgggtcctttccgcatcactgctcgacgcggagaagtagcttaccaattggagctgcctgcttccttgggcaacgtgcatgatgtgttccatgtgtcgcaactcaagaaatgtcttcgagtgccgtccgagcaggctgactcagagcagattgaagttcgcgaagacttgacctacgtggagagaccagtgaaaatcctggacaccatggagcgcaggaccaggaatcgggtaatccgtttttgcaaggtccaatggagcaaccatgccgaggaagaagctacttgggagcgtgaagaagagctgaaggcagcccatcccgatctcttcgccagttcttccgaatctcggggtcgagattccgtttaa

SEQ ID NO: 14312 - DNA, 5430 bp, Oryza sativa
  Clone ID: TFbOSC900142j.C1.o3.np
ctgcttcatttattgtcaaaatataatccttaaaatgttgcttctctattttgtttttgtttgtagatggccggcagcatcacccgtcgtggactggacttgactggcttcgttttggagctgcggggcatgtgcattgtcttggggtatccacatggagtggactaccagggcaggccgctcccggagcaggagggcgacgaggcagagcccgtcgctgcttgggaggtcactgcagtgatcctcttcttctcacctgagaggacttcgctggcagtcaccgcgggtggagattccttctccgccgcttgccagaatgccgctctcctcgccatcggcactctgcaccagcgctacccggacgagttgcagcactcgccctaccgctaccaccctcgccgcggaggagcccgcgactacgccaccttccgggatgctagctcggaggatgacgctaccatcatgcacctggcgcgcatggtggaggcgtacgacgcggctcgcatcgacttccatcagatggtgcgccgtgggttggtcgagaacaacctgaagatcctggagctgcgtcaggagaatttgcagctgaagaaggacctagatgcagtggaggcgcagctgcatcagctcaagatcgcccagggagaggtcggtcgtcccaagcgccgccgcgtctgccgcagccagaagatcaccgctcgcaagagtacctccaggcccgagcttgttcgtcagtccctggcgtggacctgcttcgtggagacccctcgtgccgagcccgcgcccgtggttcctcaggagggggagacctccggcgttggtagcacgaaggatgcgctgctgctcaccttctgtcctggcccgtcgcagcgtcagctctctctgtttgctggttccgtgtggggttttcagatggtgatgaccaggagaagtgctaataccggtgatggcaaccaacccgaaggcatcaacctcaacaaccatggcagcccacctccacctcctcctccgcctccaccaccaccaccagacaccaacgccatcctcacccaaatcctcgcccagcaagccaacatgacggctgctttcctccaccacatccaaaatccaccacagcataatgctccacctccaccaccacccccgcaacactctaagctcgccgagttccttcgcattcgcccgcctaccttctccagctccaataaccccgtggatgccttggattggttgcatgcagtggggaagaagttagacactgtgcagtgcaacgatgaggagaaagtcatctttgccacccaccagctgcaggggcccgcatctctatggtgggaccacttccaggctacgcagcccgaggggcagcctatcacctgggcccgtttcaccgccgctttccggagaacccatgtgcctgccggagtcatggcccttaagaaaagggaattccgggagttgaagcaaggcaaccgctccgtgatggagtatttgcatgagtttaacaacctggcccggtacgccccggaggacgttcgggaagatgaggaaaagcaagagaagttcttggcgggaatggactctgagctgtccgtacgtctggtgtccggggactatccggatttccaacgtctagtggacaagagcatcctcttggaggccaagcacaaagaattggagtcgcacaagcgtcgcttggcgaatttccgcaatcaacagggggctaaccaaagggtccgctacaccaatccctatctagggggatcctcctcgcagcagcaacagcagcaacctcgctccgcgccccgacctcaatttgtggtgcgcgttccccagccgcagcaacctcagggccagcaagggccccgtgcaccccgtcctcctgcgccagctgtgcagcctggtcaaggccacagagacgtacaaggtcagcagcgtctgtgcttcaactgcttcgaacccgggcactttgcggaaaaatgcccgaagccacgacgccagcaaggccaagcgcctccccgccccaacaacggtggtaaggacgtcgctcggggtcatgtgaaccacgtgactgccgaggatgtgctgacaactccagacgtcatcgttggtacgctcctcatccattccatccctgctaccattttgttcgactctggagcttcccactcgtttatatctgtgacattcgtggggagaaatcagttgggtgtagaaaggcttaggaaccctatgctcatcaccacccctggaggggttatgacagcgaagtattatagccctgccattcccatagaaattcagggaattccgtttccctcggatctgattcttctagacaccaagaacttggatgtgatccttgggatgaattggttggctcaattccaaggagtagtggattgtgcaagacgcactgtcactctgtaccgagggccagaacaaccggttgttttctttgcacccccaacctctgtcagtagttcagaacttcatcagataggactgtcagaaatccccatcgtcagagagttcggagacgtgtttccggaagaactacccggtatgccgcccaagcgagagattgagttccggatagatcttgctccaggaaccactcctctgtacaagcgaccctaccgtatggcagcaaatgaactggccgaagttaagaaacagttggaagagttgaaaggaaaggggtatatacgtccgagcacttccccctggggtgctcccgtaatttttgtggagaagaaagacaagacaaagaggatgtgtgtcgactacagagctctcaatgaagttactatcaaaaacaagtaccctcttccccggatcgatgatctgttcgatcagcttaaaggtgccacggtattctccaaaattgatcttcgctccggatatcaccagttgcgcatccgtgaagaagatatcccgaagactgcattcaccatgcgatacgggctgtatgaattcacggtgatgtcgttcggtctgactaatgctcctgctttcttcatgaacttgatgaacaaagtgttcatggagtacttagataagtttgttgtggtcttcatcgacgacattctagtgtactcgcaatcagaggaagaccatcaacaacatctctgtctggtgttgggaaagttgcgggaacatcaattgtatgccaagcttagcaagtgtgagttctggttgtccgaagtcaaattcttagggcacatgatatctgctaaaggagtcgctgtggaccccgaaacagtgaccgccgtcaccgattggaagcaacccaagacagtcactcaaattcgcagtttcttaggtttggcaggatactaccggaggttcatcgagaacttctccaaaatcgctcgacctatgacacagttgttgaagaaagaagagaaatttgtgtggagcccgcaatgcgagaaggcgttcaaaacactcaaagaaaagctggtttcctcgccagtgttaatcttgccggatactcacaaagacttcatggtgtattgtgacgcttcgcgccaaggactggggtgcgtgctcatgcaggaaggtcatgtggtagcctatgcctcccgccagttacggcctcatgaaggcaactaccctacccatgatttggagttagccgcggtggttcatgctctaaaaatctggcggcattatctcattgggaatcgctgcgaaatatataccgatcataagagtttgaaatacatcttcacctagtcggatctgaatcttcggcagagaagatggttagagctcatcaaggattatgatgtgggaatccactatcatcccggtaaggccaatgtggtcgccgacgctctaagtcgaaaaagccattgcaacactcttaacgtccgtggcattccacccgaacttaatcaacagatggaagccctgaacctaagcatagttggtcgcggattcttggctgcgttggaagccaagcctaccttgctcgatcaaatccgcgaggctcagaagaatgatccggacatgcgtggactcctcaagaatatgaaacatggtaaagccgctggtttcacagaggatgaacacggcaccctatggaacggaaatcgggtatgcgttccagataacagagaacttaaacagctgatactttaggaagctcacgaaagtccttattccatccaccctggcagtacgaggatgtacttagacttgaaggagaaatactggtgggttagtatgaagcgggaaattgcagagttcgtggccctttgtgatgtgtgccagcgtgtcaaagcagagcatcaacgaccggccggacttctccaacctctccaaataccagaatggaaatgggatgaaattgggatggattttatcactggacttccaaaaacccaaggtggatatgattctatatgggtagttgtggaccgactaaccaaagtagctcgctttattcctgtaaagaccacatatggaggaaacaaactagctgaactctatttcgccaggatcgtaagtctgcgtggcgttcccaagaaaatcgtatctgatcggggaagtcagttcacctctcacttttggaagaaactccaagaagagttgggtacccgattaaatttcagcaccgcgtatcatccgcagacagatggtcaaaccgagcgtctaaaccagatcctcgaggatatgcttcacgcatgtgtcctagatttcgggaaaacctgggataagagtctcccctatgccgagttctcctacaataacagctaccaagccagcatacaaatggcaccctatgaagcgttgtatggacgcaaatgtcggacaccgctattgtgggaccaagttggggaaagccaagtgttcgggaccgatatcctgagagaagccgaagctacggtcagaaccattcgggaaaacctaaaggtggcacagtctcggcagaagagttatgcagacaaccgacgccatgacctggaattcgcagtggatgactttgtgtatctccgggtaacgccattgcgaggggtacacaggtttcagacaaaagggaagctcgcacctcgattcgtgggtcctttccgcatcactgctcgacgcggagaagtagcttaccaattggagctgcctgcttccttgggcaacgtgcatgatgtgttccatgtgtcgcaactcaagaaatgtcttcgagtgccgtccgagcaggctgactcagagcagattgaagttcgcgaagacttgacctacgtggagagaccagtgaaaatcctggacaccatggagcgcaggaccaggaatcgggtaatccgtttttgcaaggtccaatggagcaaccatgccgaggaagaagctacttgggagcgtgaagaagagctgaaggcagcccatcccgatctcttcgccagttcttccgaatctcggggtcgagattccgtt

SEQ ID NO: 14313 - DNA, 1629 bp, Oryza sativa
  Clone ID: TFbOSC102322j.C1.o2.fg
atggcgaccaaagcggcgctccgatcgttgtggtcggccttcgacaagcaagcgtcatccatcattgacaagctcgtgtggccttggctgatgccagcggacgataccgaggagggcgcgaagaggcgcgcggaggagattactgaggagctcgcgcagctggagaagaccaggatgacgacgtgggcgcgatcggtggtggagagcttcgacacggcgcctcctcctttccctccgccgctgagcgctactacgcctcatcctcctcctccgtcgcctgcgaccagcagcagcaggacggcgacggcgacggcgacggcgacgccgacctcaccgacaccgacacctcccccgagctctgtcactatgctgtgggcccggtctcgcccgacgaaggaggatgagggggagggcctccagcgacgcacggacgcggtggtcgtgctcgtgcggatgcagagaagggcccgcttcgcggcatggacgaatgcggcgctgcacaacttttggggtgtagaaaggctttctcccggttgggccaacgtctaccggttttgggccaacaagtggtatcagagctcaggtgccatgtctggagatggtgtgtacacgccgccaccgccgccaccgatccgtcgcagcagcggtggcggtggcagcagcagcggcaatggagatggtgtgtacacgccgccaccgatccgtcgcggcagcggtggcggtggcagcagcagcggcaacggcggggatggcagcctaggcggccatgagctcgtcgtgcagcaagtgaaggaggcgggggtgacgttacgctaccccatgctcggggagaacaactacggcgtttgggcggtgaaaatgaaaatttttatgcgtgcacaaggtgtgtgggctgccgtggagggcaacgcagccgatgagaagatggatcaaatggctctcgccgccattgtccaagctgtgcctgaggccatggtgatggccatatccgagaaggaaacggcgagggaggcgtgggacgccctcaagcagatgaacatgggtgaagagcgtgtcaagaaggcccgagtacaaactctcaagagagtgcttcatggtatgtacatgggtaatagtgagaaaattaatgattttgctttgaaggttaccacgatcgtgaacgagattcattctctcggcacgaaagtggaggagaccaccgtcgtggagaagctcttgcattccgttcccgacaagttccaatccctcataagcaccatcgagcagtggggggatgtgtcggagatgacggtgacggagacaattagacgtttgcgggcgttcgaggagtcctccaaggggcgacgtcgtgaaaacgcaggggaggagcagctgcttattgcaggggctgagcaacggctcacacgcactgagtgggaggccattgttgctaaagagaagaagagtgatgaggcctctggcaatggtgagaagaagttccgcggcaagttcaacaaatcgaagattgagtgccgcaggtgtggcaagttcggacacttcgctgacgagtgtgatgagccgcggaagatggccaaggcagtgacgcagcttgtcatcgcggacgcggatgatgagccaacgttgctgtga

SEQ ID NO: 14314 - DNA, 1923 bp, Oryza sativa
  Clone ID: TFbOSC23348j.C1.o2.gm
atgggcagtggcgggaatgatcgcgggctgttgattcaccgcgtggtcaaggaggcgggaggtccggcaaacaacccggtgctcatgaagacgaattacaacgtatggtcactgttgatgaagatcaagttgcaagctcgctgcttgtggggagcaatcgacccaggagaggttgagctccatgaagatcggatgacactcgatgccatctgcagcgtggtccccgcggagatgatctccacgctggcgaccaaggagacggcgaaggcggcgtgggactgcatcaagaccatgcgcgtcgtcaacgaccgcattcgcaaggcgagtgcacagaagctgcgctcggaatacgaggctctcgcgtttcgcgacggggagtcggtcgaggatttcgccatgcgcctcaacaccgtcgtgacgcagctgtccacattgggggatcccgagccagatgacaaagtcgtcgagaaatatctctgcgtcgcgcgtcccaggttctcccagctagttctctccattgaaaccctacttgacatctccactttgacgctggaggaagtcactggacgcctcaaggcggttgaggactccggccagtcgtcgtcctcgtcttcaccaggtgccggggccaagctctacctcactgaggaggagtggcttgaacgtcacaagaagaagcagcaggaggccaagaagaggaatggcggagggaacggccgtggcaagcgccgcggcggacaagggcacactagcggcggcggcggtggcgtcgggaacgcggacagcactggcgttggcccagctcgcaagaccgacaagtgccgcaactgtggcaaacttggccactgtgccaaggattgcaggagcaagcccaagcaggagcaggcccacgtggtccaggacgaggatgagcccacgctcatgctcatgacaggcagctgcattgatgaggtggaggagacgggcgcgcagtgcgcgacgccatcgccgctcgcgccgcagcctcgcccagacgtcatcgagctggttgagcaaaaggtgttcaccgcgctggacgacgccaccgaccacgacaacaagtgctggatcctcgacaccggcgcgtcgaaccacatgaccggctcgagggcggcgttctctgacatcgacaccaatgtcgctggcaatgtctggctcggggacagcttactcgtccgcatcggaggacgcgggacggtactgtttgcctgcaagaacagcgaacaccgcatgctgcacaacacatactaccttccgcgtctcgccgccaacatcataagtgtggggcagctggatgagacgggcttcaaggtggtggtcgaggatggcgtcatgcgcgtgtgggatgagcggcgtcgtctgctcgcttgcatagctcgcagcccgggccggctttacttgctcgacatcaaccttgcacggccggtctgcctgatggcgcgcgcgggggaggacgcgtggcgttggcatgctcgtttcggccacatcaacttcgctgcattgcgcaagatgggccgtgagtccctggtacgtggtttgcctgtcttgtcgcaggtcgaacgggtatgcgaggcgtgcctcgccggcaagcaccggcgtgcccccttcgcgcaagaggcactccacaacgccactgagctgctcgcgctgatccatggcgatctttgtggtccgatcacaccggcgacacccagcggcaaccgctacttcctcctgctcgtcgacgactacagccgctacatgtggctgacgctcctcgccaccaaagacggtgcaccggctgccatcaagcgcgttcaggcggcggccgaacgcaagagcggccgcaagctttgggcactccgcaccgatcgcgggggcgagttcaccgtcggccacttcaccgagtattgtgcggagctcggg

SEQ ID NO: 14315 - DNA, 1863 bp, Oryza sativa
  Clone ID: TFbOSC25126j.C1.o1.fg
atggcgaccaaagcggcgctccgatcgttgtggtcggccttcgacaagcaagcgtcatccatcattgacaagctcgtgtggccttggctgatgccagcggacgataccgaggagggcgcgaagaggcgcgcggaggagattactgaggagctcgcgcagctggagaagaccaggatgacgacgtgggcgcgatcggtggtggagagcttcgacacggcgcctcctccttcccctccgccgctgagcgctactacgcctcatcctcctcctccgtcgcctgcgaccagcagcagcaggacggcgacggcgacggcgacggcgacgccgacctcaccgacaccgacacctcccccgacctcggccactttgctgtggccccggcctcgcccgacgaaggaggaggagggggagggcctgcagcgacgcacggacgcggtgctcgtgaagaggctgaggagggcccgcttcgcggcgtggacgagtgcggcgctgcacaagttcgacttcgacgacgccgcccccacggtgcctcctccgccgccggccaccatgatacctcccccgacggtgacggctacgatcacgccgctgtggcctccgcctcccccgacgaagaaggaggagcatgagggcctccagcgacgcacggacgcggtggtcgtgctcgtgcggatgcagaggagggcccgcttcgcggcatggacgaatgcggcgctgcacaagttcgactttggggccgctccccccacggcgcctcctcctcggcagccgctgcctgttgggaatagtcccacattgaaatggtatcagagctcaggtgccatgtctggagatggtgtgtacacgccgccaccgccgccaccgatccgtcgcagcagcggtggcggtggcagcagcagcggcaatggagatggtgtgtacacgccgccaccgatccgtcgcggcagcggtggcggtggcagcagcagcggcaacggcggggatggcagcctaggcggccatgagctcgtcgtgcagcaagtgaaggaggcgggggtgacgttacgctaccccatgctcggggagaacaactacggcgtttgggcggtgaaaatgaaaatttttatgcgtgcacaaggtgtgtgggctgccgtggagggcaacgcagccgatgagaagatggatcaaatggctctcgccgccattgtccaagctgtgcctgaggccatggtgatggccatatccgagaaggaaacggcgagggaggcgtgggacgccctcaagcagatgaacatgggtgaagagcgtgtcaagaaggcccgagtacaaactctcaagagagtgcttcatggtatgtacatgggtaatagtgagaaaattaatgattttgctttgaaggttaccacgatcgtgaacgagattcattctctcggcacgaaagtggaggagaccaccgtcgtggagaagctcttgcattccgttcccgacaagttccaatccctcataagcaccatcgagcagtggggggatgtgtcggagatgacggtgacggagacaattagacgtttgcgggcgttcgaggagtcctccaaggggcgacgtcgtgaaaacgcaggggaggagcagctgcttattgcaggggctgagcaacggctcacacgcactgagtgggaggccattgttgctaaagagaagaagagtgatgaggcctctggcaatggtgagaagaagttccgcggcaagttcaacaaatcgaagattgagtgccgcaggtgtggcaagttcggacacttcgctgacgagtgtgatgagccgcggaagatggccaaggcagtgacgcagcttgtcatcgcggacgcggatgatgagccaacgttgctgtga

SEQ ID NO: 14316 - DNA, 1333 bp, Oryza sativa
  Clone ID: TFbOSC30021j.C1.o1.hg
atggctgctcttactgatgatgccaatggtgagggagcgagtcagcctcgcactggcccatattcttctggacgtgccgggggtagtcgccgtgctgccactgcagaacagcatgatgatgaaccatctcttgctcaactcctggctaatcagaaccgactttttgaaaggatggtagcgaactctgaaaacatgggggctgccatggcacagcaggccaatcaagcaccctccaagctagcagatgttcaacgaacacatccacctcatttctcctctgcggctgatccactcgcagcagatgattggcttcgtgatattgaaatcaagctgaacctttgccggtgtgatcctgtagagaaggctacctttgctgcttactacctgcaaggtgcagcagctgcttggtgggagacatacaagactctcattcctcctgacgagccaatcacttggactgttttccgtgagggattcaggtctgctcacatccctgctggtctcatggaaatcaaaaagaaagaatttcttaacttgaagcaaggaaacatgcccttcatggagttcatggaacgcttcaattatctgggtagatatgccgcttctgacttgaacactgaaacaaagaaggttgagctatgcagagatcgtcttgcacctgaactcaagcatgctcttgctgctcatgaaatcaccagcatgaagacactggttgcccttcgtgttgaatcaagtgaaaaggaagtggttgaagaccgtaagcgtaagtgggctgcaaagaaatttgctggcagcagcagttccactcggcctcgtcttgctccatctcctgcggttcgtcctatggcacctcagccacctcggcagatgtatgtgcctccacgtccgcaaactcagttagttcgtcaagttcctcgcgcagttcaagctgcgggagatgcatctcgtaatgccaatgtcacctgctacaattgcggcaagaaggggcattattctcctagctgtccttatccgaagactggaacatccggaccgtactcgcagggagcaccgcagcagcctcgtggtcctcctcaagttcagcctggacagcgtggagctcctgctgttcccaagccagctccaacttttggaaggggccggctcaaccatgtcactgcagaagaagcaaccgacgcacctggtgtcgtacttgggatgcctccagatcgtgacattgaatttgtgatagatttaatccctgggacagcacctatagccaaaaggccatatcgaatgacttctgaaaatttgatggaattaaagaagaaactcaatgagcaattggctaaag

SEQ ID NO: 14317 - DNA, 1695 bp, Oryza sativa
  Clone ID: TFbOSC400011j.C1.o4.fg
atggcgaccaaagcggcgctccgatcgttgtggtcggccttcgacaagcaagcgtcatccatcattgacaagctcgtgtggccttggctgatgccagcggacgataccgaggagggcgcgaagaggcgcgcggaggagattactgaggagctcgcgcagctggagaagaccaggatgacgacgtgggcgcgatcggtggtggagagcttcgacacggcgcctcctccttcccctccgccgctgagcgctactacgcctcatcctcctcctccgtcgcctgcgaccagcagcagcaggacggcgacggcgacggcgacggcgacgccgacctcaccgacaccgacacctcccccgacctcggccactttgctgtggccccggcctcgcccgacgaaggaggaggagggggagggcctgcagcgacgcacggacgcggtgctcgtgaagaggctgaggagggcccgcttcgcggcgtggacgagtgcggcgctgcacaagttcgacttcgacgacgccgcccccacggtgcctcctccgccgccggccaccatgatacctcccccgacggtgacggctacgatcacgccgctgtggcctccgcctcccccgacgaagaaggaggagcatgagggcctccagcgacgcacggacgcggtggtcgtgctcgtgcggatgcagaggagggcccgcttcgcggcatggacgaatgcggcgctgcacaagttcgactttggggccgctccccccacggcgcctcctcctccgcagccgctgcctgttgggaatagtcccacattgaaatggtatcagagctcaggtgccatgtctggagatggtgtgtacacgccgccaccgccgccaccgatccgtcgcagcagcggtggcggtggcagcagcagcggcaatggagatggtgtgtacacgccgccaccgatccgtcgcggcagcggtggcggtggcagcagcagcggcaacggcggggatggcagcctaggcggccatgagctcgtcgtgcagcaagtgaaggaggcgggggtgacgttacgctaccccatgctcggggagaacaactacggcgtttgggcggtgaaaatgaaaatttttatgcgtgcacaaggtgtgtgggctgccgtggagggcaacgcagccgatgagaagatggatcaaatggctctcgccgccattgtccaagctgtgcctgaggccatggttaccacgatcgtgaacgagattcattctctcggcacgaaagtggaggagaccaccgtcgtggagaagctcttgcattccgttcccgacaagttccaatccctcataagcaccatcgagcagtggggggatgtgtcggagatgacggtgacggagacaattagacgtttgcgggcgttcgaggagtcctccaaggggcgacgtcgtgaaaacgcaggggaggagcagctgcttattgcaggggctgagcaacggctcacacgcactgagtgggaggccattgttgctaaagagaagaagagtgatgaggcctctggcaatggtgagaagaagttccgcggcaagttcaacaaatcgaagattgagtgccgcaggtgtggcaagttcggacacttcgctgacgagtgtgatgagccgcggaagatggccaaggcagtgacgcagcttgtcatcgcggacgcggatgatgagccaacgttgctgtga

SEQ ID NO: 14318 - DNA, 3225 bp, Oryza sativa
  Clone ID: TFbOSC400258j.C1.o20.fg
atgggtgtgccggcgttctaccggtggctggcggagaagtacccgatggtggtggtggacgtggtggaggaggaggcggtggagatcgagggcgtcaaggtgcccgtcgacacctccaagcccaaccccaacggcctcgagttcgacaacctctacctcgacatgaacgggatcattcacccctgcttccaccccgaggataggccctctccgacaacattcgctgaggttttccagtgcatgtttgattatatcgataggctatttgtcatggttcgccctcggaagcttatgtatatggccattgatggtgttgctcctcgtgccaagatgaaccagcaacgctctagacgattcagagctgcaaaagatgctgctgatgcggccgcagaagaagagaggttgcgtgaagagtttgagagggaaggcagaaaacttccaccaaaacagcaatctcaaacatgtgattctaacgttattactccaggaacagagtttatggctgttttatcgattgctttgcagtactacatccatctcaggttgaattatgatcctggatggaaacaagttaaagttattctttctgatgccaatgttcctggtgaaggggaacataaaattatgtcctacattcgcggtcaacggaatctccctggatttaacccaaatactcgccattgtttgtatggcctggatgcagacctgatcatgttagctcttgcaacacacgaagtacatttctctatactgagagaggtagtttatacacctggacagcaggacaaatgcttcttgtgtggtcaggttggacatctagcagcaaactgtgaaggaaaggttaagagaaaagctggggagtttgatgaaaaaggtgaagctattgttccaaagaaaccttaccagttcttgaatatatggaccctccgggagtacttagaatatgagttcagaatgcagaatccacctttcccgattgactttgaacgcatcgttgatgatttcatcttcatgtgtttttttgttggcaatgattttcttccacatatgccaacattagagattcgtgagggagctattaacttgctaatggctgtatacaagaaggaatttccttccatgggtggctatctaactgatgcttgcacgccggatctgaataaagttgaacactttattcaagcagttggctcctacgaggataaaatatttcagaaaagagctcgtttgcatcagcgtcaagctgaaaggataaaacgagaaaaggcccaagcaaaacgaggggatgacctggatccccatgtcagggatgatcttattgtacctgttgcacgcttccaagggtctcgccttgcatctggacctgtgccttcaccatatgaacaaaatggatctgacaaaaacaatgggggaaaaaatagtcgtgctcggaaagctgcacgggtatcatcgtcaggttcaagcattgcggctgctattgttgaagctgaaaatgaccttgaagcacaggaacgcgaaaacaaggaagatttgaagacaatgcttaaagatgcacttcgtgagaaatctgatgtttttaattctgaaaatccagaggaggacaagataaaacttggagaaccaggatggagggaaaggtactatgaagagaagtttggagcaagaacacccgggcagattgaagaaatacgcagagatgtcgttctgaaatatactgaaggtttgtgttgggtaatgcactactattatgaaggtgtctgctcgtggcaatggttttacccttaccattatgctccttttgcttcggatttgagtggtctaggtcaactcaatataacttttgaacttgggtcaccattcaaaccgtttgatcaacttatgggagttttcccagctgctagctcccatgcactccctgtacagtatcggcaattgatgacagatgcaaattcaccaataattgatttttatccaactgattttgaagtagatatgaatgggaagaggtattcatggcaggggatagcaaaactgcccttcattgatgaagcccggttgctagctgaaattaaaaaagttgagcatactttgacgcctgaagaagcaaggagaaacagtatcatgttcaatatgctttttgtgaatggctcccatccactttcgccttatatctactccctcaacagcaaatttggacacctacctgacagagagcgaaatgaaattaaagaaaagattgatccttcttctagctgccttgttttgtgcagtggaggaatgaatggttacatctcactttgtagtggggatccgtgccctcctgtcttcaggtctcctgttgatgggttggaggatatcatggacaatcaagtgatatgtacaatctacaagcttccggattctcataagcacatcgctcgtccacctgttggtgtaatcatacccaagaagactgttgaagctactgacctgaaaccaccacctgtgctatggcatgaagacagtggtaggaggcctcatgataataacaacaggaggccttatgaaaacagcaacaggcaaaacccagctggagcaatatctggccgccaacttggggaagctgcccaccgacttgtggtgaacagcttgaatgctcggagtggcggacaatacaataccccatcgatgccatatcaaaccataatgaatggcatgccttatccaaatgggattccaccaaggatggagcagcctgctcctggctggcatgttcctggtgatctaccaaatggtcaggtaccaccagcttatgcatcatcatcaggtcattatcagaacgataggtctgggccttctcagtatggacgagataaccatggaaggtacccatatgcaagagacaaccaccatgattcaagaggaagggttccaccataccatcagagcggtggaaactcgtatcaatcacattctgctccatcagcaggtcctggacggtatgcgcaacccccaccatatgctggggggtatggtaggagctaccagcctgcaccgtatggaggtggtcagcagtggcagcagcagcagcaacaaccttatggctcctatgctgggtcagggccttatgggggtggggcacctcctgcaaggcctaattcacgaccacagcagtcgcagaaccgttacaataccttagataggaattctaacaggagacctccaccaggtcatgggcgacactaa

SEQ ID NO: 14319 - DNA, 3948 bp, Oryza sativa
  Clone ID: TFbOSC400562j.C1.o1.fg
atgcccttcatggagttcatggaacgcttcaattatctgggtagatatgccgcttctgacttgaacactgaaacaaagaaggttgagctatgcagagatcgtcttgcacctgaactcaagcatgctcttgctgctcatgaaatcaccagcatgaagacactggttgcccttcgtgttgaatcaagtgaaaaggaagtggttgaagaccgtaagcgtaagtgggctgcaaagaaatttgctggcagcagcagttccactcggcctcgtcttgctccatctcctgcggttcgtcctatggcacctcagccacctcggcagatgtatgtgcctccacgtccgcaaactcagttagttcgtcaagttcctcgcgcagttcaagctgcgggagatgcatctcgtaatgccaatgtcacctgctacaattgcggcaagaaggggcattattctcctagctgtccttatccgaagactggaacatccggaccgtactcgcagggagcaccgcagcagcctcgtggtcctcctcaagttcagcctggacagcgtggagctcctgctgttcccaagccagctccaacttttggaaggggccggctcaaccatgtcactgcagaagaagcaaccgacgcacctggtgtcgtacttggtacatttcttgtgcactccattcccttaacagttctttttgattccggtgcaactcattcattcatgtcaaccttgaaagcaaaacaacttgacttgaaaacagaatttcttagcgatgctatgcgcatccaatctcctggatccaccatggtcaccaaacttctatgcaaaggtgtagaacttataatagacggggtaaagtttaaagctaacctcatattattagacaccttgggcctagatgtcattcttgggatggattggttaactaaacatgagggaaccattgattgtgctcatagaactgtaactcttcgtagcaccgatggtcaatttgttaggtttacctttgaacaaacctccacttcaaatcaaccctctatacaatctctctctataccggagttaaaatcagtacccatcgtgaatgaatattccgatgtgtttcctgacgaattaccagggatgcctccagatcgtgacattgaatttgtgatagatttaatccctgggacagcacctatagccaaaaggccatatcgaatgacttctgaaaatttgatggaattaaagaagaaactcaatgagcaattggctaaaggtttcattcgtcctagttcatctccttggggctgtccagtgttgtttgtaccaaagaaagatggaaccatgcgaatgtgcgtggattatcgacctctgaatgaagtcaccatcaaaaataaatatcctcttcctaggatcgatgatttatttgatcagttaaccggagctcgtgtcttctcaaaaattgatcttagattgggatattttcagcttaaaatcagaccggaggacattcctaaaaccgcattcacaactcgctacggtttatttgaatacaccgtagtctcttttggattaaccaatgctcctgcttctttcatgaatatgatgaataaaatcttcatggaatatcttgataaatttgtggtggtattcattgatgatatactcatctactccaagagtgaagaggaacatgcgcaacatttacgtatggtactcgataaactccgtgagcatcaactttatgccaaattctcaaaatgtgaattttggttaaaagaagttgaatttcttggtcatgtactttctgaaggtggtattgctgtgaatccaagaaatgtacagaacgtacttaattggaagcaaccacaaaatgttcctgaaattagaagttttcttggactagctggttactaccgtcgtttcattgaaaatttctccaaaattgctagacccttgactcaacttcttaaaaaagaaaataaattcatatggtctgaggcatgtgaaacaagttttcatgaacttaaaagaaggctcacaacagccccagtgctagtgatgcctgatgttcttaaaccttttcatgtttactgcgatgcctcacatcatggtctcggttgtgtactgatgcaagaaggaaaagtagtggcttatgcttctcgtcagttacgaccacacgagatcaattatccaactcatgacttacagctagcagctgtggtgcatgctctaaagatttggcgccattatttggtcagtaatcggtgcgaaatctttaccgatcataagagtttgaaatatttctttacccaaccagatctgaacctaaggcaaagaagatggttagaactcattaaagattatgatctcggtattcattatcatcccggtaaagcaaatgtagtagctgatactttaagccggaagctacatcaccttgccgttattgagacaataaatcagccatcgttgtcctctgaatttcagaaattgaatttgggattggtagaggatggttatgttgctgcactagcattacaacctactctctattctcaaattaaagctgctcagtccattgatgaggaagtagctgaaattatgaaagaaatcaattcaaagccacaatctatatacactcttaattctgatggtatggttatgcttggcaaacgaatctttgttcccaataatcaacaccttcgagaaaccattcttgatgaagcacatcaaacacctttgtctatccatccgggttgcactaagatgtaccaggatattcgcactcaatattggtggcctagcctgaggcgtgacatagcagcatatgttgcaatttgcgacgtgtgccaacgtgtcaaagctgaacatcaacgacccgctgggctactccaacctttgcaagtacctgaatggaaatttgatgaagttggaatggattttattaccggtcttcctaaaacacccaatggacatgattctatatgggttattatggatcgactgactaaagtggctcacttcattccggtgcatgtgacttatggtggagccaagctagcagagttatatttgactcatattgtaaggcttcatggcgtaccaaaagtcatagtatccgatcgaggaacacaatttacatccagattttggaaaaatttacatgaacttctcggaaccaaattgttcctcagcaccgcctttcatccacaaacaggaggtcaagtggaaagaacaaaccaaatacttgaagacatgctccgagcttgtgtgcttgaacataacactaactgggagaaatgtctatcttttgctgaattctcctacaacaatagctttcaatcaagtatccaaatgtcaccatttgaagctctttatgggagaaaatgtaggactcctctttattggtccgaagtaggagaaagacaattctttggacctgctatcattaatgaagctgaaaagaatgtcactcttattcgggaccgattaaaagaagctcaaactcgtcaaaagagctactctgatcgtcgtcgacgagagctaagttttgatgttggtgaccatgtctatcttaaagtatcacccatgagaggtactcaacgattccaaattcatggcaagcttgctccacgatatattgggccataccaaataatatctaagcgtggacaagtagcctatcaattggaattgccatttcagttgtctaatatacatgatgtattccatgtttctcaacttaagaaatgtcttcgaactccgattgagcacacctcacttgaagacattaatctaaagccaaatctctcctatcaagaatacccaattcgtattctcgaagaaagtgaacggcgtacccgcaaaagctccatcaagatacttcgagtacaatggagcaatcatactgcggatgaagccacatgggaacgagaggaccgacttaaggccgaattccctagtttcttctag

SEQ ID NO: 14320 - DNA, 4485 bp, Oryza sativa
  Clone ID: TFbOSC411214j.C1.o3.fg
atgggttggaaactatgtcacgtcttccgcccgtataccgtggtgatggccggcagcgtcacccgtcgtggtttggacatgactggcttcgtcttggagctgcgcggcatgtgcgtggtcttggggtatccacacggagtggactaccaggccaggccgctcccggagcaggagggtgacgacgcggagccccgcgccggttgggaggtcactgcagtgatcctctccggctctcccgagcggacttcgctggcagtcaccgcgggtggagattccttccccgccgcttgccagaacgccgctctcctcgccatcggcacccttcaccagcgctacccggacgagttgcagcactcgccctaccgctaccaccctcgtcgcggaggagcccgcgaccacgccaccttccgagacgccagctcggaggatgacgctaccgtcgtgcatctggcacgcatggtggaggcgtacgacgcggctcgtattgacttccaccagatggtgcgtcgtggcatggtggagaacaacctgaagatcctggagctgcgtcaggagaacctgcagctcaagaaggacctcgacgcgttggaggcgcagctgcatcagctcaagatcgcccagggagaggacagccgtcccaagcgtcgccgcgtctgccgcagccagaagatcaccgcccgcaagagcacctccaggcccgagcttgttcgtcagtccctggcgtggacctgcttcgtcgagacccctcgtgccgagcctgcgcccgtggttccccaggagggggaagcctccggcgttggtagctcggaggttttattcgtcagctcttcttctctgtttgctggttccgtgtggggttttcagatggtgacgaccaggagaaatgttaacaccggtgaaggcaaccaacccgagggcagcaatcccaactcccaaggcaacccacctccaccaccaccgccagacaccaacgccattctcacccaaatcctcgcccagcaagccaacatgatgaatgctttcctccaccacctccaaaatccaccacaacagaatgctccaccaccacctccccaacactccaaactcgccgagttcctccgcatccgtccacccaccttctctagctccaacaatcccgtggatgcgttggactggttgcatgccgtggggaagaagctagacacggtgcagtgcagtgatgaggagaaagtcatcttcgccgcccatcagctgcaggggcccgcatctctatggtgggaccatttccaggccacgcagcccgaggggcaaccgattacttggactcgcttcaccgccgctttccggagaacccatgtgcccgctggagtcgtggctctcaagaagagggaattccgagagttgaagcaaggcaaccgctccgtgatggagtatttgcacgagttcaacaatctggcccgttacgctccggaggatgtgcgggaagatgaggagaagcaagagaagttcttggcaggaatggaccccgagctgtccgtccgtctagtctctggggactatcctgattttcaacgactggtggacaagagcatccgcttggaagccaagcacaaggagctggaatcgcacaagcgccgtttggcgaatttccgcaatcaacagggtgctaaccagagggtccgctacaccaatccctacccagggggatcctcctcgcagcagcagcagcagcagcagcaacctcgcccagcgccccgacctcaattcgtgctgtgcttcaactgcttcgagcccggacactttgcggataaatgcccgaagccaaggcgtcagcaaggccaagcgcctccccgctccaacaacggcgggaaggatgtcattcggggccgtgtgaatcacgtgacggccgaggacgtgctgacaactccagacgtcatcgttggtacgttcctcgttcattccatccctgctaccattttgttcgactctggagcttcccactcgtttatatctgtgccattcgtggggaaaagtcagttgggggtagaaaggcttagaaaccctctgctcatcaccacccctggaggggttatgatagcaaagtattatagccctgccgtccctatagaaattcaggggattccttttccctcggatctgattctgctagacaccaagaatttggatgtgattcttgggatgaattggttggcccaattccaaggagtagtggattgcgtgagacgcactgtcactctgtaccgagggccagaacaaccggttgttttctttgcacctccaacctctgtcagaagttcagaactgcatcagataggtctgtcagaaatccccatcgtcagagagttcggagacgtgtttccggaagaactacctggtatgccgcccaagcgagagattgagttccggatagatcttgctccaggaaccactcctctgtacaagcgaccctaccgtatggcagcaaatgaactggccgaagtaaagaaacagttggaagagttgaaagaaaaggggtacatacgtccgagtacttccccgtggggtgctcctgtgatttttgtggagaagaaagacaaaacgaagaggatgtgcgttgactacagagctctcaatgaagtcaccatcaaaaacaagtaccctcttccccggatcgatgatctgttcgatcagcttaaaggtgccactgtattctccaagattgatcttcgttccggatatcaccaattacgtattcgtgaagaagatattccgaagaccgcattcactacgcgatatggactgtatgaattcacggtgatgtcgttcggcttaaccaatgctcctgccttcttcatgaacttgatgaacaaagtgttcatggaatacttggataagttcgttgtggttttcatcgatgacattctgatatactcacaatcagaggaagaccatcagcaccatctccgtctggtattgggaaagttgcgggaacatcaattgtatgccaagcttagcaagtgtgagttctggttgtccgaagtcaaattcttggggcacgtgatatctgctaaaggagttgctgtggatcccgaaacagtgaccgccgtcaccgattggaagcaacccaagacagtcactcagattcgcagtttcttaggtttggcaggatactaccggagattcatcgagaacttctccaaaatcgctcgacccatgacacagttgttgaagaaagaagagaagtttgtgtggagcccgcaatgcgagaaggcgttccaaactctcaaagaaaagctggtttcctcgccagtgttaatcttgccggatactcgcaaggatttcatggtgtactgtgatgcttcgcgccaaggattggggtgcgtgctcatgcaggacggtcatgtggtagcctatgcttcacgtcagctacgacctcatgaaggcaactaccctacgcatgacttggagttagcagcggtggttcatgctttaaaaatctggcggcactatctcattgggaaccgctgtgaaatatatactgatcataagagtttgaaatacatcttcactcagtcagatctgaaccttcggcaaaggagatggttagaactcatcaaggattatgatgtgggaattcactatcaccctggtaaggctaacgtggttgccgacgctctaagtcggaagagccattgcaatactctcaacgtccgaggcattccacccgagcttaatcaacagatggaagccctgaacctaagcatagttggtcgtggatttttggccgcgatggaagccaagcccaccttgctcgatcaaatccgcgaggctcagaagaatgatccggacatgcatggactcctcaagaatatgaaacagggtaaagccgcaggtttcacagaggatgaacacggaaccttatggaacggaaagcgggtatgcgttccggatagcagagaacttaaacagctgatacttcaggaagctcacgaaagtccttattccattcacccgggcagtaccaagatgtacttagacttgaaggagaaatactggtgggtcagcatgaagcgggaaattgcagagtttgtggctctatgtgatgtgtgccagcgtgtcaaggcagaacaccaacgaccggccggacttctccaacctctccaagtaccagaatggaaatgggatgaaattgggatggatttcatcaccggacttccaaaaacccaaggaggatatgattctatatgggtagttgtggatcgattaaccaaggtagctcgattcattcctgtgaagaccacctatggagggaacaaactagcggagctctacttcgctaggatcgtgagtctccatggcgttcccaagaaaatcgtatctgataggggaagccaattcacctctcacttttggaagaagctccaagaagagctgggtactcgattgaatttcagcaccacatatcacccgcagacagatggacagaccgagcgtctgaattag

SEQ ID NO: 14321 - DNA, 4194 bp, Oryza sativa
  Clone ID: TFbOSC900174j.C1.o17.fg
atgggcagtggcgggaatgatcgcgggctgttgattcaccgcgtggtcaaggaggcgggaggtccggcaaacaacccggtgctcatgaagacgaattacaacgtatggtcactgttgatgaagatcaagttgcaagctcgctgcttgtggggagcaatcgacccaggagaggttgagctccatgaagatcggatgacactcgatgccatctgcagcgtggtccccgcggagatgatctccacgctggcgaccaaggagacggcgaaggcggcgtgggactgcatcaagaccatgcgcgtcgtcaacgaccgcattcgcaaggcgagtgcacagaagctgcgctcggaatacgaggctctcgcgtttcgcgacggggagtcggtcgaggatttcgccatgcgcctcaacaccgtcgtgacgcagctgtccacattgggggatcccgagccagatgacaaagtcgtcgagaaatatctctgcgtcgcgcgtcccaggttctcccagctagttctctccattgaaaccctacttgacatctccactttgacgctggaggaagtcactggacgcctcaaggcggttgaggactccggccagtcgtcgtcctcgtcttcaccaggtgccggggccaagctctacctcactgaggaggagtggcttgaacgtcacaagaagaagcagcaggaggccaagaagaggaatggcggagggaacggccgtggcaagcgccgcggcggacaagggcacactagcggcggcggcggtggcgtcgggaacgcggacagcactggcgttggcccagctcgcaagaccgacaagtgccgcaactgtggcaaacttggccactgtgccaaggattgcaggagcaagcccaagcaggagcaggcccacgtggtccaggacgaggatgagcccacgctcatgctcatgacaggcagctgcattgatgaggtggaggagacgggcgcgcagtgcgcgacgccatcgccgctcgcgccgcagcctcgcccagacgtcatcgagctggttgagcaaaaggtgttcaccgcgctggacgacgccaccgaccacgacaacaagtgctggatcctcgacaccggcgcgtcgaaccacatgaccggctcgagggcggcgttctctgacatcgacaccaatgtcgctggcaatgtctggctcggggacagcttactcgtccgcatcggaggacgcgggacggtactgtttgcctgcaagaacagcgaacaccgcatgctgcacaacacatactaccttccgcgtctcgccgccaacatcataagtgtggggcagctggatgagacgggcttcaaggtggtggtcgaggatggcgtcatgcgcgtgtgggatgagcggcgtcgtctgctcgcttgcatagctcgcagcccgggccggctttacttgctcgacatcaaccttgcacggccggtctgcctgatggcgcgcgcgggggaggacgcgtggcgttggcatgctcgtttcggccacatcaacttcgctgcattgcgcaagatgggccgtgagtccctggtacgtggtttgcctgtcttgtcgcaggtcgaacgggtatgcgaggcgtgcctcgccggcaagcaccggcgtgcccccttcgcgcaagaggcactccacaacgccactgagctgctcgcgctgatccatggcgatctttgtggtccgatcacaccggcgacacccagcggcaaccgctacttcctcctgctcgtcgacgactacagccgctacatgtggctgacgctcctcgccaccaaagacggtgcaccggctgccatcaagcgcgttcaggcggcggccgaacgcaagagcggccgcaagctttgggcactccgcaccgatcgcgggggcgagttcaccgtcggccacttcaccgagtattgtgcggagctcggggtgcaacgcgagctgacggctccctactcgccgcaacaaaacggcgtcgtcgaacgccggaaccagtccgttgtgggcacggcgcgaagcatgcttaaggccaaaggactcctaggagctcgtccaagagcattggtggcaagaccccatacgagctttggaatggagtcccactggccgtgcaccacctgcgcgttccggtgtgtggcacatgtgaaggtcacggcgccgaacatgaagaagctggacgaccgcagccggccgatgattttcgtcggctatgagcctggctccaaggcgtaccgtgtctacgacccggcgacgcggcgcgtccacgtctcccgagacgtggtgttcgacaaggaggcgcagtggaattgggatggcgaggcggccgccaacgtcgactccggcttcaccatcgagtacaccacggtgtaccacctagcgacggcggccccgacgcaaatcggcacggagcacgggggagctccggcctcgccgcgctcgcctgcatcaggctcgactccgccaactccgcctctggccgaagagccgccggtggagttcgtctctcctccgcctgacgtggaggatgatctcgacgcggaccacgatgacgcgccacttcgtttccatcgcattgacgacgtgcttgggcccgcgacgccgccgggacaggccgttcgcgagctgagcgaggaactgttcgcggtaacagcggaggagccggcgtcgttcgctgaagcagagcagcacagctactggcgacaatcgatgatcaaggagatgcgctccattgaagcaaacaagacgtggcggctcgttgatccgccggctcgccaacatccgatcgggctcaagtgggtctataaggccaagaaagacgccgccggcaacatcaccaagtacaaagcatgcctggtcgcgaaggggtacgtgcagcggcagggcatcgacttcgacgaggtgttcgcaccggtggcgcggctcaagtccgtccgcttgctgctggcgcatgcggcgtgtgagggcagggccgtgcatcacatggacgtcaaatcggcgttcttgaacgagcttctggaggaggtctatgtcgcgcagccgccgggattcgtcgtcgacgggcaagagcacaaggtgctccaccttgacaaggcgctctatgggctgcgtcaggcacagcgcgcttggtacgccaagctcgacgcgtcgctgctaatgctcggttttcaccggagcgactcggaacacgctgtgtacatgcgtggcatgggtgtgcatcggctggtggtcggggtgtacatcaacgacctcatcatcacgggcggccactccggcgagctcatgcagttcaaggaggagatgaagggcacttttcagatgagcgatctcgggctgttgaaatactatctcggcttggaggtgaaccagtctgaggacgggatcacggtgtgccagagtgcctacgctcagaagattcttgaggtggctggcatggccgggagcaatccaagcctgactcccatggagacgcgcctgaaattgagtaagtcaagtactgctcctgctgttgatgccactgattatcggcgaattgtgggctctttgcgctatctggtgaatttgagaccagacttggcgtactatgtgggctatgtcagcagattcatggagaaacccaccgtcgaacacctggcggccgtgaagcgtgtgctgcgatacatcgctagcactatcggctacggctgccactacatgaggaagaaggaggctgcaagtctcgtcggcttcagtgacagtgatctcgccggcgacctcgacactcgcaagagcacctccggcgttttcttcttcctcggcgacaacccaatcacctggcagtcgcagaaacagaaggttgtggcattgtcgtcatgcgaagctgagtacatcgcagcgacaacggtggcctgccaaggcgtgtggctggcgcgtctccttgctgagctccggggagaggaggccgacgccgtcacgttgaagattgacaaccaatccgcaatcatgctcagtaagaaccctatcttccatgatcgcagcaaacatatagacacaagataccactacatcagggaatgcatcgaggagggcagggtgaaggccgagttcatcggcactgacgggcagttggcggacatcctgacgaaggcactcgggcgcgacagattcatcgaacttcgttctcggattggcctcatcgaaatcaaaactccacgcaaggtttag

SEQ ID NO: 14322 - DNA, 3922 bp, Oryza sativa
  Clone ID: TFbOSC9356j.C1.o1.np
atggctggttttgccaatgcactgaggccggataaattcaccggtgtgcattttaagagatggcagatcagggtcactctatggctgacagctatgaaatgcttctgggtgagtactggcaaacctgaaggagttcttactgcagaatagcagaagcaattcgaggaagccactactctctttgtgggatgcattcttagcgttcttggcgatcgtctggtcgaggtgtatatgcatatgaccgacgctaaggagttgtgggatgcactgaatactaaattcggtgctactgatgctagcaatgatctgtatatcatggagcagtttcatgactacaagatggctgataaccgttctatagtcgaacaggctcatgagatacaaaccatggctaaggaacttgaactccttaagtgtgtcttacccgacaaatttgtggccgggtgcattattgcgaaactaagtccatcttggagaagtttcggtactgcactcaaacacaagagacaggaatactccgttgaggggttgatagcgtctcttgatgttgaggagaaagctcaggaaaaagatgccgcgtctaagggcgatggtgggcagtccagtgccaatgttgtgcacaaggcccagaacaagagcaaggggaaatacaaagctcagcagaccaccaacttcaagaagcagaagaagaacaacaacaatcctaatcaggatgaatggacttgctttgtgtgtggccaacttggtcatctggctagtaagtgtccacagcgcaaggggatgaagacacctgcagggcagacatctaagtctgctaatgtgaccattggcaacactagagatggaagcgggtgtggtaatttacctactgttttttcagttaatcagtctactaattggtgggttgatactagggccaatgtacatgtttgtgctgacatctcattgttttcttcttatcaggtcgcacggggttccaccgtcctaatggggaatgggtcacatgcttctgttcatggtgttggcacggtagatctgaagtttacttcgggaaagatcgtgcagctgaagaacgtgcagcatgtctcttctatcgacagaaatcttgttagtggctcccgtctgactagagacggatttaagttgttttttgagtctaataaagtagtcgtgtctaaacatggatattttattggtaaaggttatgagtgcggaggcctgttccgcttttcctttctgatttctgcaataagtctgtgaaccatatttgtggcagtgtggatgatgaggctaatgtttagcactcacgtttatgtcatattaattttggcttgatgtctcggctttccagcatgtgtttaattcctaagttttccattgtcaaaggttctaagtgccatagttgtgtgcaatcgaagtaacctcgcaagcctcacaaggctgccgaggaaagaaacttggcaccactagaactcctacattcagatctttgtgaaatgaatggggtgttgacaaagggtggaaaacgatatttcatgactttgattgatgatgctactagattttgctatgtgtacttgttgaaaacgaaagacgacgctctagactattttaaaatttataaggcagaagttgaaaatcaacttgacagaaagataaaaagacttaggtctgatcgtggtggagagtttttctcaaacgagtttgacttattctgtgaggaacatggcatcatacatgagaggatgcctccctattctcccgagtctaatgggattgctgaaagaaagaaccgcacactgactgacttggtgaatgccatgttggacactgcgggactacctaaggcatggtggggggaggcattgttgaccttgaatcatgtgttaaacagagttcctaacagaaataaggacaaaacaccatatgagatatggattgggagaaaaccatcactttcttacttgcgcacatggggtgcttggcgaaagtcaatgtaccaataacgaagaagcgcaaacttggacctaagactatggactgtgtcattctgggatatgcttatcacagcattgcctatagatttttaatagttaaatctgaggaacctgacatgcatgttggtacaattatggagtctcgtgatgctaccttctttgaaagctttttcccaatgaaggatacacatagtagttcgagccaatcatctgaaataattcccagttcaatcacaccaccagaacaaactgaacatacacatgaacatgtcactgaggaggatgacagtgcagctccacgaaggagtaagagacaaaggacggctaagtcttttggtaaggattttactttgtacctcgtggatgacactcctaagtcaatttcagaagcatatgcatctcctgatgctgactactggaaggagactgtccgtagtgaaatggattccattatcgctaacgggacttgggaggtgacagagcgaccctatgggtgtaaacctatgggatgcaagtgggtgttcaaaaagaagcttaggcctgacggtactattgaaaagtacaaggctcggcttattgctaagggctatactcagaaagaaggcggagatttctttgacacttactcacctgttgctagattgaccacaattcgtgtgctactttccctagcagcctcacatggtcttctcgttcatcaaatggacgttaagacaacttttctgaatggagagctggatgaggagatctatatggatcagcctgatgggtttgtagttgaaggtcaagaaggcaaggtgtgcaaattgttgaagtctttgtatggtctgaaacaagcttctaagcaatggcatgagaaatttgacaaaacattgacatctgcaggcttcgcagtcaatgaggcagataaatgtgtgtactatcgccatggtgggggtgagggagttattttatgcttgtatgttgatgacatactgatatttgagacaaatcttgaggtgataaatgaggttaaatcattcttgtctcaaaattttgatatgaaggatttgggagtagctgatattatcttaaacattaagctaattagaggtgagaatgggattacactcttgcagtcccattatgtggagaagatcttgaatcgctttggctatattgatagtaagccttctccaacacctgatgatcctagcttgttgcttcgcaagaacaagagaattgctaggaatcaactggaatactcccaaatcattatctcgttgatgtacctggctagtgcaactaggcctgatatctcctttgctgtgagcaagttgaaccgatttacctctaatccgggagatgatcactggcgtgtgcttgagcgagtaatgcgctatctgaaaggtactgtggaattggggcttcactatactgggtatcctgcggtactggagggttatagtgattctaactggatctctgatgtggatgagatcaaagccactagtggatatgtcttcacactgggtggcggtgctgtttaatggaggtcttgcaaacagaccattttgacgaggtcaaccatggaagcagagctgatggcactggatactgctactgttgaggcagaatggctgcatgatctattaatggatctgcctattgttgaaaaatcgacatgtgaaaagacgattgaagtctgtcaggaaattaagaaactctagagttataacgttggattacatccaaacagctagaaacctggcagatcctttcacgaagggactatcacgaaatgtgatagacaatgcatcgaaggagatgggtttgagacccatagtattcttcaaagaactcacctttgtgagcttgattgttggtcgcagtctatggagattttgggtgaatcttctaggaagcttactatagacctaggagta

SEQ ID NO: 14323 - DNA, 231 bp, Oryza sativa
  Clone ID: TFbOSC9356j.C1.o2.gm
atgaccgtccattgcgtctacgaaggcacgcaacacgcgaacgaagaggaagacgagccgacgcggacgaacagggagcagtcgcgcaaagcacttcccaaaaaccttattgccaccttctcccggtgcaggagtcgaaggcagagattccggagacctgctctcccgatcgcagggtcgcttgatcagggcgcccgtacgatctccactgcgcgtaaccttaccggataa

SEQ ID NO: 14324 - DNA, 2256 bp, Oryza sativa
  Clone ID: TFbOSC401845j.C1.o5.gm
atggccaaccaacccgctagttccgatgaagagaagcatcaaggcaacgcaattccccaccaagattacagtttcagcctaactccagtgccaggacagaggaatcaaaatgagaaaagaaaatgccgagtccggaaagatatctgttgcttcaattgtcaagaaatgggtcatttcgctgacaagtgcccaaaaccgagaaacatagttgccagcacgtcagtccacgcaactccccgcaatcagaagcttgctcctcaacgaattgtcatccatgcatcccgaagcagtcctatagcccgcgttgcaatagctccaactccattgagtgcactaccacaaggtgtcaatgctcaatttcagccccagccaccagttgacaagatagagaccatgaagaaggacattactccagaaattgtccacgaccaaagcgtaacccgcgccatcaatccggacattatgcacgaagaagacaggaccacaatatcaggcacgcccaaggacctcattgccccagaagcatcctcaacacccggagtgaagagtacctggttgagaaaggtcgaaagtgccggccaccctccagcccgcgtcggcacgccgcccggccgtgccgtcgcctccccttccccggcctgccctcggtttcgccggaatgccgtcgcccgcgccggtctcaccctccgcctcgccggagttccttcggccaccccttcggccgtgcccgtgcgccgcggcatgttccacgctgtcctcgcatccgtgcagctactgccggctgcccttgtcgcctcctcgccggccccggtcgtcgtcgtcgtccacctcctcctctcgtcgttcccggtcgtcatggcgttcgtccctccgtcaagccgttcgcgttcgccgcccgtggttcgtcaagtgagctgctgcagccccatcgtcgtcttcatccttagctccacgtcgtcaagcctcgtgccagccgcgtctcgcattcgtccaaggatcgccgccgaagtcgtcccctcgccgttcgtctccgttgttcccggccgtctccgccgcgcccgttcgtcgttgtcgttcccacgcctcgtcgcgtggtgcaggaggagacagcaaggctatggcaaattacttgccgagattcgtgacgacttcatctccaattttcaaggtaccttcgaacgtcccggcacctacttcgacctctacaatgtgatccagaagcccagtgaataccttcaggattatatccgacgtttttctgagcaacgcaacaagatctctgacatcaccgacgatgtcatcatagccgctttcactaagggtgtccatcatgaactgttagtcggcaaattcggacgcaagcctcccaggacggtcaagcagatgtttgaaaacaccaacgagtatgccaaagccgatgatgccgtcaccgcgtccgagctatcgggcagcaattggaagccaaagaaagatgcgccagcagtcggggggagtggaagtaccaaccataaggattgcaagcgtaagcctgaagaccttgtggcaagtacaacaccttcttcccagcagcggtcacatatcaatactttcgacaagatcatgaatgctcaatgctcgcatcacccgaattcaaaccatgcagccaaagattgttttatctatcagcagttcgcagagcaatatgccaagaaaggaaggaagccgacagacggggagcaaagcacttcaaaaaagatggatgatgaagacgacggtccgactggctttcaagactctcgcaaagaactcaaccatattttcggtggaccccaagcttacgaatcaaaacggaagcaaaagctgactgacagggagatcaacgccgtccagcccaacacgcctcaataccttcggtggtcagagacagcaattaagttcgaccgctcagatcatcctgaccgagtggtccacctggggcggtaccccctggtactggacccagtggttcgcaatgtcaagctccgacgatccctcattgatggtggcagtgcactcaatatcctttttgccaaaacactggatgatatgcacatccctcatactgagctgaagctgagtagtgcgccctttcacggagtcatcccatggttgtcttctactccactcggccagatcactttacccgtcaccttcggtacctgggagaacttctgcacagagaatatttgcttccaggttgctgatttcgagatggcatatcacactacacctacatga

SEQ ID NO: 14325 - DNA, 5376 bp, Oryza sativa
  Clone ID: TFbOSC900110j.C1.o22.np
cgcgccgctcctccccggtccgtggacccgatccgccgtggaccgccctccccgagccgctgaccggtgagcttcctcaccgtgttcgcctggaggtccacggctacgtgggtacctgcctagctaacatggtggtggaggcatctggaggcccagcagatcacgcctgtcaggaggcagcatacctgatgatggctagactacgggagcgccacaactacatattccacgacacggtgtaccggtttcaccctcggcgagccagcagtgatgatgtcagtactttccgtccgacagccggcgagaacgacaccacctttggtcacatgtgtgctgtgatgaggggattggataggatgcactcggacctggacaaggcgaccaaggccttgaatgatgggaagctcatgaggatcgtcgctctgaaggacgagatagcgcgcctgaagagggagaacgctcagttaaagggtcttcccgcgccaggaggagtccggatccgcaccacgccccgcaagacgatgactgcacccgtgcgcatccagcttgcgcccaggaacccacctccatcagcagctcccgcagcacctccagttccgcccgcagttcctgcagctccagctccagctcccgcgtccgctctctccttcgctccagcatcagccgccaggggcccagccagaggcaacggaggttggttgtctgctactcccagtggcagccacgatctcagcagcagcagctccagtggctcagagtcgggcagcggcgagacttatctgccagggtccggaagtcgctcagagggacctgatggtctacaccaggaatggtagccgcgcaacaggcgagggcagcaacggcgaagagcgcactgagggtgtgcatcccaacagcaactccggcaatggtccgccaccacttcccgagaatccgacgctagcccaagtgatggcacatcagacacagatgatggcagccatgatgcagcagatgcagcagcagcaccagcagatgcaccagaggatgctgcagcacgccgaacagcagcaccagcagtttggtccccctccccctcagtccaagttgccagagtttctacgtgtcaggccacccaccttctccagcaccaccaaccctatggaggcgaatgactggctccatgccatagagaagaagctgaatctcctgcagtgcaatgatcaggagaaggttgctttcgccacacaccagcttcaaggtcctgcgtcagcttggtgggacaatcacatggccacccgcccaccaggtactgaagtcacttgggcagagttctgccgtagtttcaggaaggcacaggtgccagatggggtcgtggcacaaaagaagagggaatttcgggcactccatcagggcaacaggactgtgatggagtacctccatgagttcaatcgcctcgcgcgatatgcaccagaggatgtccgtaccgacgccgagaagcaggaaaagttcatggcaggtctggatgacgagctaaccaaccagttgatatctggagattacgccgatttcgagaggctggttgacaaggcaatccgtcaggaggatcaacgcaacaagatggacaggaagaggaaggccgcacagttcagggcacctcagggaagtcaccaaaggccgcgcttcgctcccgggcaacagggtggacctaccaccatgatcgtccgccagtaccgcccgttcaaccctagcaactttccccatggcgccggtggcagtcagacccaccatagaggtcagtccaaccgcggtgcagctccacgcccaccaatggcaccggcacagtcaggcccgcccgcgcaagccaagaaggagactggagcaaaaccagggtcctgcttcaactgtggcgagcttggccacttcgctgacaaatgctcgaagcctaggcgtgccgggccaaggtttatccgggctcgtgtcaaccacgcatctgcggaggaggcacaagcagcaccagaggtcgtactgggtacgttccctgttaactcaatccctgcaacagtactttttgattctggtgcaacgcattctttcatttcaaagaaatttgttgggatgcatgggttaataagagaggaacttagcacaccaatgcgggttcataccccaaggaatagctccacttcggttcaattcagcccttctataacaatagaaattcaaagatcaccatttctagccaacctcattcttctcgaatccaaagacctagatgtcattcttgggatggattggctgaccaagtttaagggggtcatcgattgtgcgaatcgcacagtcaccttgaccaacgagaagggagaaaccgtggtgtacaaatcactagactcatcaaagcgaggggtctttttgaatcagattgagacggaaatcccagtggacaccgtggagaagaacttgaggaaatgggaagatatacccatagtctgcgagtatccggaagtgttccccgaagacctcactaccatgccacccaagagagagattgaattccggattgacttggcaccgggaaccgctccaatttacaagagaccgtacagaatggcggccaacgaattagccgaggtcaagaagcaggttgatgagcagctacagaaagggtacattcgaccaagtacttcaccttggggtgctccggtcatttttgtggagaaaaaggataagacgaagaggatgtgcgttgattatcgcgcactcaacgaggtcacaatcaagaacaaatatcctttgccgcgaatcgatgatttgtttgatcaactgaaaggagctaaagtgttttctaagatagacctgcgatcaggctaccaccagttgagaattcgggaagaggatattccgaagacggccttcaccactcggtacgggctatatgagtgcacggttatgtcgttcggacttaccaacgcacccgcattcttcatgaatctgatgaacaaagtgttcatggaatttttggacaagtttgttgtggtgttcatcgatgacattcttatctattcaaagtccgaagaagaacatgaacaacatctccgtctagtactcgagaagttgaaggagcaccagctatacgccaagttcagcaagtgtgacttctggtcgacggaagtcaaatttctgggccatgtcattacagctcagggtgtggcagttgatccatcgaacgtggagtcggttaccaaatagaccccgccgaagaccgtgtcgcagattcgaagttttcttggacttgcaggttattaccaccaattcatcgaaaacttctccagaatcgctcgacccatgactcagttacttaagaaagatgagaagttcaaatggacagctgagtgcgataagagttttgaggagctcaaaaagaaattagtatccgcaccagttttgattctgcctgaccagatgaaagacttccaagtctattgcgatgcatcccgtcacggacttggatgtgtcctaatgcaagagggcagagtggttgcgtatgcctcgcgacagttacgtccacacgaagggaattatccaactcatgacctggaattggcagcagtggttcatgctttgaagatctggaggcactatctgattggcaaccgctgcgaagtatatacggaccataagagtctgaaatacatcttcacccaaccggacctaaacctccgacaatgaagatggttggaactaatcaaagactatgacatgggtattcactaccacccgggtaaagccaatgtggtggcagacgctttaagccggaaaagttactgcactgccctgtgcatcgagggcatgtgtgaggaattgcggcaggagtttgagcatctcaacgtgggaattgttgaacacgggtttgtggccgctctggaggcacggcctacgctcgtggatcaagtcagagcagctcaagtaaacgattctgaaatagcagagttgaaaaagaacatgagagtcggaaaagcccgggatttccacgaagatgagcatggcacaatctggttgggagaaagattgtgtgtacctgacgacaaggaactgaaggatctgatactcaccgaggctcatcagacccagtactccattcatccaggcagcactaaaatgtatcaagacctcaaagaaaagttttggtgggtcagcatgaggagagaaatagctgaattcgtcgcactctgcgatgtttgccagcgagtgaaggcagagcaccaaagaccagcaggtttactccaacctcttcaaatcccggaatggaaatgggaagagattggaatggactttataacaggactgccccggacatcatcgggtcacgattcaatctaggtagtcgtggatcgactcactaaggtttctcacttcataccagtacataccacatatacgggcaaaaggttggcggagctttacctttcgagaatcatgtgcctacatggagtacccaaaaagattgtatctgaccaagggagtcagttcacctcaaaattctggcagaagctgcaggaagaattggggacccgtttaaatttcagcacggcctatcacccgcaaactgatggtcagaccgagcgagtcaatcaaatcttggaagatatgttgagagcttgcgctcttgattttggtggagcttgggacaaaagcttaccatatgcggaattctcgtacaacaacagctaccaggccagtctacagatggcaccgtttgaagctttatacggccggaagtgccgcacacctctcttctgggatcagacaggcgagcgtcaattgttcgggacagaggtattagcggaagcggaagagaaagtcagaatcatcagggaaaggttgaggattgcccagtctcgacagaagagctacgcggataaccgtcgaagggagctcacttttgaggcaggggattacgtgtatcttcgtgtcactccgctccggggagtacaccgctttcagacgaaaggcaagttggcaccacgcttcgtggggccatacaaaatcctggaacgaaggggggaagttgcttatcagctagaacttccatccaatatgatcggcatccatgacgtgttccacgtgtcccaattaaagaagtgcataagggtacctgaagaacaggctgattcggaacacattgatatccaggaggacctaacatacgtggagaagccggttcgtatacttgataccagcgaaagaagaaccagaaacaagatcaccaggttttgccgagttcagtggagtcatcattcagaagaggaagcaacctgggaaagggaagatgagttgaaagccgcccatccgcacctcttcaccagctcctccgaatctcggggccgagattccgtt

SEQ ID NO: 14326 - DNA, 3364 bp, Oryza sativa
  Clone ID: TFbOSC25042j.C1.o1.np
atggcgttggttccggcaacggcggacccgatgaagtgctttcctttaccgataactcacatcaacaaactacactagttggatgatacgggttcaagcaatgatggaggatcaaggcgtataggagacgatcgagccggcggctggggcggcagtcgacccgaagaaggacaagaaggccaagacgcatcttcttcagtcgctgccggaggatctcttgatgcaggtggcaaagaagtggacggcgaaggaggtgtgggactgcctgaagacaaggttcgtcggggcggactgggtgcgcaatgcgcgccttcaaactctcaagggagatcactagtatggtggtggaagccgaggagacgctgaaccagtacgccggcaggatcaccacgatgggggtccggaattctgctctgggtgcaacaacgtcgatatggtgaaaaagttgttcgacatcgtcccggagaaattcatcagtcttgttgccgtcatcgagcaattctacgacatcgacgaaataccgttcgaagaggctgtgggctatctaaaggcgtatgacgagcgcgtgtgcaagaagaaagctgctgttggcggagtgatcgcctacggctaggtgttgcacactcaggtcgagtggaagcgtgcttcaagaaaaatggcagagaaacttcgcgccacagaagaataagccctatggcgagggggcgaaccgcggccaggacgggtgcggacgtggcaggggtcgcagagctggcagacgcggcggggcacaaaacaacaactcaggaggtggttctggtggcggtggccatgacaagagccacataaagtgcttcaattgtgacgaatttggccactactccacgtagtgcccacaccctaagaagaagaataccgaaactcatcttgcgtagacgaaggatgccggcccagctttgttgctcgccatgacagaggcggtgcagaacacgccgcgtcaaggcgtgcactgtgggctggtcgtgcacgaggaccatgtatggccgcgcctgatgctggcaggcaatggcgccgccgccggtgatgtctggtacctatacaatggtgctagtaatcacatgaatggagatcgtcgaaaattccgggagctggacaaaaccgtgacggggcaagtcaggttcggcgatgcctcatcggtgcagataatagagaagggttcaatccttttctcattcaaaaatggcgaccagtggctactcgacgatgtctactacattgccagcctctgctgcaacatggtgagtctggggcaactcaccgaaactagccaccgagtcatgatggatggggatgacctcgaggtgttcgacaaaatcactgtcgattggtgatcagggtgagaagaaccgtgaacaggttgtatcgcatcgagctgaagttggcgtcccctgtgtgtttgctggccagtctcgactctcgacgacctggtgtggctctggcatgcccggctcgggcacgtgaacttctaggcgttgaagcatttggtggacaaggagatggcgacaggggtgcccgcagtccaccatccaaatcaattgtgccaagcatgttttgtggctaagccgatccggcagccgttcccagcgattgccaattatcgagcagagacaccgctcgagctgctccacatggacttatgtgggccgatcaccccatcaacactggccggtaatcgatactttatgttgatcgttgatgatttttctcgttggatgtgggtgtttgtgatcaagtctaaggaccaagcgctcacggcattcgagaaattcaaaccgttgccagagaacatggcaggccgaaccatcaagacactccgaacagaccgcggcggcgagttcttgtccagcgagttcacgagcgtctgcaccgaggccggcatcgagtgccacctgacagcaccgtactcaccgccacaagcgggtgttcaagctgaagaaaaacactaccggcgaggtgatcaaacacaaggcgcgtttggtggcgaagggctatgttcagaggcaaggtgtggactttgatgaagtgttcgcgccggttgcgtggctggacacggtgcaagccattctcgcagttgctgccaatcggagatgggaggtgcatcatctcgatgtcaagtcggcattccttaatggcgatctagaggaagaggtatttgttgatcagtcggaaggatttgtgaagcaggggaaggagcatcttgtttacaaactgagcaaggctctctacggcctgagacaggcacttcggggctggaacacttgtcttgactggagtatgaaggagcttgggttcagccggtgtgcacaaaagcaagctgtctacaccagaggtacagggaatgccggactaattgtcggggtttatgttgatgatttgatcgtgacaggagaaaactcaagcgagatcacaacatttaaacaacagatggtgggggagtttgatatgagtgatcttggacttctcacttattatttggggattgaagtgatacaatgcaaggtgcaaatgggatcgccatcaagcaggctgcttatgcaaggaagattctgacccagtttgggatgttacattgcaattccacctcaattcctattgagcaccgttcacagctgcataaagatgctaaagggagtccagttgatgccacacaattcaggcgagtgataggttgtctgcgttacttgttgcatacacggccggatctgtcctatgctgtgggtgtagtgagcagactcatggagcgaccgactgtgatgcatttcaaggtagtaaagcaaatcctcaagtatctcaagggtactatcaactgtgggttcacgtttgctgatggcaacggtgcagtggagatcaccagattcacagatagtgatcaggctggtaacactgatgattgtcagagtactagcgggatggcattttatctcaacaatagtttgatttcctggagttcacaaaagcataaaacggtggctctctcgtcctgtgaggctaagttcatggcagccactgcggcagcttgtcacgctctgtggctcaggggattgttgattgagattattggcgcagaacctaggccggtgaagttgtatactgtaaccaattagcgattgcactcatgaagaaccctgtgttttatgggagaagtaagtacatagatacccgctaccatttcattcgggagtgtgttgaaagtgggaagattcaaattgagttcgtccggactaaggagcagcgggcggatgcgttaacgaaaggtttgccagcagcaagattagagacagctcggcacctgctaggtgttcgtgattttgggccatagcagaat

SEQ ID NO: 14327 - DNA, 419 bp, Oryza sativa
  Clone ID: TFbOSC28312j.C1.o4.np
atgctattgcatgcaattaactgcagctccgtacaccgtacgcaccgcagtcgcaaccctcgtgttcaccgtccacgacctcatcgtcatcggccctccacgtccgccgcgccgtgccaggctcgctggcttcgcccttccgtcagtagcctccctgccgccgcggatccacattcaccgcgtgcgtcgggtgcgccgtccatggcgctacccctccaatctctccggtcgccttcggccacgcccggccccgtcttccggtcacgttccgccatcgccggtctgatcgcgagcgaggtcgccgcctccgcaacatcctcgttgtcgccatcgatctcatcgccacggctgacgatctcctgtcgatgcgcgatccccacctcgtgtttcctcctccacatgtcttcttgatccaatgc

SEQ ID NO: 14328 - DNA, 1437 bp, Oryza sativa
  Clone ID: TFbOSC28312j.C1.o5.fg
atgacgatgaggtcgtggacggtgaacacgagggttgcgactgcggtgcgtacggtgtacggacagcgcgtatggcgacgacgcaaattgcacgagttcttgggaagaaggcgcacgggtgcgggtggaccaagccaggctgacacgatcggatcacaagacgagattgtgaagacgaatacagacggtactgagaaaggcgagtattctggtggcgatagaccagtcaggtcgcgggttggcaagttggcgccgacatgtatgaaatttgatttggtgaagtttgacggcttcggaaattttggcttgtggcaaactagggtcaaagatttgttagctcaacaagaagtttcaaaggctttgaagggtgtcaaaccggccaagatggaggatgacgattgtgaggagatgcagttgcaggcggctgcgacaataaggcgatgtctttcagatcagatcatgtaccatgtgatggaggagacctcaccaaagataatttgggaaaagttggaagctcagtttatgtccaagactctgaccaataaacggtatctgaagcagaagttgtatgggctaaagatgcaggaaggggcggatctgacagcacatgtgaacgttttcaatcaactagtcactgatcttgtgaagatggatgtggaagttgacgatgaagacaaggccatagttcttttgtgttcattacctgaatcgtatgagcatgtgatgagaaagaacaaagagggtgaaacatctcaagcagagggtttgctagtcaaagaagatcatgctgggcataaggtaaagaagaacaaaaagaagaagatggtgaagtgcttcagatgtgatgagtgggggcatataagaagggagtgtccaacactgaagggaaaagctaaggctaatgtagcgacttcttcaaatgactcggatagcgatggttgtgatcttctcacgatgtcaagtgcacagtctaaggatgcagaagcgtggatattggattcagctagctcgtttcatgtgacgccaaggaaggagtggttctcttcatataagtctggtgagtttggttttgtctacttaggcgatgacacaagttatccggccgtgggagtaggtgaagtcaaaatcaagctagaagatggaggtgaacatgttcttcaaggagtcaggcatgtaccagggctaaagaggaatctgatttcgcttggaaccttgcatgaagaagggttaatattccgcggtaatcggaataggaagaccattgagatcatgaagggcaagatgactatgatgactggagagaaggtggagtcgcatctttacaagctgcgagggtgcactgttgcaggtgtagtccaggaggaagcggttgctgggatagcaattgcttttggtggcggcgggtctggcgcagactcgtcgggcggcttgcggtga

SEQ ID NO: 14329 - DNA, 3369 bp, Oryza sativa
  Clone ID: TFbOSC412101j.C1.o1.np
atgggcgtaccccgctcagagggatacgtcattgagctgcatcggttgatgaggcgtctgcggtactccagatttccgatctatcgagtgagacagtgtggatctgtttgggaggctcgggtcgaggttcacacatgagttccttcagagtcagactacagcttcccgacacgctaccgtcgcgacttaccagagactgcgatgcaggatgcagcccgggaggccttcctccgacttagctctatccaccgagctgagttggcgagtactgagtttgctcaccacccgtttcgagaggagagcaactccgtctacacagttcaggacacaccttgctgctacaacccgatagtgactcgactgtcacgatgggctgaggcagtagacgacttctacgaggaggctctgttagagatcgacgaccagcagaggcgtgtgggagagttagagaccgaggtgactgacctcacagtgcagcagcttcagctggaggaggagcaccaggcttggggcagtgagatagactcactgaaggcacagctccagctaggttccagtttggagactccgatccaggttgactctgagacagaggggaccgacactgagccagagatagagccagacatcaccgatccttcagaggatgagactcctgttccccacatcaccttcatcggaggccctcgtaccctcagcactgctcgcaagagcacacgacctccgggcaagaagcccaagccagatccagaggccactacttccgagccgtggggactcaggatcatagagaagaaactgacccttgtccgggtacgcgaagccgacaaagtgatcttcgcagtacaccaactggagggacccgctggtgattggtgggatacttacaaggaagcttgggaagaggatgctggagaacccacttgggaagagttcactacagtatttcgcgagaacttcgtgcctgctgcggtaatgcgtatgaagaagaacgagtttagaaggctacgacaagggaacgcaacggtgcaggaatatctgaaccaattcactcagttggcccgctatgcaattggagacctcgcagatgaagaggaaaagatcgacmagttcatagaagggctgaatgatgaattgcgtggacctatgattgggcaagaccatgagagcttccagagcctgatcaacaaagtcgttaggctggagaacgatcaaaggactgtagagcacamccgctagaggaggcttgctatgaatcgcccacctcagggagtgcctcagcgactcaagggagccactttgtctgggtggaagccccctattgtggcaaccaaccgtcccaccgtgcctagtaattttaacaggccggttgtgattcagaaccgcacccctacaccaactctggctgcccctgtagccaagagaatgtggactgcttcaactgcggggagtatgggcactacgccaacaactgccctcatccacgcaaaactcctgtccgtactggcgctaatgcaatgactgttcgtggaactactacccctactaccggacgaggtttattcaagactccgcaaactaacaggaccgctaccggatttgggcgcggacaagtgaaccatgtccgagcggaagaggcccaggaagatcagggcatactaatgggtatgttctctatcaattctaccccggttaaagttctcttcgattctggtgcatcgcattcattcatatctctgaaggctagtcaaaagcacaacttagccctagtgggacttagaaagcctatgatagtacactcacctaggggcgagataaccgtgagtcatgcttgcatcgacgtacctattcgtcttaggaatgtggtgtwtccctccaaccttatggttttgatacctaagaccctggatgtcatatkgggtatgaatkggttaacaaagaacagaggggtaattgactgtaggcgtagagaagttatcctgaccacaccctggggatcggatatgagaacaactatggatcaagatcctagactggccgagcgtgccggaggcatattcaccatgctacccatgaaaggaatgcctgtggtgcaacgatttcccgatgtgtttccagaagatttacttggaatgccgccagatcgtgacatagagttcattattgatctgatacccagaactgcccctatatccaagagaccatatcggatgccggtcaatgagttggaggaacttaaaaagcaaatcagataattgcaagaaaagagatttgtacgccccagttcgtcaccttggagagccccagtgctattcgtcaagaagaaagatggtagcatgagaatgtgtgtagactaccgttcacagaaagtaactatcaagaacaagtatccactaccacggattgatgatctttttgatcaactcaaaggagctaaggtgttctctaagattgaccttcgatcaggataccaccaattgaaaattaggaccggggatatacccaaaaccgcgttctcaacacgctatggattgtatgagttcaccgtaatgtcgtttggtttaaccaacaccccggcatactttatgaatctcatgaaaaaagtgttcatggattacttggacaaatttgtggtagtattcatcgatgatattttaatctactccaaagacgaggaagagcatgcgaaacacttgcgattggtactcgagaaacttcggaagcataagttatatgcaaaattcagcaagtgtgagttctggttaaaagaagtcgcctttctaggccacgtaatctcagcaggtggagtagcagtggatcctgctaaagtggaggctgttacgaaatgcaaagcacccaaatctatgactgaaattcggagttttctaggcttggccggatactaccgaaggttcattgaggggttctctaggatagctcgaccaatgacacaactactcaagaaggaaaagaagtttgcatggtcagaacagtgtcaggaaagctttgaacagctcaaagaaaagttgacctctgcacctattctagtccttcccgacatcaggaaaaattttgttatatattgtgatgcatcaaggcaagggctgggaggagtgctgatgcaggacggaaaggttgtggcctatgcgtcgtgacaattgcgaccacacgaggaaaactaccctacccatgacttagaactcgcagctgtggtgcatgcgctaaagatttggagacactatttgattggaaaccattgcgatatctacactgaccacaagagtctgaagtatattttcacccagtcagatctcaacttgaggcaaaggcgatggttggaattaatcaagaactatgatttagaggttc

SEQ ID NO: 14330 - DNA, 1618 bp, Oryza sativa
  Clone ID: TFbOSC13700j.C1.o1.fg
cgtgttgcttacatcattggtgagaatggtgaacacccgcactggaagtggaagtggaagtggtcacaatgaaggagatcccacacttgcccaacaagcgcagaaccagcaggcaaataacaacaatcaaccaccacctccacaaaacaagttggcagattttctacgtgtgagaccacctaccttctcaagcaccactaacccagtagaggcaggtgattggctgcatgctgtggaaaagaagttagatttgattcagtgcaccgagcaggagaaggtttcctttgcttcgcatcagttgcatggtcctgttgctgagtggtgggatcactttcgtctaaacagagccgcgggagagcctatcacttggcgggagtttactgctgctttcaagaagacacacataccatcaggtgttgtggcacttaagaagagagagttcagagcattcaatcggggatcccgttctgtcacagagtaccttcatgactttaatcgcttagctcgttatgccccagaagatgttcgcactgatgaagagcgtcaggagaagtttttagagggattgaatgatgagttgtcttatgcattgatggctatggagtaccgggatttccagcagttggtggacaaggcgagtcgccaagaagacaagtacaataggatggaacagaagaagcgtagggctgctcaattcaaggctcaacagggtagtagccagaggccgcacattggtatgggacctcaagctgcaccatacccacagggaggatcctcttcagttgttcgccctcaacgccagttctacaacaacaacactggtaatcgcagcaacaacaatcgtaatgtggtcactcgtcctgtagcagctccaacacagaatcagtctgtcaggaaggaacaaggaagcaagccaggggtgtgcatcaattgtggtgatccaggacattatgctgataagtgtccaaatcctcgacgtgtgaagaatgctcctgtccagaatgactccaatgctccagcaccgaaggctcgtgttaatcatgttgtagctgcagaagcccagaatgcacctgatgtggttttgggtacgtttcctgttaactctatacccgcaactgtgctttttgattccggtgctacagttttctccaagatagatcttcgttccggatatcaccaacttcaaatccgtgaggaggatatacctaagaccgcttttaccacacagtatggtttgttcgagtgtaccgttatgtcgttcggactcactaatgccccgtcctttttcatgaacttgatgaataaagtgtttatggaatatctggataagtttgtcatggtgtttattgatgacatccatatctactccaagacaaaagaaaagcatgaagagcatcttcgtcttgctttagagaaactacgtgagcatcagctctatgccaagtttagtaattgtgaattttggttgcccgaagtgaagttccttggtcatgtcatctcagctggaggagttgctgtggatccaagcaatgtcgagtcagtgctaaattggaagcaacctgtcacgtcccaaaacgaccctaaaatacatcctcgaaattgtgccgagaataattaa

SEQ ID NO: 14331 - DNA, 3918 bp, Oryza sativa
  Clone ID: TFbOSC400795j.C1.o74.gm
atgcagaggtggatcctggcagggatcctcgggtgtttacgagcgaaagttgaagaatatgagggcgagttagctgggcgggacggcggcggctctgaggtacgtctggacaagaagaagcaacaacagttagtggtagaggagccgctggctacgccgtgctccgccgtcgctccagctgtcgctgccgctcgggaagaccgccgtcgtcatcgccaagtcgccgccgtcctcgtccgccctttcgcagccgtcgaaacccgccggagcttcgtcgccgtcgacaacccgaaggtagccgccgcttccttctcgtcgccgtcgtcgtccgttccttttccgccgccgttttggtcaccggtgtgttcgccgcgttgtcctctacgtgctggtgccctccgttggtgccgtggtgccgccgttcgccggcgagtgtccgccgcccgagccgtcttcttcgtcgagccgccgccgtcgtcgatgccgcgttacaagcctgagtacctgtttggtgttgagggttttgtccaggagttgcatacgatgtcctttgtcattggatttgggactgcccctttttatgcccagattcctcatgatcgtcatgaagagaagtgccgagtcaaagtcaccttgaacagcaatagtgaagaggtcccctcagtaatgttcgaagctggaggaagaaactacatccatgcatgtcaggaagtggcaaggatcgccataggagagctccgtgatcgctacagtgatcaattggccgacactgagtatcgctaccatcctcgccaacctcagggaagtgaccgtggcagttaccttgagactgaaggaattgagaatgatgttaccacgaaacatttggttgagatgttgtgggctatggatgaaagtcgtgcggagactgtgttagcagctcaagatcgtgaagatcggaatcgtggtaagatttgcaagctagaagacaaggtggatcgtttggagaaggaattagccgcattgaagggagaagcaccgccgcagaaggccaagattcgtcttaccgcaaggaagagagctctattcgtccctcgctatcaactagcgccaaaggttcgtgtggtggagaaagaagttgctccagctcaagcggatcctccggtcatcatcataagtagtgatgaagaagaagaatctaagcgcaacaattccaagattgagtgggtagcaactcaagatgatgaagacgagccttcaatcgacctccgatgcttggaagaactagataccactaatcctgttgaagctagtgattggctgcatgccatagagaagaagttggatttacttcagtgtactgatcaggagaaggtctcatttgcatcacatcagttgcatggccctgcatctgaatggtgggatcacttccgccttaacaggactactgctgaacctatcacttggcttgaattcaccgctgctttccggaagacgcatataccatcgggagtagtgtctctcaagaagaaggagttcaggtcgctttcccagggatctcgctctgttacggagtatctgcacgagttcaatcgtcttgctcgttatgctccggaagatgtgcgcaatgatgaagagcgccaggagaagtttttgggaggacttaatgatgagctttcttacccactcatggttggagattatcctgatttccagaagttagtggataaggctattcgtcaggaggacaagtacaatcgcatggagcagaagaaacgtcggattgctcaattcaagacacaacagggaaataatcagaagccgcgtcttaatttaggaccccagtccatgccacagggaggttcttcgtctgttgttcgtccgcaacgtcagttcttcaacaacaatgctggcaacaacatccgtaatcaagcttcacgtcctgttgcagctccagcacagcaacaacccgccaagagggagcaaggcagcaagcccgtggtgtgtttcaactgtggagatccaggacattatgctgacaagtgtggggcccacctgtcgggcccgtctccctcctcccgccgatcccggcgcgccgccgcgcccgcaaccgtcgccgcgcccacgtctccgccttccccggccctcgtcgaccacgcccgcgcgtgcgccgcgtcccccgcgcccacttccctctctctcccgctcgcgcccgcgcccgagatggccgggattcgaaaatcgaatcccgcctctctctcctcccccactccccacgtcggccggcgattcccgccgctcccggccacgctcgccgccgtcttgcgccgtcgccgccgttcgattcgcgtggccgagatccaccccgtccacccctcctccgtcgaagtcctcccggagcccgtcgccgtcgtcctcccgtctctcatcgttgctgttcgccgtcgctcctccctcgcgccggccgagcccctcggccgccttcctcctttccccgtgaaccgccgcccggtgggccccgcttgccagccgcgcccctcccgccttgtgccactgcccgagttgaagtccttctcagttgaagatgtctcggagaggttggtttcgtcgctgccgtcaaggtcaagactgaaccagataactttggaagagattcctatagtccgggagtatcctgatgtgttcccagatgatttacctgccaatgagttggcagaagttaagaggcaagtagatgatttgctacagaaaggatacatcagaccgagttcatcaccatggggagctccggttatttttgtggaaaagaaagaccatactcagagaatgtgtgtggactatcgtgcactaaacgatgtgactatcaagaataagtatccactacccaggattgatgatttgtttgatcaacttaaaggtgccactgttttctccaagatagatcttcgatcagggtatcatcagttgagaatcaaagaggaagatatacctaagacagcttttaccactaggtatgggttgttcgaatgtactgttatgtcttttggacttaccaatgcccctgctttcttcatgaacttgatgaataagccctcgccttcgcctctcgtcgtcggaagagctctagcgccgtgtgccctagctttgccgtcgccgccgccgcttcagccgtgctccgccgtcgctccagctgtcgccgccgctcgggaagaccgccgtcgtcatcgccaagtcgccgccgtcctcgtccgccccttcgcagccgtcgaaacccgccggagcttcgtcgccgtcgacaacccgaaggtagccgccgcttccttctcgtcgccgtcgtcgtccgttccttttccgccgccgttttggtcaccggtgtgttcgccgcgttgtcctctacgtgctggtgccctccgttggtgccgtggtgccgccgttcgccggcgagtgtccgccgcccgagccgtcttcttcgtcgagccgccgccgtcgtcggaaggtgcgctgcagtggattgtgttatgcgaggggtatcgtcacaactcctttccgagataccgtggtggtattgaggcacatggtgacatgatgtggggttgtgtcttgtgggtacagtggtacacctctggccagagtaaaactattcgaatagccgtgcccgcggttatgggcggcggcggctcgtctagcgggtccatcagagtgttgatgttggctgtcgaggaccacgccgttggctcacactccgccgccttcgactcgccgaccgccggcgtcatcgcactccacttagcttggattgtctccaccgcgttcttcgctctatccaccattgtgtcgccccgaacgcccaccgagtcctcattgtcgtcggcggcggcggcaccgggcggggacagggatggtgccgctcccggctgcctcccatcgaagtcgcgttga

SEQ ID NO: 14332 - DNA, 1998 bp, Oryza sativa
  Clone ID: TFbOSC401829j.C1.o21.gm
atggtgaacacccgcactggaagtggaagtggaagtggtcacaatgaaggagatcccacacttgcccaagagaaggtttcctttgcttcgcatcagttgcatggtcctgttgctgagtggtgggatcactttcgtctaaacagagccgcgggagagcctatcacttggcgggagtttactgctgctttcaagaagacacacataccatcaggtgttgtggcacttaagaagagagagttcagagcattcaatcggggatcccgttctgtcacagagtaccttcatgactttaatcgcttagctcgttatgccccagaagatgttcgcactgatgaagagcgtcaggagaagtttttagagggattgaatgatgagttgtcttatgcattgatggctatggagtaccgggatttccagcagttggtggacaaggcgagtcgccaagaagacaagtacaataggatggaacagaagaagcgtagggctgctcaattcaaggctcaacagggtagtagccagaggccgcacattgctatgggacctcaagctgcaccatacccacagggaggatcctcttcagttgttcgccctcaacgccagttctacaacaacaacactggtaatcgcagcaacaacaatcgtaatgtggtcactcgtcctgtagcagctccaacacagaatcagtctgtcaggaaggaacaaggaagcaagccaggggtgtgcatcaattgtggtgatccaggacattatgctgataagtgtccaaatcctcgacgtgtgaagaatgctcctgtccagaatgactccaatgctccagcaccgaaggctcgtgttaatcatgttgtagctgcagaagcccagaatgcacctgatgtggttttggacgctacagcttcggaagatccactcttcgtggaagttgaagccgacgtttgggaaagcgagcaaggcaagctgggctcggggtgcatggttttgatggtagcacctcggccatataaggaccggtcttcgggcctctgttgcaaagcactaccgtacttccacatgtctagtggggcaaatgaaggctacacgagctgcggcccggtagtcgagatgtcatggcagagggttggtgccctgctgctaggggctcagtcctgcctgcctgtcccggaggttccggccgtaggcgggattgggtcgatggccggcagcgtcacccgtcgtggtttggacatgactggcttcgtcttggagttgcggggcatgtgcgtggttctggggtatccacacggagtggactaccaggccaggccgcttccggagcaggagggtgacgatgcagagccccacgctggttgggaggtcactgcagtgatcctctctggctctcccgagcggacttcgctggcagtcaccgcgggtggagattccttccccaccgcttgccagaacgccgctctcctcgccatcggcactcttcaccagcgctacccggacgagttgcaacactcgccctaccgctaccaccctcgtcgcggaggagcccgcgactacgccaccttccgggatgctagctcagaggatgacgctaccatcgtgcacctggcgcggatggtggaggcgtacaacgcggctcgtatcgacttccaccagatggtacgtcgcgggatggtcgagaacaacatgaagatcctggaactgcgccaggagaacctgcagctcaagaaggacctagacgcggtggaggcgcagctgcatcagctcaagatcgcccagggaaaggtctgtcgccccaagcgtcgccgcgtctgccgcagccagaagatcaccgcccgcaagagcacctccaggcccgagcttgttcgtcagtccctggcgtggacttgcttcatcgagacccctcgtgccgagcccgcgcccgtggttccccaggagggggaagcctccggcgtcggtagcacggaggatgcgctgttgctcaccttccgtcctggcccgtcgcagcagtag

SEQ ID NO: 14333 - DNA, 1389 bp, Oryza sativa
  Clone ID: TFbOSC405043j.C1.o1.fg
atggtgaagacaaggaatgatccccgtgactccaacgacgccagtggcagcgaagagcagacagatgaagctcataccagtggtgcacctggtagcagttcatctccaccgcccgagaacccaacagtccctcagatgatgacaatgatgatgcaacagatgcagcaacattaccatcagatgttgcagcaggcgcaacagaaccagcagtttggtcctccaccatcacacgtgtccaaactgttagactttcttcgtatccagccacccactttctcaagcaccaccaacccaatggaggccaacgactggctccgtgctattgagaagaagctgaacctactgcaatgcaacgaccaagagaaagttgcttttgctacacaccagttgcaaggtcccgcttctgtctggaaggcacagattcctgaagggattatggcacaacagaagagagagttccgtgcattgcaacaaggaaccagaacggttacagagtacctgcacgagttcaaccgcctcgcgcgctacgctcctaaggacgtgcgcaccgatgctgagaagcaggagaagtttttgtttgggctcgatgatgaattgaccaaccagctaatctccagagtctatgaggactttgagaagcttgtggacaaggctatccgccaggaagagcaacgcaacaaaatggaccgaaaaagaaaggcagctcagatcagctttcctcaggggaacaaacagaagcctcgcttcatgacgggacagctaggtgggccttccaccctgatcgtctgtcagcaccgtccctatcacccgagtaacttcaacaacgattacaacggtggcagtcacaacaacagtaagcagcacaaccacaactcgactccacccccactaatggcaccagctcagtcagattcgccagctgtgtcagctcagtcagaacagcccaagaagggggctgtaggaaagccaggaccctgcttcaactgtggcaagcacgaccactttgctagcaagtgtccgaagctgaatcgcactggacccaggttcatccaggcccgcgccaatcatgtgtctgcagaggaagcacaggtagcaccaaaggttgtgttgggcacgtttccagtgaactcatatccagcaacagttctctttgattcaggtgcctcgcattctttcatttccaaaagatttgctgggacacatggattctattcgacattgacgaaggctccatgtctctatggttctataccaagatcgactaaggcgagtacgacaaatgtcgacaaagctccgtcgcagattctgcgccttctcgatcactcgagaacggttggtggatctcgacaaggaatacggaatgaagagatggtgtacccgccgagataa

SEQ ID NO: 14334 - DNA, 6339 bp, Oryza sativa
  Clone ID: TFbOSC900110j.C1.o18.fg
atggctactacagatacaaccatagctcacattatggatgaacaagatgatatcaagatcaagtcctccaagtgctggaatccgattcggccacctgctacactgctgacttcaaacggctaccgaatttgcatacgacctccgttttcggcccatgagtacttgatggaaagttctcggagtcctctttccaacagatctggcctcatcagcagactccatctcgtttggccgcaaatacaaaaacaaggtgctgcgtcacctgtcatgggccaatgggcttgtaacttcgtttgggaccccggcccaagtggggcccatgtggggaatagggttgatctgcaccggcaagatcaacaacccacggagagttatcacaactcaccgaaagatcgggccaacaacagccttgagtgtcgagaggaactcagggttcatcaggtggtctcagagctttcatttctcggattgcgcaagggaatacgagaacatcgacttctacaccttcgacgagatatgacgacttcttcatgtgatgcatatgaggaagttcagaaaagtctccaaaatgagaagaacgatatgtttgagatgtcacttccatcactcgcgaatgaggagatggctgatgcagctacattatctgaagagggcataaaaggtaaattaaatggtgcagaaattactcaaggaatagggttgatctgcaccggcaagatcaacaacccacggagaggtgtatcgattgctaaggcgcaacacaacgtctcactagcaccaatattacaagagatggtttccactaatcagagtgctttcataaggaagagagctatacatgacaacttcatgtatgtgcaaaacccggtcaagagactgcatagaaggaaaacacccaccttgttgctcaaacttgacatctcaaaggcattcgactctttgttgctggatttcctaggagctgttcaaggcttcccaaccagttacttagcctacctcttcaccttagaaaactatggaagaggcatggactccccagcgacccccatgaacttctcgccgcttctcagtctagcaccccgtaatgaaccatgctatacaaaagaagaaaatcaagatgtgacaatttcatccctctcattgaaaaaattggctccagaattccaggacgagtgccctcgtggccgggttgacgcgcaccacaagttcgcggcgaccattggagacggtccagagaataaagatgaggagggtgcatctcattccccacgcaccaaaggcaccatccaatactttacaaggaaagtgaagcagcacacagaaagacttgagacagatttgcaggtgacaaatgagaagattggacaattggagtccacgcagatcttcaccaacactaagcttacagggctggagacagcggtcgcccgcattgacactagccttgctgcacttgtgaggcattttgatgctctcaatgctggaggcaatggtgggggtaatgacgatgacattgacggagagtacgtcgaggataatttggaggatgaatatattgctgacactgagcaagatgatcgagatgctcgagatcatcgacggctacacaacaatcgacgagaggaaactgaggatgctgccatggctagatttttgggtgggttaaaccgcgagatttatgacatcgtagactataaagattacactaatatgacccgattgtttcatcttgcttgtaaaacttcatcatggcagacacgcaccactcctccggccggccgtactgcttctccatcttccacacccgcaaccagtcgggcagcacctcctccatctagtgacaagtcagcgacaaaggctgctcagccagcactgagtgcttcttcagtggcatccacaggccgaacgagagatgttcagtgccaccgttgcaagggctttgggcatgtgcagcgtgactgccctagcaagcgagttttggtagtcaaaaacgatggtagaccatggcaatttgatagggattctatgcatcatggtaggtcaaaccagtactcttttctgtaccatgataagaaaattgtgttgcatcccatgtctcctgaagatattttgcgtgatgatgttgctaaggctgccaaatccaaatgtgagagtgataaaaaagcccaatctaatggcaagaaacctgagacaatcaatttgaaacccaaatgcttacttgctactaaatctgatattaatgagttgattgcatcaccttcagttgtctatgctttggagtactctgatgtgtttcccaaggaagtgccaccggggctgccaccggtgcgcggcattgagcatcaaatcgacttaatcccaggtgcttccctacccaaccgtgcgccataccgaaccaaccctgaggaaaccaaggagattcagcgtcaagttcatgagttgcttgataaaaggttagatgatatgcttgatgaattgagtggctctattgtgttctccaaagttgatttgcgtagtggttaccaccagattcgtatgaagttgggtgatgaatggaaaacagcatttaaaacgaagtttgggttgtatgagtggttagtgatgccttttggtttaactaatgcacccagcactttcatgaggttgatgaatgaggttttgcgtcctttcattggaaaatttgtggtggtctactttgatgatatcttgatttacagtaagtctatgggtgaacattttaatcatttacgtgctgtttttaatgctcttcgtgatgcacgtttatttggtaaccttgagaagtgcaccttttgcacagatcgagtttcttttcttggctatgttgtaactctgcaggggattgaggttgatcaagccaaggttgaggcaattcagagttggccgactcctaaaacggtctcacaagtgcggagttttctaggactcgcggggttctatcgccgctttgtgcaggatttcagcaccattgctacaccattgaatgcgcttacaaagaagggagtgcctttcacttggggcacatcacaagagaacgccttccacatgttgaaagataagttgacccatgcacctctcctccaacttcccgattttaataagacttttgaacttgaatgtgatgctagtgggattggattgggtggtattttgctacaagaaggaaaacctgttgcatattttagtgaaaagttgagtgggcctgttctgaattattctacttatgataaggaattgtatgctcttgtgcgaactttagaaacatggcagcattatttgtggcccaaggaatttgtcatacattctgatcatgagtctttgaagcatattcgtagtcaagggaaactaaactgtagacatgctaaatgggttgaatttattgaatcttttccttatgttatcaaacacaagaaagggaaggagaacatcattgctgatgctttgtctaggagatacactttgttgacacaacttgactataagatttttggcctggaaacaatcaaagaccaatatgcgcatgatgctgattttaatgatgtgttgctgcattgtaaggatggaagaatatggaacaaattcgtcatcaatggtgggtttgttttcagagctaacaagctatgcattccagctagctccgttcgcttgttgttgttgcaggaagcgcatggaggcggtttgatggcacattttggtgccaagaagacacatgacatccttgctagtcatttcttttggccacagatgcgaagagatgttggcagggctgttttgaagaaaaatatcaagatgtgggaagaatgcttgcctcatattgaatttgcttataatcgttccttgcattctactacaaaaatgtgcccatttcagattgtgtatggtttgttgcctcgtcctccaattgatttgatgcctttaccatcttctgaaaaactgaattttgatgctaagcaacatgctgagttgatgttaaaactgcatgagacaactaaagaaaacatagagcgcatgaatgctaagtataagtttgctggtgacaaagatttcagggttagtcccacatttaacattgcagatttgaagctgtatttgggagaagaagatgagcttgagtcgaggacgactcaaatgcaagaaggggaggatgatgaggacatcaacaccatcgatacatccacgttccccccatgtacaccatcgatacatccacgccgcctccatgtacagcatgatggtcctattacccgcgctcgtgcacgtcaactaaattatcaggacgagtgccctcgtggccgggttgacgcgcaccacaagttcgcggcgaccattggagacgcttttggtcagatccgactcattaagcctcttgatgggtcaaattatgctaagtggaaggctgacgtgttactcaacttaggcatactcgattatgattatgccatcagagaggaccgtcctgaggagccttttagtgttgagcacgattatgaggagaaactgaacttatatcatgagaaaactaatgaatgggagaagtccaataggatttctctcatgtacatcaagagtgccatatcaaatgtcattattggtggtattgtggactctgatgatgttaagacttacttagaaaatattgataggaacttcaggagttcttctaagtcttacgctagctctataattaagcgtctaatgtccatgtgctataattataaagatggtaataatcagagggataagtggtccattgaagaaatcatttctcattctgttgaggaggaggatcgtcagaaggctgacaaacagaagcataaggatcagctgaacctccttcatggtgctaagggcggtaagaaaaagttctatcgaggggagtccagcaactcccaaaacaagaagaagaagcccaacactccttccactcaggcttctaatggtgcccataagggcaaagctcaggttctagcaggtcagaactctgctggtaagttcctttgcaagttttgcaaggcagaaggtcatgcacagacagactgtgaaggctttcgggcttggcttgctaagaaaggtactaatgttgatattgtctctaatgttgatgaattactttacgttgaattttctcataaatcatggtggattgactcaggtgccactgtgcacgttgcgaactcattacagggattccgttccgtgaggacgctaagaaagggggagtggatcctaagagtggctgatggagctgaaattaaagtgatggccattggggagcttcatcatcgacttccaagtgatgatttctcccgttatggatatgttttccccattaaagatagatctaaatcactcgataagtttaaaatattcaaagctgaggttgaaaatcagcatgatgcaaaaattaagatacatggaataattgcccaatattccatgcctggagaaccacaacaaaatggagtggctgagcgtcgcaaccgtacacttatggacatgaggcacttaaaacagctgcacacatactcagtcgagttccaaaccgtagtagcaccagatgaaaattctggtgataccgactatgttgaaaataataatgaattaaataatgacactcaacagacttctggggcacaaaatgaagaaattctcgaagaaccttctcaaccgctagtgatcgaaagtgaaccacttacaatattacaacgggagaggagatctgccattctaaattattatgaggtttatttaggtgaagatattgggaatgtagatgatcccacctcatttaaagaagcaataatgagtgaacatttatccaaatggcttgaagccatgaaagatgaattaaaatctatgagtcataatggagtctgggacttagtagaaattcctaaaggagccaaaacagcaggctgtaagtgggtctacaaaactaagcttgactccaaagggaaaatcaaaaggttcaaggcaaggcttgtagcaaagggtttttcacaaagagaggaaatagattacaatgaaattttttctcccgtctctaagaaagactcatttagaattgtcatggcgcttgttgctcattatgatttagagctccatcagatggatgtaaagactgcatttcttaatggtgacttgcatgaggatgtatacatggcacaacccgagggttttgttatggaaggcaaggaccatttggcttgcaaacttaagaaatctatctatggacttaaacaagcgtcaaggcaatggtaccttaaattcgatgaaataattaagagatttggatttaaggagaatgaggtggataattga

SEQ ID NO: 14335 - DNA, 1518 bp, Oryza sativa
  Clone ID: TFbOSC6294j.C1.o1.gm
ggcgaattcgagctcggtacccggggatcctctagagtcgacctgcaggcatgcaagcttcgtgcaaggagcgagaagatcagttcaaagtcgtcgttccgcgatgatcaagagttcccaatatcggcaccgaagacccctgtcaaaatgcggtcaagatccccgaagataacgacagccaagtcaacgtcagaccaaaggaaagtaagtgctacctgttatgactgtggtgagcaaggtcattatgtaaggaactgtccatggaaggtgttcgccaggtcacctgaaaaagacgagaagcagtgcccagggagtaaccaagctccaagtcagtctaccgacaagaaggatggtactttgcagcgcaactctggagcgaataggacagtgatatggaagatggataatggcaggaccatcatcatcaccagttcagaatttactcctgaagatgcagcaaggatacccaagcgagaacggttttctgctgacgacgatgacgacaacgatgatgataatgatgacaatgatgatgcgacccttgacagtttcagggaaagagagttgaagttcaaagcatgtgctagatgtgggatagtcggacacactgctagtttatgcctccccacctgccgctgtgatcatgtgcctaaggactgtcagttgaacgcggtcatagctaagaccaagaaagaacaagggacaaccgtgcaacccattcgtcaaccaatgacaatcgacaacagcggtcacaatccttctgctctttctctaactccagctccagtggaagccaaccatggaagaagcaacgtcaccaaggatgttcataagcctctgcttgttcccgtttcagctgccaaagtgcataatcagaagcctgcaccccaagaccaagcaagtcgattatgtcgcaactgtcgtaagccaggacatcgtttcagtgattgtcctcttccaagagcagcaaaggcagttcgtcgtgattcacaagttaccagcactgcccacgacaccaaacgacacctgaatgtgcaacctccgccccaacggattatcgtcaagggcaccgtcaaaggtcgcattgttccaccggcaatcgtttcaagcctacaacaccaacgccagcagggtaagcaatgccaggagaacaacagctcgctacagctacaaagaggcggtacgctccttcgtcagcacccgcagcaagtgttgtcagcaccgggtcgcccaactgttgtcagttctagcaatgcacctggtattgctccaatctggaggcccatcgacaaatcaccgctcggtaaccccacgggcaagaagatcctacccgttacagctgacaagatagttgcccctccaccatcgaagatcaacaagcagagcaacgttcccgagactcttgggaactccctaaccttggaagctgttacaggatggacccgttcaagcggacgtaggatcaatgagttacaaatgccagatgcaagtcttaggaacaacttcacccttctctag

SEQ ID NO: 14336 - DNA, 978 bp, Oryza sativa
  Clone ID: TFbOSC10584j.C1.o3.fg
atggacaggaccttggccgaattgtatgggatgctaaagactgccgaggaaagcattaagaaaaactctaaccatgtgatggttatgcataagcgcaagcccaataacaagaagactggtcaaaagagaaagctaaactctgatgagatcacgagtactggcaactctaagaccaaggttcaaaagacagggcccgctaaggatacagagtgcttcttttgcaaggagacaggtcactggaagaggaactgtaggaaatacctagagcacctcaagcagatgcagcaggatggaaagagttccaccttaggtattaatgttatagaaattaatcttgctacttcctctactgattcttgggtatttgatagcagtttttcaatgaaggacttaggggaagcagtatatattctgggcataaggatctatagagatagatcaaataggctaattggattaagccagagtacatacattgacaaggtgttgaagaggctcaacataagaactaaggttatgttcctagtttatggaggacaggaagagctcgttgtaaatggttacacggacgcaagcttccaaaccgacaaagatgattttagatcgcagtctggatttgtgttctgcctaaatggtggcgctgtgagttggaagagttccaagcaagatatagtcgctgactctacaacaaaacccgaatacattgccgcttctgaagcagcaaaggaggctgtttggataaacaaatttgtttctcaattgggtgtgatggctagtgcttccagccctatggacctctattgcgataatagtggtgccattgcgcaagctaaggagcctagatcgcatcaaaagtccaaacacattttacggcggtatcacctcattcacgagatagtgggtagaggagatgtgaagatatgcaaaatacatatggatttgaacgttgcagatccgttgacaaagccactcccttag

SEQ ID NO: 14337 - DNA, 2409 bp, Oryza sativa
  Clone ID: TFbOSC401685j.C1.o102.fg
atgccggtcccgtgcttgccggaccagtcggcggcgctgctccggttgaagcgctccttcaccatcacaaacgactcccagtgcaccctcgcgtcgtggcgggccggcacggactgctgccgctgggagggcgtccgctgcggcggcgccaacggcgacggccgcgtgagaagcctcgatctggcaaggtgtttcttggagagtgcagcaattgaccctgcacttttcgatctaacttcactcaggtatcttaacctcgcacgtaatgacttcaatggctcggagctcccagctactgggtttgagccaggggcgggcccactatgtattcatgggtattcagatgtatacccaagatttttgagaaaaaatagacatttagtttgtaggattgtagaactatctagcagaactaatttgaaaagtctagcagaactatctatgatgcttatcaaaacagagagggttcgtcggtgtatgaacattttttttaccccttcctatttcgaatacccaagtttaaaaagctgggcccgccactggtttgagcgcctcaagcatctcacccatctcaacctgtccgatgcgagcatccaaggcaagataccagttgggataaggcacctgaccaatttggtatctcttgacctctccacaacattttatcttatagatcaggacgactattacctctcattcggtacatggtcagatccttcttggtgggtcgtagaaccaaacattgggtcgctagtagcaaatctcagcagtttgagagagctttatctcggcagggtggacttgtctgacaacggtgaagattggtgcactgccttaacaaactccagtactcctcaactccaggttctgagtttacggcattgcagactctttggtcccatctgcacatctctctctagcatacattcactcactgagattaatctacagtataatgacctgtatggtccagttccagactccttcgctgatttgcacttcttacgcgttcttgatcttgctgataatgatcttgaaggattgtttccaaaaagaatattacaaaacaggaacttaacaactgttcatatcagctataataccaacatctacggttctttgcccaatttctcaccagacagtagcttgacaactttgattgttagcagcacaaacttctctggtcctattcccagttccataggcaatctcaaatcgttgaacgagttgggcgttgcatcaaatgactttagacaagagcttccctcttcaattggacaactcacatccttaaaattattagaggcaacaggagctggtatagtaggaactataccatcttggatcgcaaatttaacctccttggtacttctccggttctctaattgtggtctatctggaccgataccttcttcaatagtgagaaagagagaggtgtgtgtgcgagtgagtgtttgggctgacaagtggtatcagaacctcgttcgagagatgccgaagatcggcgatggcagcaaggctgttgccggcgacgacgacaacagcaagctagtggtgcagcaagtgaaggaggcaggggtgacgctacgttaccccatgctcggggagaacaactacggcatttgggcggtgaaaatgaaaattttcatgcacgcacaaggggtgtgggctgctgtggagggcgacgcagccgatgagaagatcgaccaaatggctctcgccgccattgtccaagctgtgccggaggccgtggtgatggccatatccgagaaggagacggcgaaggaggcgtgggatgccctcaagcagatgaacatgggtgaagagcgtgtcaagaaggctcgagtacaaaccctcaagagggagcttgatggtatgtacatgagtaattctgagaaaattaatgattttgctttaaaggttaccacgatcgtgaacgagattcgctctctcggcacgaaagtggaggagaccacggtggtggagaagctcttgcattccgttcccgacaagttccaacccctcataagcaccatcgagcaatggggggatgtgtcggagatgacggtgacggagacgatcgggcgtttgcgggcgttcgaggagtcttcaaaggggcaacgacgtgacaaagagggggagcagcagttgttggccgcgtgtgccgagccacggctgacgcgtgctgagtgggaggcgaaggttgctgaagagagcagtggtggctccggtagcaacggtgttggtgagaagaagtttcgcggcaagttcgacaagtcgaagattgagtgtcacaggtgtggcaagttcggacacttcgccgacgagtgtgacgagccgcggaaaatgaccaaggcagtggtgcagcttgctattgccgacgcagatgatgaacccactttgctgtga

SEQ ID NO: 14338 - DNA, 2832 bp, Oryza sativa
  Clone ID: TFbOSC413099j.C1.o1.fg
atgtcgtggcacagggccggtgtcctgctgctaggggctcagtcctgcctgcctgtcccgggggttccggccatggccggcagcgtcagccgtcgtggtctggacctgactggtttcgtcttggagctgcggggcatgtgcgttgtcttggggtattcgcatggagtggactaccagggcaggacgctcccggagcaggagggtgacgatgcagagccccacgctgcttgggaggttactgtagtgatcctcactggctcacccgagaggacttcgttggcagtcaccgcgggtggagattctttctccgccgcttgccagagcgccgctctcctcgccatcggcactcttcaccagcgctacccggacgagctacagcactcgccctaccgctaccaccctcgtcgcggaggagcccgcgactacgccaccttccgggatgccagctcggaggatgacactaccatcatgcacctggcgcgcatggtggaggcgtacgacacggctcgtatcgacttccatcagatggtgcgccgtgggatggtcgaggacaacctgaagatcctggagctgcgtcaggagaatctgcagctgaagaaggacctagacgcagtggaggcgcagctgcatcagctcaagatcgcccaggaagaggtctgtcgccccaagcgtcgctgcgtctgccgcagccagaagatcaccgcccgcaagagcacctccaggcccgagcttgttcgtcagtccctggcgtggacttgcttcgtggagacccctcgtgccgagcccgcgcccgtggttcctcaggagggggaagcctccggcgtcagtagcacggaggatgcgctgttgctcaccttccgtcctggcccgtcgcagcggagaaatgctgccaccagtgatggcaaccaacctgaaggcagcaaccacaacaaccatggcagcccacctccacctcctccaccgcctccaccaccaccaccagacaccaacgccattctcacccaaatcctcgcccagcaggccaacatgatggctgctttcctccaccacatccaaaatccgccacaacataatgctccaccaccacccccacaacactctaaactcgccgagttcctacgcatccgtccacctaccttctctagctccaacaaccccgtggatgcgttggattggttgcatgccgtggggaaaaagttagacaccgtgcagtgcagcgatgaggagaaagtcatcttcgccgcccaccaactgcaggggcccgcatctctatggtgggaccatttccaggctacgcagccagtggggcaacctattacttgggcccgcttcaccgccgccttccggaggacccatgtgcccgccggagtcatggcccttaagaaaagggagttccgagagttgaagcaaggcaaccgctccgtgatggagtatttgcatgagttcaacaacctggcccagtacgccccggaggatgtacgggaagatgaggaaaagcaggagaagttcttggcaggaatggatcctgagctgtccgtctgtctagtctccggggactatccggatttccaacgtctggtggacaagagcatccgcttggaagccaagcacaaggaactggagtcgcacaagcgtcgcttggcgaattttcgcaaccaacagggtgctaaccaaaggatccgctacaccaatccctatccagggggatcttcctcgcagcagcagcaacctcgctccgcgcctcgacctcaattcgtggtgcgcgtcccacagccgcagcaacagcagagccagcaagggacccgtgcgccccgtcctcctacgccagccgcgcagtctggacaaggccgcagggacgttcaaggtccgcagcctctgtgcttcaactgcttcgagcccgggcactttgcggataaatgcccgaagccgaggcgccagcaaggccaagtgcctccccgctccaacaacggtggtaaggatgtcatttggggtcgtgtgaaccacgtgacggccgaggacgtgctgacaactccagacgtcatcgttggtacgttcctcatccattccatccctgctaccattttgttcgactctggagcttcccactcgtttatatctgtgccattcatggggagaaatcagttgggggtagaaaggcttaggaaccctctactcatcaccacccctggaggggttatgacagcaaacgtgtcaaggcagagcaccaacgaccggccggacttctccaacctctccaagtaccagaatggaaatgggatgaaattgggatggatttcatcaccggacttccaaaaacccaaggtagctcgatttattcctgtgaaggccacctatggagggaacaaactagctgagctctactttgctaggatcctccggtccgccgccgttgtcgccccggaccacctctcccctcggcgccacctccttcggcttcgccgcatccccggcgacctcgtccacccctccgtttcgctcgccgaccgccggagcaccgtcgaccccgtccacccgagccgcgccgccgccttcctccgctccggtcgccgtttccgtcttcgccgtcgacccggggtgagccgtggaccgccgcttcttttcccccttcccttcccctccctcggccgccgctccgccgtgcctatggacgccgccggcgaccataggggcgcgggcgcgccgcctcccgccgctgcgccggtgtggccgtcttcgggcgcaccgtgcggctgccgcgtggggcccggctgtcagccgcccgcgccctcgggtgcggctgacgcgtgggacccacggcgccggccggtgtga

SEQ ID NO: 14339 - DNA, 5856 bp, Oryza sativa
  Clone ID: TFbOSC419041j.C1.o8.fg
atgtcgggccaagcgggggatgggaacaatggtgataagggagctaagatcccttatgactatccctccacatctacatcttatgtgagtacctatagcggcaaagctccgtacttcaatggtacggactatgccgcttggaagcataagatgaagatgcatttgaagtctattaacccatctatttggagaatagtcgaaaaaggctatgttttgcagaatcccgaagatcccaccaaggaggacgacgagaacgagcacaagaacgctcaagccgctaatgcaatacttagcgccttgagtggaagtgagttcaaccgtgtggatggcattgagagtgccaaagtgatttggtacacgcttcggaacttgcatgaaggcacgtatagtgttcgtgagtccaaggtggagatcctcaaggggcaatttgagagatttgtgatgttagatggtgagagcccaagcgacatgtacgaccggttaagcaagatcgtcaatgaaatcaagggacttgactccaaggacatgaccgatgaggttgtggtcaagaagatggttcgagcaatcactccaaggaactctaccttggtgaccatcattcgtgagcgtccggactacaagactctcacacctcatgatttgctcggatgcatccttacccatgacatgctcgtgcaagagtctaaggatgtcatccaatacatcaaccaaagctcaaccgcaagcatcaagaatgaagacttggctttgaaggcaaaggaagaagaagaagagaaccgcaagagcaagagcaaggcggagatcaatgatgaagagatggctctcttcgtcaagaagttcggcaagttcatgaggcgaagcggcttcttcaagggaggatcttccaagcactactccaacaagtcaagtggaagacactccgcaaaagtgtgctacgtgtgcaaagcgcctggacacttcattgtggattgcccccacctcaaggatggttcccacatcaaggaagataagaagaagagtgagaagaaggatgagaagaaggagaagcacaagcatagcaagagggaacattatggccaagctcaccttgggatgatcttcggctccgactccgagtcaagctcaagtgatgaagaaggagtcgccacgtttgccgtcaagccttcatcaccaccgagactcttcgactactcaagtgatgaggatgctcccgtttgcctcatggcaaaggagcctaaggtaccttctcctcacaagtcatttaatgttgatcttgttagtgatgaggaggatgaggttatggatgacgaattgttcaagtccataactaaggaatccctaccacacttgagtgagttgcttgggagaattaaggaccaatatggaactcttgagaggcaagagagtttgctcattcgtaagaaagagcggtctcatgaactcaagagtgagcttgctaaagagagagagaaaaatgaggcattggtacgactttacaagcaaaccaaagagtctcatgctaatcttgaggtggcgaacgctcaacttcaagagagagtggatggcttggacaaagcatacctcactcttgaagagaagttcgaaaccttaaaaaatagtgtctctctccctagcgagccatcttgttccaaaattgtcccaagcaatgaaccatgtgtgagatgcaaagatattgatattgaagcttgtgctactaactctatttccttgagtgctttgcaaaagcaaaatgagaagcttatgggactccttcacaatggcctacttaagtgccatatgggtagtaaggccctaaaggagtacctagactatcaaagggacaacttcaaccatgagggtcttgggtatgttcctccaccaaaaggaaaggtggacaagagtgtgatgatcaagaggccccaaggtcttagcaattttgttaaggccaaaagtatcattcctaatgattatgcttcacattgttcttttgatgcatcttatgttcttaggaagaatgctagtggtcgtattgttgctaagtatgtaggcccaaggggcaagaatatttctatcaagagagtactttgggtgcctaaggcacttgttactaacatgagaggacccaagcaagaatatgtctccggtggaagaagttgggtgattgatagtggatgcacaaatcacatgactggagaagaatcaatgttttcaactcttgatccaaatggcacttcacaagataacatagttttcggggacaacggaaagggaaaggttatgggattgggtaacattgcaatatctaatgatctttccattgccaacgttctcttggtaaaatctctaaactacaatcttttgtctgtttctcaattatgttctatgggttacaattgtctttttaccgatgttgatgtgaccgtctatagaaggaatgattcctcggtagtctttaagggtgtcctcaagggaaagctttaccttgtggatttttcctcaagtaaagccaaacatgagacatgctttgtggctaagtccaacacggggtggctttggcatcggaggctagcccatgttggtatgaggaatcttcacaagcttctaaagcacgatcacatccttggactaacaaatattcaatttgagaaagatagggtgtgtagcacatgtcaagccggcaaacaaattggagcacatcaccccgtcaagaatgtgatgaccactacaagactattggagcttctccacatggacctcttcggaccaattgcttatctaagcattggaggtaacaaatatggtcttgttattgttgatgacttttcacgcttcacgtgggtgttctttttgcatgacaagagtgagacacaagctatcttcaagaagtttgcaagaagagcacaaaacgagttcgacctcaagatcaataaggctagatcctctaagttcgctcctaaagtggatgagggattcttgcttgggtatgggtcaaatgaatacgcataccgcgttttcaacaaaacctccggtattgttgagatcgcgcgtgatgtgacatttgacgaaactaatggctctcaagtagagcaagttgactcacatgtgttaggtgaagaagaggatccgagcgaagcaatcaaaagattggctcttggggacgtacgtcctagggagccacaacaaggagcctcttcctcaacacaagtggagccacctacatcaacccaagccgacgatccctctatctcaagcttggatcaaggtgaagaaggcgagcaagtgccaccctcaccgatcaacttagctcgcccaagaatccaccaaagtatccaaagagatcatcccaccaacaacatcttaggagacatcaacaagggagtatccactcgttctcgtattgcaaatttttgtgagtattactcgtttgtgtcttctcttgaacctctaagggtggaagaagctcttaatgatccggattgggtgatggcgatgcaagaggagttgaacaatttcacccggaatgaagtgtggactttggtggagcgacctcggcaaaatgtgattggcacaaagtggatcttccgcaacaaacaagacgaggccggggtcgtaataaggaacaaggcgaggttagtggcgcaagggttcacccaaatcgaaggattagatttcggtgaaacttttgcgccgcgccttcctcaacgggcctatcaacgagttggtatacgtggagcaaccaccgggcttcgacacgtgtacaagctccacaaggcactctatgggcttaagcaagcccctagagcttggtatgagtgtcttcgcaattttcttgtgaaaaacggctttgaaatcgggaaagccgattcaacccttttcactaaaagacatgataatgatatttttgtgtgccaaatatatgtcgatgacattatatttggttctactaacaagtcttttagtgaagagtttagtaggatgatgaccaaacgttttgagatgtccatgatgggtgaattgaagttcttcctcggccttcaaatcaagcaactcaaggaaggaactttcatttgccaaacaaagtatttgaaggacatgcttaagaagtttgggatggagaacgccaagccaatccacactcccatgccatcaaatggccacctcgacctcaacaagcaaggtaaagacgtcgatcaaaaggtataccgttccatcattggctcacttctttacctttgtgcatctaggcccgatattatgcttagtgtgtccatgtgtgcaagatttcaagccgctccgaaggagtgtcaccttgtggccgtgaagagaattcttagatatttagtgcacacacctaaccttggtctttggtatcctaagggagcgaggtttgatctcattggctatgccgatgcggattatgccgggtgcaaagtggataggaaaagcacatcgggtacttgccaattcttgggtaggatgcctccccgcaagcaaacctcccacaagtccaagcgcccgagggatcgctctcccactccatcctctcatgatgattcggacagtgattggtccggtggagaggatgcggttcctcaggttgcgcgggtggctcggcggtctactcaagctcatggtggtggtggtgatggtgagggctcctctcgtcaaccgcaaacgccgccgcaccaacccaatgtccccattgggcctctccgcattcatacccccgagagggatctggcggtgattcgccaagtgtatgattggcggcgcaagtctgaggttgttgctcctcgtcgggatgaggatccgcgctcccttcggcgcaccgccacggatccgcgtttttggaccctctttcagcaagacttttatgagtctgtgattaagtccaaagctcatcccactgttcccatgcaatggatcaattgggaggagttgcaggcacacaatgatccggtgattgactctgtgattgccaattgtgatctcatgggtatccgctccttcatgacgttgcaccaaaattggtgcaacgagctcaaccttgatgaccttcataatcttcaaattcctgccaacacagaatttcttcccctttacactccaaatgatccaaatgtggtgttgggcaaggtcgacggcctcaagccatactttgcctacttgaaccggatgtttcgccggtcttttgtgcctaaggatggtgatgctagcagcattaaccacctttctaggaccgtgcttctccggtttgatccccctcctcaccgcttccatgtctatcactttgtgtgggaggagattcgcatggcttcaattcagtacaagaaggggttggtctatgcccctcacattatgcggatgatcgagactgtgactcaactccagtttcgccatgatgtgactcattctcagcttcacttgcgccttcttaaggccccccgctcctcagctgctcgggacataccctcctcttccactcagccgcctcctgctcctgagcgccctgcctctgtggctcgtcgtgagccgtctcccttattccgcattttgcggagtctttttggtctttgctccgcgaaggccaaaaagaaccgccgattgcggaattcggcgaagaaaacggctcgtgatgtcaagttcctcaaggcaaggtattatgaggaccaccacattgatatccctccttctcctccgggtttcgaggccgagcccgatgagccagaggatgaagcgattgaggatccttttgctgggttgccttccgattttgacttctttggatatggccatggctatggctatcctcctccaccccctccagaggatcctcctcaggcgcccttcgcttga

SEQ ID NO: 14340 - DNA, 392 bp, Oryza sativa
  Clone ID: TFbOSC9385j.C1.o1.fg
atgactggtcaaaagagaaagctaaactctgatgagatcacgagtactggcaactctaagaccaaggttcaaaagacagggcccgctaaggatacagagtgcttcttttgcaaggagacaggtcactggaagaggaactgtaggaaatacctagagcacctcaagcagatgcagcaggatggaaagagttccaccttaggtattaatgttatagaaattaatcttgctacttcctctactgattcttgggtatttgatagcagtttttcaatgaaggacttaggggaagcagtatatattctgggcataaggatctatagagatagatcaaataggctaattggattaagccagagtacatacattgacaaggtgttgaagaggctcaacat

SEQ ID NO: 14341 - DNA, 2364 bp, Oryza sativa
  Clone ID: TFbOSC401185j.C1.o9.gm
atgggaattgttagtgtgttgatgggccttgggaatgaatgggcggtgcaagctctggtccttttcagcttcacgctgcaagtcaccctcctctcgcttgcttggatccgtcggcacagcatcgccaccatgccaaagctggtcctatgggtggcgtaccagctagccgactccaccgcgctcttcaccctaggccacatggccatcagcagcaggtcgagggaggagcagccgctcatggcgttctgggcaccgttcctcatcctacatctcggcggtcaggacaacatcaccgcctactccttcgaggacaaccggctgtggctgcgccacctgcagaccctcgtcgtgcaggtgatgggtgcttcgtatgttctctacaagtacatgcccggcaaggagaccctggtcatggcggccgccgtgctcatcttcgtggtgggcattctgaagtatggcgagaggatatgggccctccgggaagccaccttcgacaatatagccaggtgtttggaccagcaggaggattatgccagcgctcgcgaacgcgaaggcgacgatcttctccagcatgttctacaaggaaggagctctatggacgaggagaacgttctgattggagcacatggcctgctcgacatttgccgagggctgttcatcgggtcacgcggtgggaggcgcggctacctcaggcatgtcctgctgtccttccaaatgtatgtccgtcttgataagctgatggagttggagctgtccctcatgtatgacatcctctacaccaaggccaccgtgatccacacatggatcgggtgctgcatccgtgtcatcgcgcttgccgccacggtgaccgccacgttcctcttcctgctcagcagcaaacacgggcacagcaggaaagatctcgccgtgacatacgtcttgttggccggggccttgctcctggaaatgatatccatggtgagggcagtcttttccacctggacggtcgtcttcttgtacaagctgaaatggtattggctctatggcgaggttctctccatccgccgtgttttcaggagattggcgagaacaagaccggcaatcgggtctcaacctggcgtgcgcgcgttcaaagctctcggcctggacggcagcctcggctggaggaccatccaagacatcggcttcgaggatagtatcatggcgtggcatctcgccagtgacatctgcctcttcagtgaccgcagcaacaagctggatttgcacgagggggtggcggttctgtccaactacatgatgttcctcctcgtgcaccgccggtacatgctgccaggccccgtgcgtcgcacgcggtacgagcaggtgcgcgacgatctcaacaagtttatgcatcgaaagggccgcgctcgctcgccgcaggacttgttcgtgtgggctcttcgcaggggcctccatgatcatctcaactccgacgatcctccggcgcagtacgacaccggagtaagacttgccgccgtgctctaccaccggttggacaggcttgatatcatctttggggagctctgcctcttcctcactgcaccgcgcacagttcattgcatgcaagagccatgtcgcctccgacgccacacgtctcgcattcgccgcatcgtcaatcccgctcgcctcctccgcgccgtggtcgctgttggcctggcgccgcttgggacttgggaggacaggatggtgttggaggccgtcctcaaggcggtccccgctgatctgctgccggtgctcgctgtcaaggagatgacgaaagacgcctgggatgccatcaagacgatgcgcgtcggcgtcaaccgtgtccgcaagtcaaaagcgcaggagctgcgcaagcagttcgatgcgatcgagttcaaggaaggggagtccgtggaggaattctccatccggctgagctggctcgtcaacaactttgcgtactcgggatccagcttgaggaatcaagataccctgtcgcttgagcagctgacaggggtgaagaacagtggtccactcgtgccgaggaacaggcagtccggcgagggatcgtcgggcaagaagcaggcatcaaccaccgccgccgcggtgggcaagaaaaaaaccgagggcgctgccaatggcgagcggtgcgcgcgcgatcaattgcgcgacaagtgcaaaaactgtggtcgtctcggtcattgggagaaagactgtcgccagcccaagaaacaagccgaggcacacgccgtccagggtgaggaggaagatgacgagccggttttgctaatggctcacgctgttgagctggcgcaacctccaccatcgccaccaccaactgaaccgttcgacctcgttgagcccaaggtgttcacactgttatga

SEQ ID NO: 14342 - DNA, 4536 bp, Oryza sativa
  Clone ID: TFbOSC401709j.C1.o24.fg
atggtgaagacaaggaatgatccccgtgactccagcgacgccaggggcagcgaagagcagaccgatggagctcatgtcagtggtgcatctgacagcagttcatctccaccgctcgggaacccaacggtcactcaaatgatgacaatgatgatgcaacagatgcagcaacatcaccatcaggtgttgcaacaggtgcagcagaaccagcggtttgctcctccaccatcacacctgtccaaactgttagactttcttcgtatccagccacccactttctcaagcaccaccaacccaatggaggccaacgactggctccgtgttgttgagaagaagctgaaccttttgcaatgcaacgaccgagagaaggttgcttttgctacacatcaattgcaaggtcctgcttctgcctggtgggataactacgtggtgacccgtccagatgcaacgaaggttacttgggtagagttttgtcaaaactttaggaaggcacagattcctgaagggattatggcacaacagaagagggagttccgtgcattgcaacaaggaaccagaacggttacagagtacctgcacgagttcaaccgcctcgcgcactacgctcctgaggacgtgcgcaccgatgctgagaagcaggagaagtttttgtttgggctcgacgatgaattgaccaaccagctaatctccggagtctatgaggactttgagaagcttgtggacaaggctatccaccaggaagagcaacgcaacaaaatggaccgaaaaagaaaggcagctcagatcagctttcctcaggggaacaatcagaagcctcgcttcatgacgggacagctaggtgggccttccaccctgatcgtctgtcagcaccgtccctatcacccgagtaacttcaacaacgattacaacggtggcagtcacaacaacagtaagcagcacaaccacaactcgactccacccccactaatggcaccagctcagtcagatccgccagctgtgtcagctcagtcagaacaacccaagaagggggctgtaggaaagccaggaccctgcttcaactgtggcaagcacggccactttgctagcaagtgttcgaagctgaatcgcactagacccaggttcatccaggcccgcgccaatcatgtgtctgcagaggaagcacaggcagcatcagatgtcgtgctgggcacgtttccagtgaactcatatccagcaacagttctttttgattcgggtgcctcgcattctttcatttccaagagatttgctgggacacatggattatcggtaatggaacttaaaataccgatgcaggttcatacctctggaaatgacatgaagacatcacactattgcccctcagtgactatagagatcaagaggtcacaatttctatccaacctcatccttctcgaatccaaagacctggatgtcattctcggaatggattggttgaccagacacaagggggtgattgactgcgcaggccgcaccatcaccctaaccaacgacaaaggggagaagatcaccttccgttctccagtgtcacagaagtccgtagcgagtctgaatcaggctgctattgagggtcagacagaaacagtggagaaaagtcccaggaagttggaggatattcctatagtacaagaatatcctgaggtatttcctgaagacctcactacaatgccaccgaagagagaaatcgagttccgaattgatctggcacccggaactgctccaatttacaagaggccgtacagaatggcagctaatgagctagcagaggtcaaaaagcaagttgatgaacagctgcagaaagggtacattcgaccgagtacttcaccttggggtgctccggttatctttgtggagaagaaagacaagactaagaggatgtgcgttgattatcgggcccttaatgaggtcacaatcaagaacaaatatccgttgccaagaattgatgacctgtttgatcagctaaaaggagctaaggtgttttccaagatagacctgcgattaggctatcatcagttgagaattcgggaagaggatattcccaagacagccttcatcactcggtatgggttgtttgagtgcacggttatgtcatttggactcaccaatgcaccggctttcttcatgaacttgatgaacaaagtgtttatggagtttcttgacaagtttgtcgtggtattcattgacgacatacttgtgtattcaaaatcagaagaggaacatgagcatcatcttcgtctggtactcgagaaattgaaggagcaccagttatatgccaagtttagcaagtgtgacttctggttatcggaggtcaaatttctgggtcacgtcatttctgctcaaggcgtggcagtggatccatcaaatgtggaatcagttacaaagtggaccccaccaaagacagtttctcaaatccggagttttcttggacttgcgggctattaccgtcggttcatcgaaaatttctccaagattgccaggcccatgacacagttgctaaagaaagatgaaaaattcaagtggtcagctgagtgcaaccaaagttttgaagaactcaagaagaggttagtctctgcaccagttctaattttgccagatcagacaaaagacttccaagtctactgtgatgcatctcgccaagggttgggatgtgtgttgatgcaagaaggcagagtggtcgcatacgcttcgcgacagttgcgtccacaagagaccaattaccccactcatgaccttgagttggcagcagtggttcatgctctgaaaatctggcggcactatcttattggcaaccgctgtgaagtatacactgatcacaagagtctgaagtacatcttcactcagcctgacttgaatctccgacagcgaagatggctggagttaattaaagattatgacatggggatacattatcatccaggcaaagcaaatgtggtagcagatgctttgagcaggaaaagctattgcaatgccttatgcactgaagacatgtgtggcaaattgcagcaagatcttgagcacctaaatttgggcatcgtggaacacgggtacgtagctgccctagaggcacggcctacgctcgtggatcaagtcagagcagctcaagtaaatgatcctgaaatagctgagctgaaaaagaatatgagggttggaaaagctcgagatttccatgaggatgagcatggcacaatctggttgggagaaagattgtgtgtgcctgacgacaaagaactgaaggatctcatactcacagaagctcatcaaactcagtattcaattcatcccggcagtactaaaatgtaccaggacctcaaagagaaattctggtgggtcagcatgagaagagagatagccgaattcgtcgcactttgcgatgtttgtcagcgagtcaaagcagaacatcagaggcccgcaggactgctacaaccccttcagatcccggaatggaaatgggaagaaatcggaatggatttcataacaggtttgcccaggacatcgtcggggcacgattcaatctgggtggtcgtggatcgactcaccaaagttgctcatttcattccagtacacactacctatactggaaaaaggttggcagagctttatctttcaagaatcatgtgtttgcatggggtacctaagaagattgtatctgatcgaggaagtcaattcacttcaaagttctggcagaaactgcaagaagaattggggactcgtttgaatttcagcacggcttatcatccgcaaacagatggtcagaccgagcgagtaaatcaaatcttggaagatatgttgagagcttgtgcacttgactttggtggagcctgggataaaagtctaccgtatgcggaattctcttacaacaacagctatcagtccagtttgcaaatggcaccgtttgaagcattgtacggacgaaagtgctgcacaccacttttctgggatcaaacaggtgagcgccaactgtttgggacagaagtgttaaccgaagcagaggagaaagtcaggaccgtcagggaaagactgcgaatcgcccagtctcggcagaagagttatgctgataaccgccgaagagagcttactttcgaagcaggggattatgtgtaccttcgtgtcactccgctccggggagtacaccggttccagacgaaaggcaaattggcaccacgctttgtgggaccatacaggattttggaacgcagaggtgaagtcgcttaccagctagagcttccatctaatatggttggtatccacgatgtgtttcatgtatctcaattgaagaagtgtttgagggtacctaaggaacaagctagctcagagcacattgacatccaggaagatctgacttatgtggagaagccgattcgtatcctcgagaccagtgagagaaggaccagaaacaaggtgatcaggttttgcaaagttcagtggagccaccactcggaagaagaggccacctgggaaagagccgctcatccgcacctctttgccaactcttccgaatctcggggtcgagattccgtttaa

SEQ ID NO: 14343 - DNA, 7149 bp, Oryza sativa
  Clone ID: TFbOSC900175j.C1.o19.gm
atggagtataaggcgggcccgcccgccaccctcgctgacgggtggggcccacctgtcatcgcctacctcgcgccgcgcccgccgcccgcccgtgccctagggccgccgccgccgccgccgaatccgccgcatcccgccgtccccgcgcgccataaagagggggaaatcactccccgtgattccctctcccttttcccccgtttttccctctctctctccctcggattcgtttggaatctctcccgcaatcctcgccggcgcaatcaatggcggccggatcctccgcgccggtttccatctcctccggccgccctctctcactcccgacgctatataatcgctcctcgtgcttcgctcctccgtttccgccactcgccgcacactctccccgtcggattcgtgcccgcgccgtcttcctctctctccgccgtcgccgccgagctccggttcgccgccgtcgtcgctccggacctcctcccgactcggcgtcacctccttcggcttcgccgcgttcccgtcgacctcgtccaccccttcgtttcgcccgccgactgtcggagcgccgccgtcctcgtcgatccgaaccgcgccgccgccttcctccgctccggttgtcgtttccgccgtcctcgtcgtcccggggtgagccatggaccgcctccttcgcttcccccttccctcccctctctcggccgccgctccgccgcgccgttggtcgccggcggcgaccatcggggcgcgggtgcgccgcctcccgtcggccgtgccggcgaggccgccttcgggcgcgccccgcggctgccaggtgggcccggccgtcagccgcccgcgcccgcgggtgcggctgacgcgtgggacccacggcgccggtcggcgtcagccgcgtgcacccggtccaccgtggaccgagaggctgacgcgtgggccccactcccgtggacccggctgggctcggggtgcatggttttgatggtagcacctcggccatataaggaccggtcttcgggcctctgttgcaaagcactaccgtacttccacatgtctagtggggcaaatgaaggctacacgagctgcggcccggtagtcgagatgtcatggcacagggccggtgtcctgctgctaggggctcagtcctgcctgcctgtcccgggtgttccggccgtaggcgggattgggtcgatggccggcagcgtcacccgtcgtggtttgggcatgactggcttcgtcttggagttgcggggcatgtgcgtggccctggggtatccacacggagtggactaccaggccaggccgcttccggagcaggagggtgacgatgcggagccccgcgctgcttgggaggtcactgcagtgatcctcgctggctcttctgagcggacttcgctgacagtcaccgcgggtggcgattccttccccgccgcttgccagagcgccgctctcctcgccatcggcactctccaccagcgctacccggacgagttgcagcactcgccctaccgctaccacccccgccgcggaggagcccgcgactacgccaccttccgggatgctagctcggaggatgacgctaccatcgtgcacctggcgcgcatggtggaggcgtacgacgcggctcgtatcgacttccatcagatggtgcgccgtgggatggtcgagaacaacatgaagatcctggagctgcgtcaggagaacctgcagctcaagaaggacctggacgcggtggaggcgcagctgcatcagctcaagatcgcccagggagaggtctgccgccccaagcgtcgccgcgtctgccgcagccagaagatcaccgcccgcaagagcacctccaggcccgagcttgttcgtcagtccctggcgtggacttgcttcgtcgagacccctcgtgccgagcccgcgcccgtggttccccaggagggggaagcctccggcgttggtagcacggaggctctctctgttgctggttctgtgtggggttttcagatggtgacgaccaggagaaatgctgttaccggtgatggcaaccaacccgaaggcagcaaccacaaccaccagggcaacccacctccacctccacctccgcctccaccaccaccaccagacaccaacgccattctcacccaaatcctcgcccagcaagccaacatgatgactgctttcctccaccacctccaaaatccgccacaacataatgctccaccaccacccccacaacactctaaactcgctgagttcctccgcatccgcccacctaccttctctagctccaacaaccccgtggatgcgttggattggttgcatgccgtgggaaaaaagttagacactgtgcagtgcagcgatgaggagaaagtcatcttcgccgcccaccaactgcagggacccgcatctctctggtgggaccacttccaggctacgcagccagaggggcaacctatcacttgggcccgcttcaccgccgcttttcggagaacccatgtgcccgccggagtcgtggcccttaagaaaagggaattccgagagttgaagcaaggcaaccgctccgtgatggagtatttgcatgagttcaacaatctggcccgttacgccccggaggatgtgcgggaagatgaggagaagcaagaaaagttcttggcaggaatggaccccgagttgtccgtccgtctagtctctggggactatccggattttcaacgactggtggacaagagcatccgcttggaagctaagcacaaggagctggagtcgcacaagcgccgcttggcgaatttccgcaatcaacagggtgctaaccaaagggtccgctacaccaatccctatccagggggatcctcctcgcagcagcaacaacagcagcagcaacctcgctccgcgcctcgacctcaattcgtggtgcgcgtcccacagccgcagcagcagcagggtcagcaggggactcgtgcgccccgtcctcctacgccaactgtgcagcctggtcaaggccgcagggacgctcaaggtcagcagcgtctgtgcttcaactgcttcgagcccgggcactatgcggataaatgcccgaagccaaggcgtcagcaaggccaagcgcctccccgctccaacaacggtgggaaggatgtcattcggggtcgtgtgaatcacgtgacggccaaggacgtgctgacaactccggacgtcatcgttggtacgttcctcgttcattccatccctgctaccattttgttcgactctggagcttcccactcgtttatatctgtgccattcgtggggagaaatcagttgggggtagaaaggcttagaaaccctctgctcatcaccacccctggaggggttatgacagcaaagtactatagccctgccgtccctatagaaattcaggggattccttttccctcggatctgattctgctagacaccaagaatttggatataggactgtcagaaatccccatcgtcagggagttcggagatgtgtttccggaagaactacccgagaagaaagacaagacgaagaggatgtgcgtcgactacagagctctcaatgaagtcaccataaaaaacaagtaccctcttccccggatcgatgatctgttcgatcagcttaaaggtgccactgtattctctaagatcgatctccattccggatatcaccaattacgtattcgtgaagaagatattccaaagaccgcattcaccacgcgatacgggctgtatgaattcacggtgatgtcgttcggtttgaccaatgcacctgccttcttcatgaacttaatgaacaaagtgttcatggaatacttggataagtttgttgtggttttcattgatgacattctaatatactcacaatcagaggaagaccatcagcaccatctccgtctggtgttgggaaagttgcgggaacatcaattgtatgccaaacttagcaagcgtgagttctggttgtccgaagtcaaattcttagggcacgtgatatctgctaaaggtgttgctgtggaccccgaaacagtgaccgccgtcaccgattggaagcaacccaagacagttactcaagtccgcagtttcttaggtttggcaggatactaccggagattcatcgagaacttctccaaaatcgctcgacccatgacacagttgttgaagaaagaagagaaatttgtgtggagcccgcaatgcgagaaggcgtttcaaactctcaaggaaaagctggtttcctcgccggtgttaatcttgccggatactcgcaaggacttcatggtgtattgtgacgcttcgcgccaaggattggggtgcgtgctcatgcaggacggtcatgtggtagcctatgcctcccgtcagctacgacctcatgaaggcaactaccctacccatgatttggagttagcagcggtgattcatgatctaaaaatctggcggcactatctcattgggaatcgctgtgaaatatatactgatcataagagtttgaaatacatcttcacccagtcagatctgaatcttcggcaaaggagatggttagaactcatcaaggattatgatgtgggaattcactatcatcctggtaaggccaacgtggttgccgacgctttaagtcgaaagagccattgcaacactcttaacgtccgtggcatcccacccgaacttaatcaacagatggaagccctgaacctaagcatagttagtcgtggatttttggccgcgttagaagccaagcccaccttgctcgatcaaatccgcgaggctcagaagaacgacccggacatgcatggactcctcaagaatatgaaacagggtaaagccgctggtttcacagaagaggaacacggaaccctatggaacggaaaccgggagaaatactggtgggttagtatgaagcgggaaattgcagagttcgtggccctttgtgatgtgtgccagcgtgtcaaggcagagcaccaacgaccggccggacttctccaacctctccaagtaccagaatggaaatgggatgaaattgggatggatttcatcaccggacttccaaaaacccaaggcggatatgattctatatgggtagttgtggatcgattaaccaaggtagctcgatttattcctgtgaagaccacctatggagggaacaagctagccgagctctacttcgctaggatcgtgagtctccatggcgttcccaagaaaatcgtatctgataggggaagccaattcacctctcacttttggaagaaactccaagaagagctgggtacccgattaaacttcagcaccgcctatcacccgcagacagatggacagaccgagcgtctaaatcagatcctagaagatatgctccgcgcatgtgtcctagatttcgggaagacctgggataagagtctcccctatgccgagttctcctacaataacagctatcaagccagcatacaaatggcaccttatgaagcgttgtatgggcgcaaatgccggacaccactattgtgggaccaagttggagaaagccaagtgttcgggactgatatcctgagagaagctgaagctaaagtcagaatcattcgggaaaatctaaaggtggcacagtcccggcagaaaagttatgcagataaccgtcgccgcgacctggaattcgcagtggatgactttgtgtatcttcgggtcacgccattgcgaggtgtacacaggtttcagacaaaagggaagctcgcacctcggtatgtgggtcctttccgtatcattgctcggcgcggagaagtcgcttaccagttggagctgcccgcctccttgggcaacgtgcatgatgtgtttcatgtgtcgcaactcaagaaatgtcttcgagtgccatccgagcaggccgactcagagcaaattgaagttcgcgaagatttgacctacgtggagaggccagtgaaaatcctggacaccatggagcgcaggaccaggaaccgggcgggcccgcccgccaccctcgctgacgggtggggcccacctgtcatcgcctacctcgcgccgcgcccgccgcccgcccgtgccctagcgccgccgccgccgccgccgaatccgccgcatcccgccgtccccgtgcgccataaagagggggaaatcactccccgtgattccctctcccttttcccccgtttttccctctctctctccctcggattcgtttggaatctctcccgcaatcctcgccggcgcaatcaatggcggccggatcctccgcgccggtttccatctcctccggccgccctctctcactcccgacgctatataatcgctcctcgtgcttcgctcctccgtttccgccactcgccgcacactctccccgtcggattcgtgcccgcgccgtcttcctctctctccgccgtcgccgccgagctccggttcgccgccgtcgtcgctccggacctcctcccgactcggcgtcacctccttcggcttcgccgcgttcccgtcgacctcgtccaccccttcgtttcgcccgccgactgtcggagcgccgccgtcctcgtcgatccgaaccgcgccgccgccttcctccgctccggttgtcgtttccgccgtcctcgtcgtcccggggtgagccatggaccgcctccttcgcttcccccttccctcccctctctcggccgccgctccgccgcgccgttggtcgccggcggcgaccatcggggcgcgggtgcgccgcctcccgtcggccgtgccggcgaggccgccttcgggcgcgccccgcggctgccaggtgggcccggccgtcagccgcccgcgcccgcgggtgcggctgacgcgtgggacccacggcgccggtcggcgtcagccgcgtgcacccggtccaccgtggaccgagaggctgacgcgtgggccccactcccgtggacccggctgggctcggggtgcatggttttgatggtagcacctcggccatataaggaccggtcttcgggcctctgttgcaaagcactaccgtacttccacatgtctagtggggcaaatgaaggctacacgagctgcggcccggtagtcgagatgtcatggcacagggccggtgtcctgctgctaggggctcagtcctgcctgcctgtcccgggtgttccggccgtaggcgggattggtcttgctcaatttttcccaagcccagaagaggagctccttgaagatgaaggctttggtgtctag

SEQ ID NO: 14344 - DNA, 2203 bp, Oryza sativa
  Clone ID: TFbOSC15176j.C1.o1.np
atgccgcgctacaagcctgagtacctgtttggtgttgagggttttgtccaggagttgcgtacgatgtcctttgtcataggatttgggactgcccctttttatgctcagattcctcatgatcgtcatgaagagaagtgccgagtcaaagtcaccttgaatagtaatagtgaagatgtcccctcagtgatgttcgaagctggaggaagaaactacatccatgcatgtcaggaagtggcaaggatcgccataggagagctccgtgatcgctacagtgatcggttggctgacactgagtatcgctaccatcctcgtcaaccacagggaagtgaccgtggcagctaccttgagactgaaggaattgagaatgatgctaccacaaggcatttagttgagatgctgtgggctatggatgaaagccgtgcagagactgtgttagcggctcaagatcgtgaagattggaatcgtggtaagatttgcaagttagaagacaaggtggatcgtttggagaaggaactagccgcgttgaagggagaagcaccaccgcagaaggccaggattcgtcttaccgcaaggaagagagctctatttgtccctcgctatcaattggcgccaaaagttcgtgtggtggagaaagaagttgccccagcagatcctccggtcatcatcataagtgatgatgaagaagaagaatccaagcgcacccattccaagattgagtgggtagcaactcaagatgatgaagacgagccgaacgagcctacaatcgacctccgatgctcggaagaactagacaacgggaatggccccaacagcaacaataacaacaacaatggagagaacccaacacttgctcaagttcttgctcaacagactcagttaatgaacatgatgatgcagcaacttcagaatcagcaaaaccaaggaaataaccatgcacctccccagaacaagttagcagaatttcttcgtgtgaggccgcctattttctctagtaccactaatcctgttgaagctggtgattggttgcatgccatagagaagaagatggatttgcttcagtgcactgatcaggagaaggtctcatttgcatcacatcagttgcttggccctgcctctgaatggtgggatcacttccgcctgaataggattactgctgaacctattacttggcttgaattcaccgctgctttccggaagacgcatataccatcgggagtggtgtctctcaagaagaaggagttcaggtcgctcacccagggatctcgctctgttacggagtatctgcacgagttcaatcgtcttgctcgttatgctccggaagatctgcgcaatgatgaagagcgccaggagaagtttttgggaggacttaatgatgagctttcttacccactcatggttggagattatcctgatttccagaaattagtggataaggctatacgtcaggaggacaagtacaatcgcatggagcagaagaaacgccggattgctcacttcaaggcacaacaggggagtaatcagaagccgcgtcttactttaggaccccagtctgtgccacagggaggttcttcgtccattgttcgtccgcagcgtcagttcttcaacaacaatgctggcaacaacatccgtaatcaagtcccacgtcctgttgctgcctcgacacagcaacaacctgccaagaggaagcaaggcagcaagcccgtggtgtgtttcaactatggagacccaggacattatgctgacaagtgtccgaagccccgacgcgtgaaggttgtccctgcccagaataactctgctgtaccagcatcaaaggcccgtgtcaatcatgttgctgctgcagaagctcaagatgctccagatgtgattttgggtacgttccctgttaactcagttcctgcaactgtgcttttcgattctagtgctacacattcattcttatctatgagttttgcgggaaatcatgggatggaagtagaagatcttagacgtcctttgatggttagtaccccaagtaatcaagcactctctctgcaacgtagcccctctgtcagaatagaaattcaaggggtaccatttctagccaatcttatcttgttagaatctaaagaccttgacgtcattctagggatggactggttagccaaacataaaggtgtgatagactgtgccaacagaaaagtaactctcatcagcaatgatggtc

SEQ ID NO: 14345 - DNA, 4182 bp, Oryza sativa
  Clone ID: TFbOSC16841j.C1.o2.fg
atggtgctcactcgcagcaacgggaatggccccaacagcaacaataacaacaacaatggagagaacccaacacttgctcaagttcttgctctgcagactcagttaatgaacatgatgatgcaccaacttcagaatcagcaaaaccaaggaaataaccatgcacctccccagaacaagttagcagaatttcttcgtgtgaggccgcctattttctctagtaccactaatcctgttgaagctggtgattggttgcatgccatagagaagaagatggatttgcttcagtgcactgatcaggagaaggtctcatttgcatcacatcagttgcttggccctgcctctgaatggtgggatcacttccgcctgaataggattactgctgaacctattacttggcttgaattcaccgctgctttccggaagacgcatataccatcgggagtggtgtctctcaagaagaaggagttcaggtcgctcacccagggatctcgctctgttacggagtatctgcacgagttcaatcgtcttgctcgttatgctccggaagatctgcgcaatgatgaagagcgccaggagaagtttttgggaggacttaatgatgagctttcttacccactcatggttggagattatcctgatttccagaaattagtggataaggctatacgtcaggaggacaagtacaatcgcatggagcagaagaaacgccggattgctcacttcaaggcacaacaggggagtaatcagaagccgcgtcttactttaggaccccagtctgtgccacagggaggttcttcgtccattgttcgtccgcagcgtcagttcttcaacaacaatgctggcaacaacatccgtaatcaagtcccacgtcctgttgctgcctcgacacagcaacaacctgccaagaggaagcaaggcagcaagcccgtggtgtgtttcaactatggagacccaggacattatgctgacaagtgtccgaagccccgacgcgtgaaggttgtccctgcccagaataactctgctgtaccagcatcaaaggcccgtgtcaatcatgttgctgctgcagaagctcaagatgctccagatgtgattttgggtacgttccctgttaactcagttcctgcaactgtgcttttcgattctagtgctacacattcattcttatctatgagttttgcgggaaatcatgggatggaagtagaagatcttagacgtcctttgatggttagtaccccaagtaatcaagcactctctctgcaacgtagcccctctgtcagaatagaaattcaaggggtaccatttctagccaatcttatcttgttagaatctaaagaccttgacgtcattctagggatggactggttagccaaacataaaggtgtgatagactgtgccaacagaaaagtaactctcatcagcaatgatggtcgagttgtaactgttcatgcattgtcatctgagtttttaaggtcaagactgaaccagataactttgggagagattcctatagttcgggagtatcccgatgtgttcccagatgatttacctggtatgccgcctaaaagggatatagagttcagaatagatttggtacctggaacaactccgatccataagagaccttatagaatggcagccaatgagttggcagaagtcaaaaggcaagtagatgatttgcttcagaagggatacatcagaccgagttcatcaccatggggagctccagttatttttgtggaaaaaaaagaccatacccagaggatgtgtgtggactatcgtgcactaaatgatgtgactatcaagaataagtatccgctacccagaattgatgatttgtttaatcagcttaaaggtgccactgttttctccaagatagatcttcgatcagggtatcaccagttgagaatcaaagagtatgggttgttcgaatgtacggttatgtcttttggacttaccaatgctcctgctttcttcatgaacttgatgaataaagtatttatggaatacctagacaagttcgtggtggtctttattgatgacattcttatctactcccgaaccaaagaagagcatgaagaacatcttcgccttgcattggagaagctacgagagcatcaactgtatgctaagtttagcaagtgtgaattttggttgtctgaagtgaaattccttggtcacgtcatctcagccggaggagttgccgtcgatcctagtaacgtggaatccgtaaccaattggaagcaaccaaagacagtttcagagattcacagttttctaggcctcgcaggatattatcgaaggtttatagagaatttttccaagattgctaagcccatgacacgcctgcttcagaaatatgtgaagtacaagtggtcggaagaatgtgagcagagttttcaagagttgaaaagtcgtttaatatcagctcctattttgattttgcctgatccaaagaagggtttccaagtgtattgcgatgcatctaaacttgggttaggttgtgttctgatgcaagatgggaaggtggttgcctatgcatctcgtcagttacgtccgcatgaaaagaactaccctactcatgatcttgaattggccgcagtagttcatgcgttgaaaatttggcatcattatcttttcggtactcgtacagaggaatttgaaagattaaatttgggaattgtcagtagaggttttgttgcagccttagaagcgaagcccacactaattgatcaagttagagaagctcaaattagtgatcctgatattcaagagatcaagaagaatatgagaagaggaaaagctatcggtttcttggaggatgagcaaggaactgtatggttgggcgagagaatttgtgtccctgacaacaaagatttaaaggatgcaattctgaaagaagctcatgatactttatactccattcaccctggtagtactaagatgtaccaggatctcaaggaaagattttggtgggcaagtatgaagcgtgaaatcgcagaatacgtagcggtatgtgatatttgccagcgagtcaaggcagaacatcagaaacctgccggtttgttgcagcctttgaagattcctgaatggaaatgggaagaaatcggtatggattttatcactggtttacccagaacgtcatcaggccatgactctatttgggtaatagtcgacagacttaccaaagtggcacatttcatcccggtaaagacaacttattccggaagtcggttggcagaattatatatggcaaggattgtgtgtttgcatggtgtccctaagaaaatagtgtctgatcgaggcagtcagtttacttcaaatttctggaagaaacttcaggaagaaatgggttctaagctgaactttagtactgcttatcatccacagacagacggacaaaccgaaagggtgaatcagattttggaagacatgttgagagcttgtgctttagatttcggtggaagttgggataagaatctaccttatgcagaattctcgtataacaacagttatcaagctagtcttcagatggctccttacgaagcactgtatggtcggaagtgtcgcactccgcttttgtgggatcaaacgggagaacgtcaggttttcgggacggatatcttaagagaagcagaagaaaaggtaaagatcattcaagaaagattgcgtgtggctcagtctcgtcataagagttatgccgacaatcgccgtagagatttgagttttgaagaaggagattatgtgtatcttcgtgtcacgcctcttcgaggagttcatcgttttcacaccaaaggaaaattggcaccgcgttttgtgggaccttataagattgtcagtagaagaggagaggttgcttatcagttagaattacctcaatctttggcaggagtctataatgtgttccatgtgtcacaattgaaaaagtgtttaagggtacctaccgaagaagctaatattgagcagatagaagtccaagaggatttgacctatgttgagaaaccaatccgtatcttggaaacaaatgagagaagaaccaggaatcgagttatccgtttttgcaaagtccagtggagtaatcactcggaagaagaatcaacttgggaacgagaagatgaattgaagtcagctcatccgcatctgttcgccagttcttccgaatctcgaggacgagattctgtttaa

SEQ ID NO: 14346 - DNA, 1790 bp, Oryza sativa
  Clone ID: TFbOSC32899j.C1.o2.gm
atggtgctcactcgcagcaacgggaatggccccaacagcaacaataacaacaacaatggagagaacccaacacttgctcaagttcttgctcaacagactcagttaatgaacatgatgatgcagcaacttcagaatcagcaaaaccaaggaaataaccatgcacctccccagaacaagttagcagaatttcttcgtgtgaggccgcctattttctctagtaccactaatcctgttgaagctggtgattggttgcatgccatagagaagaagatggatttgcttcagtgcactgatcaggagaaggtctcatttgcatcacatcagttgcttggccctgcctctgaatggtgggatcacttccgcctgaataggattactgctgaacctattacttggcttgaattcaccgctgctttccggaagacgcatataccatcgggagtggtgtctctcaagaagaaggagttcaggtcgctcacccagggatctcgctctgttacggagtatctgcacgagttcaatcgtcttgctcgttatgctccggaagatctgcgcaatgatgaagagcgccaggagaagtttttgggaggacttaatgatgagctttcttacccactcatggttggagattatcctgatttccagaaattagtggataaggctatacgtcaggaggacaagtacaatcgcatggagcagaagaaacgccggattgctcacttcaaggcacaacaggggagtaatcagaagccgcgtcttactttaggaccccagtctgtgccacagggaggttcttcgtccattgttcgtccgcagcgtcagttcttcaacaacaatgctggcaacaacatccgtaatcaagtcccacgtcctgttgctgcctcgacacagcaacaacctgccaagaggaagcaaggcagcaagcccgtggtgtgtttcaactatggagacccaggacattatgctgacaagtgtccgaagccccgacgcgtgaaggttgtccctgcccagaataactctgctgtaccagcatcaaaggcccgtgtcaatcatgttgctgctgcagaagctcaagatgctccagatgtgattttggaccttgacgtcattctagggatggactggtcaagactgaaccagataactttgggagagattcctatagttcgggagtatcccgatgtgttcccagatgatttacctggatattatcgaaggtttatagagaatttttccaagattgctaagcccatgacacgcctgcttcagaaatatgtgaagtacaagtggtcggaagaatccttagaagcgaagcccacactaattgatcaagttagagaagctcaaattagtgatcctgatattcaagagatcaagaagaatatgagaagaggaaaagctatcggtttcttggaggatgagcaaggaactgtatggttgggcgagagaatttgtgtccctgacaacaaagatttaaaggatgcaattctgaaagaagctcatgatactttatactccattcaccctggtagtactaagatgtaccaggatctcaaggaaagattttggtgggcaagtatgaagcgtgaaatcgcagaatacgtagcgccgtcgccgtcgctcgggaagaccaccgtcgtgctcgccaagtcgtcgccgtcctcgtccgcctcttcgctgtcgccggagatcaccggagcagcatcgccgtcgtcgacccgaaggttcccgccgcttcctcctcgtcgccgtcaccgtccgttggtcttccgccaccgtttaggtcaccg

SEQ ID NO: 14347 - DNA, 4002 bp, Oryza sativa
  Clone ID: TFbOSC400415j.C1.o9.fg
atgtcgaacgaggtgaaccatgtagggaaggctcccatgtttaatggcacaaactactccacttggaaaattaaaatgtctactcacctcaaagctatgagcttccatatttggagtattgtggatgtaggctttgccatcaccggcacacccttgacggagattgatcaccacaacctccaactcaatgcccaagccatgaatgccttgttcaactctttgagccaagaggagttcgatagagtgagcaaccttgagaccgcatatgagatttggaacaagttggcggagatccatgagggtacaagtgagtacaaggatgccaagcttcatttcctcaagatccaatatgagacattctccatgttgcctcatgagagtgtgaatgacatgtatgggaggctcaatgtcattgtgaatgatctcaagcggcttggggcaaactacaccgatcttgaggttgcccaaaagatgcttagagccctaccggagaagtatgagacccttgtcaccatgctcatcaactccgacatgtcaagaatgacacccgcaagcctcttggggaagatcaacaccaatgacatgtacaagttgaagaagaaggagatggaggaagcctcaccctccaagaagtgcattgctctccaagccgaagttgaagacaagagcaagagcaaggtgaatgaagtcaatgaggacttggaggaagagatggtccttcttgctagaaggttcaatgatctcttgggaaggagaaaggagagaggaaggggctccaactccaataggagaagaaatagaagacccaacaagactctctccaacttgaggtgttttgagtgtggtgaaaagggacactttgcttccaagtgcccttccaaggatgatgatggagacaagtcatccaagaagaagagtggaggctacaagctcatgaagaagcttaagaaggaagggaagaagattgaggccttcatcggggaatgggactcaaatgaggagagctccgcctcatccgggtccaaggaagaaggtggtgatgatgcaagctccaagaagaagaagatggccgttgttgccatcaaggaggctccatcactcttcgctccactttgtctcatggcaaagggctcctctaaggtaacatctcttagtgatagtgagagtgatgatgattgtgatgatgtttcctatgatgagcttgtgagtatgtttgaggagctccatgcttatagtgagaaggagattgtcaagttcaaggccctaaagaaggatcatgcttctttggaggtcttgtatgaggagctaaagacctctcatgagagactcaccatttctcatgagaagcttaaggaagctcatgacaacctcctttccactactcaacatggagctcacattgatgttggcatatcttgtgatttgcttgatgatagtgctacttgccatattgctcatgttgcatcatctagcatttctacctcttgtgatgatcttatggatatgcctagccctagctctagctctagctcttgtgtttctatttgtgatgcctcacttattgttgagaacaatgagcttaaggagcaactggctaagctcaacaagagtttggagagatgcttcaagggtaagaacactcttgacaagattttgagtgagcaacggtgcatccttaacaaggagggacttggattcattccaaagaagggtaagaaaccttctcaccatgccactcgttttgtcaagagcaatggtaagtattgctccaagtgtcgtgaggttgggcatttggtgaactaccgcaccggtgggagccattggatgcttgatagtggatgcactcaacacatgaccggtgatagggctatgttcaccacatttgaagtaggagggaatgaacaagagaaagtgacatttggagacaatagcaaaggaaagtctattgttgccgagcttttcaaaaaatttgcaaaaagggcccaaaatgaatttagttgcactcttgtgaaaattagaaatgacaatggttccgaatttaagaataccaatatcgaggactattgtgatgatcttggtatcaaacacgaactttccgctacctactcacctcaacaaaatggtgtagtggaaaggaaaaatcgtacattgattgagatggcaaggactatgctagatgaatatggtgtttctgattccttttgggcggaagccataaacaccgcttgccatgcaaccaataggctttatttgcatcgtctcttgaaaaagacttcctatgagctaattgttgggaggaagccaaatgttgcctattttcgagtttttggttgcaagtgttatatttaccgaaagggtgttagactaaccaaatttgaaagtcggtgtgatgaagggtttcttctaggttatgcctcaaatagcaaggcctaccgggtctacaacaagaacaaaggtattgtgaaagaaaccgccgatgttcaatttgatgagactaatggctcccaagaggagcacgagaatttggatgatgtaggtgatgaaggcttgatgggagctatgaaaaacatgtctattggagatgtcaagcctattgaaatggaagacaagccatccacctccactcaagatgagccatctacttccgcttcgccaaatgaagctctttgtgatccggattggatgaatgctatgcatgaagagctcaacaactttgcaagaaacaaggtgtggactttggttgaaagacctagagaccacaatgtcatagggacaaagtggatctttaggaacaaacaagatgagaacggattggtggtgagaaacaaggcaaggttggtggcgcaaggtttcacacaagttgaagatcctaaaaatcctaaccatgtttacaaactctcaaaagctctttatggtttaaaacaagctcctaaggcttggtatgaaagattgagagattttcttttgtcaaaggatttcaaaattgaaaaagttgacaccactcttttcacaaaaatcattggtgatgatttctttgtgtgtcaaatttatgttgatgacatcatattcggttctactaatgaggtattttgcaagaaatttggtgatatgatgtctagggaatttgagatgtccatgattggagagttgagcttcttccttggacttcaaatcaagcaacttaaggatgggacgttcgtgagccaaaccaagtacatcaaggatctactcaagaggtttggcttggaagatgtgaagcccatcaagacacctatggcaaccaacgggcatctcgaccttgatgagggaggtaaaccggtagatttaaagctttatcgttccatgattggtagcttgctttaccttaccgcatctaggccggatatcatgtttagtgtttgcatgtgtgcacgatttcaagccgctcctaaggagtgtcacttagtggccgtgaaaaggattctaagatatttaaagcattcctctactattggcttgtggtacccaaaaggtgctaaatttaagcttgttggctattccgattcggattatgccggttgcaaagtggatagaaagagcacatccggtagttgccaaatgcttggtagatcccttgtatcatggtcatccaagaaacaaaactccgtagacctctctaccgtcgaggcggaatatgtttcggcgggtagttgttgtgcccaattgctttggatgaaacaaaccttgttggactatggtatatccttcaccaaaaccccactcctatgtgataatgatagtgccataaaaatagccaataacccggtccaacattctagaaccaagcatattgacattcgccatcacttcctaagagaccatgttaccaagtgtgacatagtcattagccacataagaaccgaggatcaactagccgacatttttaccgagcctcttgatgaaacccgcttttgcaagttgaggaatgagttaaatgtcatagacttctctaatgtggcttga

SEQ ID NO: 14348 - DNA, 3469 bp, Oryza sativa
  Clone ID: TFbOSC400979j.C1.o3.np
attccgtcgtttccggagagttcgttttcgccggagaagagtttgaagagttccaaggccagcaaggcaactcctggtttggaatggtatattcctggtttggagatagaactgtgcagccgggatggttgttcagaatggttgggcctatgcaacaggatgccgcgctacaagcctgagtacttgtttggtgttgagggttttgtccaggagttgcgtacaatgtcctttgtcattggatttgggactgcccctttttatgctcagattcctcatgatcgtcatgaagagaggtgccgagtcaaagtcaccttgaacagtaatagtgaagacattctatcagtgatgttcgaagctggaggaagaaactacatccatgcatgtcaggaagtggcaaggatcgccataggagagctccgcgatcgctacagtgatcaattggccgacactgagtatcgttaccatcctcgtcaaccacagggaagtgaccgtggcagttaccttgagactgaaggaattgagaatgatgctaccacaagacatttggttgagatgctatgggctatggatgaaagtcatgcagagactgtgttagcagcccaagatcgtgaagattggaatcgtggtaagatttgcaagctagaagacaaggtggatcgtttggagaaggaactagctgcgttgaagggagaagcaccgccgcagaaggccaggattcgtcttaccgcaaggaagagagctctatttgtccctcgttatcaattggcgccaaagatggtgaacactcgcagcaacgggaatggtcccaacctcaacaaccccaacaacaacaataacaatgaagggaacccaacccttgctcaagttcttgctcaacagactcagctaatgcacatgatgatgcaacaacttcagaatcagcagaaccaaggaaataaccatgcacctcctcagaataagttagcagaatttcttcgtgtgaggccgcctattttctctagtaccactaaccctgttgaagctggtgattggctgcatgccatagagaagaagttggatttgcttcagtgcactgatcaggagaaggtctcatttgcatcacaccagttgcttggccctgcctctgaatggtgggatcacttccgcctgaataggactactgctgaacctatcacttggcttgaattgaccgctgctttccggaagacgcatataccatcgggagtggtgtctctcaagaagaaggagttcaggtcgctcacccagggatctcgctctgttacggagtatctacacgagttcaatcgtctagctcgttatgctccagaagatgtgcgcaatgatgaagagcgtcaggagaagttcttggaaggacttaatgatgagctttcttacccactcatgactggagattattctaatttccagaaattagtggataaggctattcgtcaggaggacaagtataatcgcatggagcagaagaaacgccggattgctcaattcaagatacaacaggggaataatcagaagccgcgtcttacttttgtaccccagtccatgccacatggaggttcttcatctgttgttcgtccgcagcgtcagttcttcaacaacaatgctggcaacaacatccgtaatcaagctccacgtcctgttgcagctccaacacaacaaccgcctgccaagagggagcaaggcagcaagcccgtggtgtgtttcaactatggagacccaggacattatgctgacaagtgtccaaagccccgacgcgtgaaggttgtccctgcctagagcaactctactataccagcatcaaaggcccgtgtcaatcatgttgcagctgcagaagctcaagacgctccagatgtgattttgggtacgttccctgttaactcagttcatgcaacagtgcttttcgattctggtgctacacattcatttctatctatgagttttgcgggaaatcatgggatggaagtagaagatcttagacgtcctttgatggttagtaccccaagtaatcaagcactctctttgcaacgtagcccctctgtcagaatagaaattaagggagtaccatttctggccaatcttatcttgttagaatccaaagaccttgatgtcatcctagggatggactggttaaccagacataaaggtgttatagactgtgctaacagaaaagtaactctcaccagtagtgatggtcgagttgtaactgttcatgcattatcttctgagtctttaaggtcaagactgaaccagataactttggaagagattcctatagtccgggagtatcccgatgtgttcccagatgatttacctggtatgccgcccaaaagggatatagagttcagaatagatttggtacctggaacaactccgattcataagaggccttatagaatggcagccaatgagttggcagaagtcaagaggcaagtggatgatttgcttcagaagggatacatcagaccgagttcatctccatggggagctccggttatttttgtggaaaagaaagatcatacccagaggatgtgtgtggactatcgtgcattaaatgatgtgactatcaagaataagtatccactacccagaattgatgatttgtttgatcagcttaaaggtgccactgttttctctaagatcgatcttcgatcagggtatcaccagttgagaatcaaagaggaagatatacctaagacagcttttaccactaggtatggattgttcgaatgtactgttatgtcttttggacttaccaatgcccctgctttcttcatgaacttgatgaataaggtgtttatggaatacctagataagtttgtggtggtctttattgatgacattcttatctactctcgaacaagagaagagcatgaagaacatcttcgccttgcactagagaagctacgagaacatcaactgtatgctaagtttagcaagtgtgaattttggttgtctgaagtgaagttccttggtcacgtcatctcagcaggaggagttgccgttgatcccagtaatgtggaatccgtaaccaactgcaaacaactaaagacagtttcagagattcgcagtttcttaggcctcgcaggatattaccggaggtttatagagaatttttccaagattactaagcccatgacacgactgctacagaaagatgtgaagtataagtggtcggaagaatgtgagcagagttttcaagagttgaagaatcgcttaatatcagctcctatcttgattttacctgatccaaaaaagggtttccaggtgtattgtgatgcatccaaacttgggttaggttgtgttctgatgcaagatgggaaggtggttacctatgcatctcgtcagttacgtccgcatgagaagaactaccctactcatgatattgagttagctgcagtagttcatgcgttgaaaatttggcgtcattattatttagacactcggtctgtcc

SEQ ID NO: 14349 - DNA, 3279 bp, Oryza sativa
  Clone ID: TFbOSC401018j.C1.o32.gm
atggcgcgcggactgggtccacgggagtggggcccacacggcagcctcacgccgcggggcgcgcccgaaggcggcctcgccggcacagccgacgggaggcggcgcacccgcgccccgatggtcgccggcggcgacctccggcgcgacggagcggcgcccgagagaggagagggaagggggaaacgaaatgggcggtccatggctcaccccgggtcgacggcgacgacgggaacggcgaccgaagcggaggaaggcggcggcgcggctcgggtcgacgaggacggcggcgttccggcggtcggcgggcgaaacgaaggggtggacgagatcggcgaggacgcggcgaacccgaagaaggcgacgccgaaacgggaggaggcccggggcgacgacggcggcggaccggagctcggcggcgacggcggagagagaggacgacggcgcgagctcgattccgacggggagagagagcggcgagtggcggaaacgaaggagggaggcacggggagtgtttatatgccgcgctacaagcctgagtacctgtttggtgttgagggttttgtccaggagttgcgtacgatgtcctttgtcataggatttgggactgcccctttttatgctcagattcctcatgatcgtcatgaagagaagtgccgagtcaaagtcaccttgaatagtaatagtgaagatgtcccctcagtgatgttcgaagctggaggaagaaactacatccatgcatgtcaggaagtggcaaggatcgccataggagagctccgtgatcgctacagtgatcggttggctgacactgagtatcgctaccatcctcgtcaaccacagggaagtgaccgtggcagctaccttgagactgaaggaattgagaatgatgctaccacaaggcatttagttgagatgctgtgggctatggatgaaagccgtgcagagactgtgttagcggctcaagatcgtgaagattggaatcgtggtaagatttgcaagttagaagacaaggtggatcgtttggagaaggaactagccgcgttgaagggagaagcaccaccgcagaaggccaggattcgtcttaccgcaaggaagagagctctatttgtccctcgctatcaattggcgccaaaagttcgtgtggtggagaaagaagttgccccagcagatcctccggtcatcatcataagtgatgatgaagaagaagaatccaagcgcacccattccaagattgagtgggtagcaactcaagatgatgaagacgagccgaacgagcctacaatcgacctccgatgctcggaagaactagacaacgggaatggccccaacagcaacaataacaacaacaatggagagaacccaacacttgctcaagttcttgctcaacagactcagttaatgaacatgatgatgcagcaacttcagaatcagcaaaaccaaggaaataaccatgcacctccccagaacaagttagcagaatttcttcgtgtgaggccgcctattttctctagtaccactaatcctgttgaagctggtgattggttgcatgccatagagaagaagatggatttgcttcagtgcactgatcaggagaaggtctcatttgcatcacatcagttgcttggccctgcctctgaatggtgggatcacttccgcctgaataggattactgctgaacctattacttggcttgaattcaccgctgctttccggaagacgcatataccatcgggagtggtgtctctcaagaagaaggagttcaggtcgctcacccagggatctcgctctgttacggagtatctgcacgagttcaatcgtcttgctcgttatgctccggaagatctgcgcaatgatgaagagcgccaggagaagtttttgggaggacttaatgatgagctttcttacccactcatggttggagattatcctgatttccagaaattagtggataaggctatacgtcaggaggacaagtacaatcgcatggagcagaagaaacgccggattgctcacttcaaggcacaacaggggagtaatcagaagccgcgtcttactttaggaccccagtctgtgccacagggaggttcttcgtccattgttcgtccgcagcgtcagttcttcaacaacaatgctggcaacaacatccgtaatcaagtcccacgtcctgttgctgcctcgacacagcaacaacctgccaagaggaagcaaggcagcaagcccgtggtgtgtttcaactatggagacccaggacattatgctgacaagtgtccgaagccccgacgcgtgaaggttgtccctgcccagaataactctgctgtaccagcatcaaaggcccgtgtcaatcatgttgctgctgcagaagctcaagatgctccagatgtgattttggaccttgacgtcattctagggatggactggtcaagactgaaccagataactttgggagagattcctatagttcgggagtatcccgatgtgttcccagatgatttacctggatattatcgaaggtttatagagaatttttccaagattgctaagcccatgacacgcctgcttcagaaatatgtgaagtacaagtggtcggaagaatccttagaagcgaagcccacactaattgatcaagttagagaagctcaaattagtgatcctgatattcaagagatcaagaagaatatgagaagaggaaaagctatcggtttcttggaggatgagcaaggaactgtatggttgggcgagagaatttgtgtccctgacaacaaagatttaaaggatgcaattctgaaagaagctcatgatactttatactccattcaccctggtagtactaagatgtaccaggatctcaaggaaagattttggtgggcaaccgtcgccgtcgctcgggaagaccaccgtcgtgctcgccaagtcgtcgccgtcctcgtccgcctcttcgccgtcgccggagatcaccggagcagcatcgccgtcgtcaacccgaaggttcccgccgcttcctcctcgtcgccgtcgccgtccgttggtcttccgccaccgtttaggtcaccggtgagttcgccgcgttgtcctctccgtcttggtgccctccgtttgcgtcctagcgccgccgttcgccggcgagcgtgcgccgttcgagccgtctcctccgccgagccgccgccgctgtcggtgacgtcaccgctgacgtcatcggggtcgtccgccgtgagccgccgtggacccgatcgatctcggccgtccgttttggatcaagttgatctcggccgtccgttcgtgtga

SEQ ID NO: 14350 - DNA, 2202 bp, Oryza sativa
  Clone ID: TFbOSC404369j.C1.o33.gm
atggtgaacactcgcagcaacgggaatggccccaacaacaacaataacaataacaatgaagggaacccaactcttgctcaagttcttgctcaacagactcagttaatgaacatgatgatgcagcaactccagaaccagcagaaccaaggaaataaccatacacctccccagaacaagttagcagaatttcttcgtgtgaggccgcctattttctctagtaccactaatcctgttgaagctggtgattggttgcatgccatagagaagaagttggatttacttcagtgcactgatcaggagaaggtttcatttgcatcacatcagttgcatggccctgcttctgaatggtgggatcacttccgcctgaataggattactgctgaacctatcacatggcttgaattcaccgctgctttccggaagacgcatataccatcgggagtggtgtctctcaagaagaaggagttcaggtcgctcactcagggatctcgctctgttacggagtatttgcatgagttcaatcgtctggctcgttatgctccggaagatgtgcgcaatgatgaagagcgccaagagaagttcttggaaggacttaatgatgagctttcttacccactcatgactggagattattctgatttccagaaattagtggataaggctattcgtcaggaggacaaatacaatcgcatggagcagaagaaacgccggattgctcaattcaagcgccagttcttcaacaacaatgctggcaacaacatccgcaatcaagctccacgtcctgttgcagctccaacacagcaacaacctgccaagagggagcaaggcagcaagcccgtagtgtgcttcaactatggagacccaggacattatgctgacaagtgtccgaagccccgacgcgcgaaggttgtccctacccagagcaactctatcgcaccagcatcaaaggcccgtgtcaatcatgttgctgctgcagaagctcaagatgctcaagatgtgattttggtccgggagtatcccgatgtgttcccagatgatttacctgccaatgagttggcagaagtcaagaggcaagtagacgatttgcttcagaagggatacatcagaccgatttcgtcaccatggggagctccggttatttttgtggaaaagaaagatcatacccagaggatgtgtgtggactatcgtgcactaaatgatgtgactatcaagaataagtatccgttacccagaattgatgatttgtttgatcagcttaaaggtgccaccgttttctccaagatagatcttcgatcagggtatcaccagttgagaatcaaagaggaagatatacctaagacagcttttaccactaggtatgggttgttcgaatgtactgttatgtcttttggacttaccaatgcccccgctttcttcatgaacttgatgaataaggtgtttatggaatacctagacaagttcgtggtagtctttattgatgatattcttatctactcccgaaccaaagaagagcatgaagaacatcttcgccttgcattggagaagctacgagaacatcaactgtatgctaagtttagcaagtgtgaattttggttgtctgaagtgaagttccttggtcacgtcatctcagcaggaggagttgccgtcgatcctagtaatgtggaatccgtaaccaactggaaacaaccaaagacagtttcagagattcgcagtttcctaggcctcgcaggatattatcggaggtttatagagaatttttccaagattgctaagcccatgacacagctgcttcagaaagatgtgaagtacaagtgccgtgcgccgccgccgttccggtcgtcgtcgtcgctcgggaagatcgccatcgtggtcgccaagtcgtcgccgtcctcgtccgctccttcgccgccgccgaagaccgccggagcaccgccgccgtcgtcaagccgaaggtcgccgccgcttcttcctcgtcgccgtcgccgtccgttgctcctccgccgtttctttggtcaccggtgggttcgccgtgccgtccgctacccgttggtgcccttcgttcgtgccgaagcgccgccgttcgccggcgagtttgcgcgcccgagccgccgagccgccgccggtggtgacgtcaccgctgacgtcatcgtggccgtctgccaggaagagttctacaatgatgctgatggtgtggaggattag

SEQ ID NO: 14351 - DNA, 4326 bp, Oryza sativa
  Clone ID: TFbOSC411591j.C1.o1.fg
atgtcgaacgaggtgaaccaagtagggaaggctcccatgtttaatggcacaaactactccacttggaaaattaaaatgtctactcacctcaaagctatgagcttccatatttggagtattgtggatgtaggctttactatcaccggcacacccttgacggagattgatcaccgcaacctccaactcaatgcccaagccatgaatgccttgttcaactctttgagccaagaggagttcgatagagtgagcaaccttgagaccgcatatgagatttggaacaagttggcggagatccatgagggtacaagtaagtacaaggatgccaagcttcatttcctcaagatccaatatgagacattctccatgttgcctcatgagagtgtgaatgacatgtatgggaggctcaatgtcattgtgaatgatctcaaggggcttggggcaaactacaccgatcttgaggttgcccaaaagatgcttagagccctaccggagaagtatgagacccttgtcactatgcttatcaactccgacatgtcaagaatgacacccgcaagcctcttggggaagatcaacaccaatgacatgtacaagttgaagaagaaggagatggaggaagcctcaccttccaagaagtgtattgctctccaagccgaagttgaagacaagagcaagagcaaggtgaatgaagtcaataaggacttggaggaagagatggtccttcttgctagaaggttcaatgatctcttgggaaggagaaaggagagaggaaggggctccaactccaataggagaagaaatagaagacccaacaagactctctccaacttgaggtgttttgagtgtggtgagaagggacactttgcttccaagtgcccttccaaggatgatgatggagacaatatgtttgaggagctccatgcttatagtgagaaggagattgtcaagttcaaggccctaaagaaggatcatgcttctttggaggtcttgtatgagaagctaaagacctctcatgagagactcaccattcctcatgagaagcttaatgctacttgccatattgctcatgttgcatcatctaacatttctacctcttgtgatgatcttatggatatgcctagccctagctctagctctagctcttgtgtttctatttgtgatgcctcacttgttgttgagaacaatgagcttaaggagcaagtggctaagctcaacaagagtttggagagatgcttcaagggtaagaacactcttgacaagattttgagtgagcaacggtgcatccttaacaaggagggacttggattcattccaaagaagggtaagaaaccttctcacagtgccactcgttttgtcaagagtaatggtaagtattgctccaagtgtcgtgaagttgggcatttggtgaactaccgcaccggtgggagccattgggtgcttgatagtggatgcactcaacacatgaccggtgatagggctatgttcaccacatttgaagtaggagggaatgaacaagagaaagtgacatttggagacaatagcaaaggaaaggtaattgggttagttgcaaaaacttctttgggttggctttggcatagaaggctagcccatgttggcatgaatcaattgagcaaactttcaaaacgtgatctagttgtgggcttgaaagatgtgaagtttgagaaagataagctttgtagtgcttatcaagccggcaagcaagttgcatgttctcatcctactaagagtatcatgtccacatctagaccattggagctcttgcatatggatttgtttggcccaacaacctataagagcattggtggtaatagtcattgtcttgtgattgttgatgattattctcgctatacttgggtgttctttttgcatgataagtctattgttgccgagcttttcaaaaagtttgcaaaaagggcccaaaatgaatttagttgcactcttgtgaaaattagaagtgacaatggttccgagtttaagaataccaatatcgaggactattgtgatgatcttggtattaaacacgaactttccgctacctactcacctcaacaaaatggtgtagtggagaggaaaaatcgtacattgattgagatggcaaggactatgctagatgaatatggtgtttctgattccttttgggcggaagccgtaaacaccgcttgctatgcaaccaataggctttatttgcatcgtctcttgaaaaagacttcctatgagctaattgttgggaggaagccaaatgttgcctattttcgagtttttggttgcaagtgttatatttaccgaaagggtgttagactaaccaaatttgaaagttggtgtgatgaagggtttcttctaggttatgcctcaaatagtaaggcataccgggtctacaacaagaacaaaggtattgtggaagaaaccgccaatgttcaatttgatgagactaacggctcccaagaggggcacgagaatttggatgatgtaggtgatgaaggcttgatgagagctatgaagcacatgtctattggagatgtcaagcttattgaagtggaagacaagccatccacctccactcaaaatgagccatctacttccgcttcaccaagtcaagctcaagttgaagtggaggaggagaaggcacaagatccacctatgcctccaaggatacacaccgctctttccaaggatcacccaattgaccaagtgttgggtgacattagtaagggtgttcaaactcgatctcgtgtcgcttcgatttgtgaacattactcatttgtttcttgtcttgagccaaaacatgtagatgaagctctttgtgatccggattggatgaatgctatgcatgaagagctcaacaactttgcaagaaacaaggtgtggactttggttgaaagacctagagaccacaatgtcatagggacaaagtgggtctttaggaacaaacaagatgagaacggattggtggtgagaaacaaggcaaggttggtggcgcaaggtttcacacaagttgaaggtttggactttggtgaaacttttgcccccgtgacaagacttgaggctattcgcatctttcttgcatttgcatcatgctttgatataaaactatttcaaatggatgtgaaaagtgcttttctaaatggtgaaattgccgaacttgtctttgttgaacaacctcccggttttgaagatcctaaatatcctaaccatgtttacaaactctcaaaagctttttatggtttaaaacaagctcctagggcttggtatgaaagattgaaagattttcttttgtcaaaggatttcaaaattggaaaagttgacaccacccttttcacaaaaatcattggtgatgatttctttgtgtgtcaaatttatgttgatgacatcatattcggttctactaatgaggtattttgcaaggaatttggtgatatgatgtctagggaatttgagatgtccatgattggagagttgagcttcttccttggacttcaaatcaagcaactcaaggatgggacgttcgtgagccaaaccaaatacatcaaggatctactcaagaggtttggcttggaggatgcgaagcccaccaagacacctatggcaaccaacaggcatctcgaccttgatgagggaggtaaaccggtagatttaaagctttattgttccatgattggtagcttgctttaccttaccgcatctaggccggatatcatgtttagtgtttacatgtgtgcacggtttcaagccactcctaaggagtgtcacttagtggccgtgaaaaggattccaagatatttaaagcattcctctactattggcttgtggtacccaaaatgtgctaaatttaagcttgttggctatttcgattcggattatgccggttgcaaagtggatagaaagagcacatccgatagttgccaaatgcttggtagatcccttgtgtcatggtcatccaagaaacaaaattccgtagccctctctaccgccgaggcggaatatgtttcagcgggtagttgttgtgcccaattgctttggatgaaacaaaccttgttggactatggcatatccttcaccaaaaccccactcctatgtgacaatgatagtgccataaaaatagccaataacccggtccaacattctagaaccaagcatattgacattcgccatcacttcctaagagaccatgttgacaagtgtgacatagtcattagccacataagaaccgagaaccaactagccgacatctttaccaagcctcttgatgaaacccgcttttgcaagttgaggaatgagttaaatgtcatagatttctctaatgtggcttga

SEQ ID NO: 14352 - DNA, 5180 bp, Oryza sativa
  unsure (1)..(5180): unsure at all n locations
  Clone ID: TFbOSC9403j.C1.o3.np
attccgtcgtttccggagagtccgttttcacaggagaagagtttgaagagttccaaggccagcaaggcaactcctggtttggaatggtatattcctggtttggagatagaactgtgcagccaggatggttgttcagaatggttgggcctatacaacaggatgccgcgctacaagcctgagtacctgtttggtgttgagggttttgtccaggagttgcgtacaatgtcctttgccataggatttgggactgcccctttttatgcccagattactcatgatcgtcacgaagagaagtgccgagtcaaagtcactttgaacagtaatagtgaagatatcccctcagtgatgttcgaagctggaggaagaaactacatccatgcatgtcaggaggtggcaaggatcgccataggagagctccgcgatcgctacagtgatcagttggccgacacggagtatcgctatcatcctccagtcgtcaatgtaagtgatgatgaaggagaagaatcgaagcgcactcattccaagattgagtggggagcaactcaagctgatgaagacgagccgaacgagccttcaatcaactccgatgctcggaagacctagaaagccttgtcgaaccgttgtcttagatcgttgtgttagtttgcttgagtcttcagtttgtaataatgaaactcacttaagatcaataaaagttaaagtaattctctgtcctaagtagtttcccccggtttctcttcttgtgccctgcccataccagatggtgaatactcgcagcaatgggaatggccccaacaaccccaataacaacaacaatggagagaatcccacacttgcccaagttcttgctcaacagacacagctaatgaacatgatgatgcagcaactccagaaccagcaaaaccaaggaaataaccatgcacctccccagaacaagttagcagaatttcttcgtgtaaggccgcctactttctctagcaccgctaatcctgttgaagctggtgattggttgcatgccatagagaagaagttggatttgcttcaatgcactgatcaggagaaggtctcatttgcatcccatcagttgcatggccctgcctctgaatggtgggatcatttccgcctgaataggactactgcggaacctatcacttggcttgaattcaccgctgctttccggaagacgcatataccatcgggagtggtgtctctcaagaagaaggaattcaggtcgctcacccagggatctcgctctgttacggagtatttgcacgagttcaatcgtttggctcgttatgctccggaagatgtgcgcaatgatgaagagcgccaggagaagttcttggaaggacttaatgatgagctttcttacccactcatgactggagattatcatgatttccagaagttagtggataaggctattcgtcaggaggacaagtacaatcgcatggagcagaagaaacgccggattgctcaattcaagacacaacaggggaataatcagaagccgcgtcttactttaggaccccagtccatgccacagggaggttcttcgtctgttgttcgtccgaagcgttagttcttcaacaacaatgctggcaacaacatccgcaatcaagctccacgtcctgttgcagctccagcacagcaacaacctgccaagagggagcaaagcagcaagcccgtggtgtgtttcaactatggagacccaggacattatgctgacaagtgtccgaagcccagacgcgtgaaggttgtccctacccagagcaactctaccgcaccagcatcaaaggctcgtgtcaatcatgtcgctgctgcagaagcacaagatgctccagatgtgattttgggtacgttccttgttaactcagttcctgcaacagtgctttacgattctggtgctacacattcattcttatctatgagttttgcaggaaatcatgggatggaagtagaagatcttagacgtcctttgatggttagtaccccaagtagtcaagcactctctttgcaacgtagcccctctgtcagaatagaaattaaaggagtaccatttctggccaatcttatcttgttagaatccaaagaccttgatgtcatcctagggatggactggttagccagacataaaggtgtgatagactgtgctaacagaaaagtaactctcaccagcaatgatggtcgagttgtgactgttcatgcattgtcttctgagtttttaaggtcaagactgaaccaaataattctggaaaagattcctatagtccgggagtatcccgatgtgttccccgatgatttgcctggtatgccgcctaaaagggatatagagttcagaatagatttggtaccaggaacaactccgatccataagagaccttatagaatggcagccaatgagttggcagaagtcaagcggcaagtagatgatttgcttcagaaaggatacatcagaccaagttcatctccatggggagctccggttatttttgtggaaaagaaagatcatacccagaggatgtgtgtggactatcgtgccctaaacgatgtgactatcaagaataagtatccgctacccagaattgatgatttgtttgatcagcttaaaggtgccactgttttctccaagatagatcttcgatcagggtatcaccagttgagaatcaaagaggaagatatacctaagacagcttttaccactaggtatggattgttcgaatgtactgttatgtcttttggacttaccaatgcccccgctttcttcatgaacttgatgaataaggtgtttatggaatacctagacaagttcgtggtggtctttattgatgatattcttatctactctcgaaccaaagaagagcatgaagaacatcttcgccttgcactagagaagctacgagaacatcaactgtatgctaagtttagcaagtgtgaattttggttgtctgaagtgaagttccttggtcacgtcatctcagctagaggagttgccgttgatcctagtaatgtggaatccgtaaccaactggaaacaaccaaagacagtttcagagattcgcagtttcctaggtcttgcaggatattatcggaggtttatagagaatttttccaagattgctaagcccatgacacgattgtttcagaaagatgtgaagtacaagtggtcagaagaatgtgagcagagttttcaagagttgaaaagtcgcttaatatcagcacccattttgattttgcctgatccaaagaagggttttcaagtgtattgcgatgcatctaagtttgggttaggttgtgttctgatgcaagatgggaaggtggttgcctatgcatctcgtcagttacgtccgcatgaaaagaactaccctactcatgatcttgagttagctgcagtagttcatgcgttgaaaatttggcgtcattatcttttcggtactcgtacagaggtatataccgatcacaagagtttaaagtatatctttactcagccggatctgaacatgagacaaaggagatggttggaattaattaaaggattatgacatgggaattcattatcacctgggaaaggctaatgttgtagtagacgctcttagcaggaaaggctattgcaatgctacggaaggacgacagttgtcattggaattatgcaaggaatntgaaagattaaatttgggaattgtcagtagaggttttgttgcagccttagaagcgaagcccactctaattgatcaagttagagaagcccaaattaatgatcccgatattcaagagatcaagaagaatatgagaagaggaaaagctatcggtttcttggaggatgagcacggaactgtatggttgggtgagagaatctgcgtccccgacaacaaagatttaaaagatgcaattctgaaagaagctcacgacactttatactctattcaccctggtagtactaagatgtaccaggatctcaaggaaagattttggtgggcaagtatgaagcgtgaaatcgcagaatacgtagcagtatgtgatgtttgtcagcgagtcaaggcagaacatcagaaacctgccggtttgctgcagcctttgaagattcctgaatggaagtgggaagaaatcggtatggattttatcactggtttacccagaacgtcatcaggccatgactctatttgggtaatagtcgacagacttaccaaagtggcacatttcattccggtaaagacaacttattccgaaagtcgcttagcggaattgtatatggcaaggattgtgtgtttgcatggcgtccctaagaagatagtgtctgatcgaggcagtcagtttacttcaaatttttggaagaagcttcaggaagagatgggttctaaactgaactttagtactgcttatcatccgcagacagacggacaaacagaaagggtgaatcagattttggaagatatgttgagagcttgtgctttagacttcggtggaagttgggataagaatctaccttatgcagaattttcgtacaacaacagttatcaagctagtcttcagatggctccttacgaagcactgtatggtcggaagtgccgcactccgcttttgtgggatcaaacgggagaacgtcaggttttcgggacggatatcctaagggaagcagaagaaaaggtaaagatcattcaagaaagattgcgagtggctcagtctcgacataagagttatgccgataatcgccgtagagatttgagttttgaagaaggagattatgtgtatcttcgtgtcacgcctcttcgaggagttcatcgttttcacaccaaaggaaaattggcaccgcgttttgtgggaccttataagatcgtcagtagaagaggagaggttgcttatcagttggagttacctcaatctttggcaggagtccataatgtgttccatgtttcgcaattgaaaaagtgtttaagggtacctaccgaagaagctaatcttgaacagataaaagaccaagaggatctgacctatgttgagagaccaatccgtatcttggaaatagatgagagaagaaccaggaatcgggttatccgtttttgcaaagtccaatggagtaatcactcggaagaagagtcaacttgggaacgagaagatgaattgaagtcagctcatccgcatctgttcgccagttcttccgaatctcgaggacgagattccgtt

SEQ ID NO: 14353 - DNA, 5247 bp, Oryza sativa
  Clone ID: TFbOSC100051j.C1.o2.fg
atgacaagtggaggtgattcctttgtgcgcatgatgtccgaggacactgatgtcgaagtgctaatgccaaatgaagaccttcgtacttcaacaaatggtgcaaaaggaagtgccaaaagatcaagcaactatactcgtaaggaggacattcaattgtgcatttcatggcagagcattagctcagatcctattattggcaatgagcaaccagggaaggcatattggcagaggatcgcagagcactaccatgctaaccgtgattttgagtctgataggaatgcaaactctcttgagcaccattggggtaacattcagaaggaagtaagcaagtttcaaggttgctacaatcaaattgagcgtcatcatccaagtggcataccacatcaagagcttgttcttgaagctgaggcattatactcgtccactgcaccaaagaatagggcatttcagtttaatcattgttggctcaagttgaggaattctccaaagtttcaaacactagaatcccacaagaggccacggtctaggaagtctttgaccccaattgagagagctggtgaagaagatgaaggagatgatgctagcaagagtacagctcctgatttatctcagccgagtgctaaaaagagaccaataggtaggaagcaagcaaaggagaagttgaagaatggaggagaagatggaccatacaaagaggcgatgaaagatttgcttgacgctaaagagaaagaagcgaaattgaaagaagagagatggaaggaaactaaggagattcaagagcgcaagctcttatttgctgagcgtaagttagtgtgggatcaagaacagaagattatgttttgtgatgtttccaccttggaaccggatgtgagaacgtatgtgttggctatgagggcacagattgcagcttcaaaggtggctgccctcaatggtggatttgatggtagtagtggctttggagatattgagtctccaaaatatataagttctgatgaggacatcaacaccatcgatacatccatgtccccccatatacagcatgatggtcctattacccgcgctcgtgcacgtcaactaaattatcaggacgagtgccctcgtggccgggttgacgcgcaccacaagttcgcggcgaccattggagacggtccagaggataaagatgaggagggtgcatctcattccccacgcaccaaaggcatcatccaatactttacaaggcaagtgaagcagcacacagaaggacttgatacagatttgcagatctccaccaacactaagcttacagggttggagacagcggtcgcccgcattgacactagccttgctgctcttgtgaggcattttgatgctctcaatgctggaggcaatggtgggggtaatgacgatgacattgacggagagtacatcgaggataatttagaggatgaatatattgctgacactgaacaagatgatcgagatgctcaagatcgtcgacggctacacaacaatcgacgaggtatgggtggtcgccgccgacgcgaggtacgcaacaatgatgatgctttttctaaaattaaatttaagattcctccttttgatggaaaatatgatcctgatgcgttcctctcttgggagattgctgttgaccaaaaatttgcataccatgagtttcctgagaacactagagttagagctgctacgagtgagttcaccgattttgcttcggtttggtggatagaacatggcaagaaaaatcctaataacatgccacaaacttgggatgctttgaaacgggtcatgcgggctagatttgttccttcttactatgcacgtgacttgctgaatagattgcaacaattgagacagggtgcgaaaagtgtagaggaatattatcaggagttacaaatgggcttgcttcgttgtaatttagaggaaactgaggacactgccatggctagatttttgggtgggttaaaccgcgagatttatgacatcgtagactataaagattacactaatatgacccgattgtttcatcttgcttgtaaggctgaaagggaagtgcaaggacgacgtgctagtgccaaggctaatttttctgcaggtaaaacttcatcatggcagacacgcaccactcctccggccggccgtactgcttctccatcttccacacccacaaccagtcgagcagcacctcctccatctagtgacaagtccgtgacaaaggccgctcagccagcaccgagtgcttcttcaatggtatccacaggccgaatgagagatgttcagtgccaccgttgcaagggctttgggcatgtgcagcgtgactgccctagcaagcgagttttggtagtcaaaaacgatggtgagtactcctctgctagtgatttcgatgatgatacacttgctttgcttgcggctgaccatgcagataatgagccaccggaagagcacattggggctgcatttgcggatcactatgagagcctcattgtgcagcgtgtccttagcgcacaaatggagaaggcggagcaaaatcagcgacacacgttgttccaaacaaagtgtgtcctcaaagagcgttgttgccgcatgatcattgatggaggtagctgcaacaacttggctagcagcgagatggtggagaagcttgcacttagcaccaaaccgcacccacatccatactacatccaatggctgaacaacagtggtaaggtgaaggtaacaaaactggtgcacattaattttgcaattggaaattaccatgatgttgttgaatgtgatgttgtgcccatgcaagcatgtaatattctgctaggtagaccatggcaatttgatagggattctatgcatcatggtaggtccaaccagtactcttttctgtaccatgataagaaaattgtgttgcatcccatgtcttctgaagatattttgcgtgatgatgttgctaaggctgccaaatccaaatgtgagagtgataaaaaagcccaatctgatggcaagaaacctgagacaatcaatttgaaacccaaatgcttacttgctactaaatctgatattactgagttgattgcatcaccttcagttgcctatgctttggagtactctgatgtgtttcccaaggaagtgccaccggggctgccaccggtgcgcggcattgagcatcaaatcgacttgatcccaggtgcttccctaccgaaccgtgcgccataccgaaccaaccctgaggaaaccaaggagattcagcgtcaagttcatgagttgcttgataaagggtatgtacgcgagtctcttagtccatgtgcggttccggtaattttggtaccaaagaaagatggttcatggcgtatgtgtgttgattgtagagctattaataacattaccattcgatatcgtcatcctattcctaggttagatgatatgcttgatgaattgagtggctctattgtgttctccaaagttgatttgcgtagtggttaccaccagattcgtatgaagttgggtgatgaatggaaaacaacatttaaaacgaagtttgggttgtatgagtggttagtgatgccttttggtttaactaatgcacccagcactttcatgaggttgatgaatgaggttttgcgtcctttcattggaaaatttgtggtggtctactttgatgatatcttgatttacagcaagtctatgggtgaacattttaatcatttacgtgctgtttttaatgctcttcgtgatgcacgtttatttggtaaccttgagaagtgcaccttttgcacagatcgagtttcttttcttggctatgttgtaactccgcaggggattgaggttgatcaagccaaggttgaggcaattcagagttggccgactcctaaaacggtctcacaagtgcggagctttctaggactcgcggggttctatcgccgctttgtgcaggatttcagcaccattgctgcaccattgaatgcgcttacaaagaagggagtgcctttcacttggggcacatcacaagagaacgccttccacatgttgaaagataagttgacccatgcacctctcctccaacttcccgattttaataagacttttgaacttgaatgtgatgctagtgggattggattgggtgaaacatggcagcattatttgtggcccaaggaatttgtcatacattctgatcatgagtctttgaagcatattcgtattcaagggaagctgaaccgtagacatgctaaatgggttgaatttattgaatcttttccttatgttatcaaacacaagaaagggaaggagaacatcattgctgatgctttgtctaggagatacactttgttgacacaacttgactacaagatttttggcctagaaacaatcaaagaccaatatgcgcatgatgctgattttaatgatgaagcgcatggaggcagtttgatgggacattttggtgccaagaagacacatgacatccttgctagtcatttcttttggccacagatgcgaagagatgttggcagggctgttttgaagaaaaatatcaagatgtgggaagaatgcttgcctcatattgaatttgcttataatcgttccttgcattctactacaaaaatgtgcccatttcagattgtgtatggtttgttgcctcgtgctccaattgatttgatgcctttaccatcttctgaaaaactgaattttgatgctaagcaacgtgctgagttgatgttaaaactgcatgagacaactaaagaaaacatagagcgcatgaatgctaagtataagtttgctggtgacaaaggtagaagggagttgaattttgaacctggagatatggtttggttgcatttgcgaaaagaacgatttcctgatttgagaaagtctaaattgatgcctagagctgatggaccatttaaagtgttagcaaagattaatgagaatgcatataagattgatttgcctgcagatttcagggttagtcccacatttaacgttgcagatttgaagccgtatttgggagaagaagatgagcttgagtcgaggacgactcaaatgcaagaaggggaggatgatgaggacatcaacaccatcgatacatccacgtccccccatatacagcatgatggtcctattacccgcgctcgtacacgtcaactaaattatcaggacgagtgcccttgtggccgggttgacgcgcaccacaagttcgcggcgaccattggagacggtgtatcggttgctaaggtgcagcgtctttggacagttgtagtcgggccgtga

SEQ ID NO: 14354 - DNA, 4924 bp, Oryza sativa
  Clone ID: TFbOSC100644j.C1.o3.np
atggtaggtccagaggataaagatgaggagggtgcatctcattccccacgcaccaaaggcatcatccaatactttacaaggcaagtgaagcagcacacagaaggacttgatacagatttgcaggtgacaaatgagaagattggacaattggagtccatgcagatctccaccaacactaagcttacagggttggagacagcggtcgcctgcattgacactagccttgctgctcttgtgaggcattttgatgctctcaatgctggaggcaatggtgggggtaatgacgatgatattgacggagagtacgtcgaggataatttagaggatgaatatattgctgacactgaacaagatgatcgagatgctcaagatcgtcgacggctacacaacaatcgacgaggtatgggtggtcaccgccgacgcgaggtacgcaacaatgatgatgctttttctaaaattaaatttaagattcctccttttgatggaaaatatgatcctgatgcgtacctctcttgggagattgctgttgaccaaaaatttgcatgccatgagtttcctgagaacactagagttagagctgctacgagtgagttcaccgattttgcttcggtttggtggatagaacatggcaagaaaaatcctaataacatgccacaaacttgggatgctttgaaacgggtcatgcgggctagatttgttccttcttactatgcacgtgacttgctgaatagattgcaacaattgagacagggtgcgaaaagtgtagaggaatattatcaggagttacaaatgggcttgcttcgttgtaatttagaggaaactgaggacgctgccatggctagatttttgggtgggttaaaccgcgagatttatgacatcgtagactataaagattacactaatatgacccgattgtttcatcttgcttgtaaggctgaaagggaagtgcaaggacgacgtgctagtgccaaggctaatttttctgcaggtaaaacttcatcatggcagacacgcaccactcctccggccggccgtactgcttctccatcttccacacccacaaccagtcgagcagcacctcctccatctagtgacaagtcagcgacaaaggccgctcagccagcaccgagtgcttcttcaatggcatccacaggccgaatgagagatgttcagtgccaccgttgcaagggctttgggcatgtgcagcgtgactgccctagcaagcgagttttggtagtcaaaaacgatggtgagtactcctctgctagtgatttcgatgatgatacacttgctttgcttgcggctgaccatgcagataatgagccaccggaagagcacattggggctgcatttgcggatcactatgagagcctcattgtgcagcgtgtccttagcgcacaaatggagaaggcggagcaaaatcagcgacacacgttgttccaaacaaagtgtgtcgtcaaagagcgttgttgccgcatgatcattgatggaggtagctgcaacaacttggctagcagcgagatggtggagaagcttgcacttagcaccaaaccgcacccacatccataatacatccaatggctgaacaacagtggtaaggcgaaggtaacaaaactggtgcacattaattttgcaattggaaattaccatgatgttgttgaatgtgatgttgtgcccatgcaagcatgtaatattctgctaggtagaccatggcaatttgatagggattctatgcatcatggtaggtccaaccagtactcttttctgtaccatgataagaaaattgtgttgcatcccatgtctcctgaagatattttgcgtgatgatgttgctaaggctgccaaatccaaatgtgagagtgataaaaaagcccaatctgatggcaagaaacctgagacaatcaatttgaaacccaaattcttacttgctactaaatctgatattaatgagttgattgcatcaccttcagttgcctatgctttggtatgcaaagatgctttgatttcacttcacgatatgcagcattctttgccccctgctgttgctaacattttgcagcagtactctgatgtgtttcccaaggaagtgccaccggggctgccaccggtgcgcggcattgagcatcaaatcgacttgatcccaggtgcttccctaccgaaccgtgcgccataccgaaccaaccctgaggaaaccaaggagattcagcgtcaagttcatgagttgcttgataaagggtatgtacgcgagtctcttagtccatgtgcggttccggtaattttggtaccaaagaaagatggttcatggcgtatgtgtgttgattgtagagctattaataacattaccattcgatatcgtcatcctattcctaggttaaatgatatgcttgatgaattgagtggctctattgtgttctccaaagttgatttgcgtagtggttaccaccagattcgtatgaagttgggtgatgaatggaaaacagcatttaaaacgaagtttgggttgtatgagtggttagtgatgccttttggtttaactaatgcacccagcactttcatgaggttgatgaatgaggttttgcgtcctttcattggaaaatttgtggtggtctactttgatgatatcttgatttacagcaagtctatgggtgaacattttaatcatttacgtgctgtttttaatgctcttcgtgatgcacgtttatttggtaaccttgagaagtgcaccttttgcatagatcgagttccttttcttggctatgttgtaactccgcaggggattgaggttgatcaagccaaggttgaggcaattcagagttggccgactcctaaaacggtctcacaagtgcggagctttctaggactcgcggggttctatcgccgctttgtgcaggatttcagcaccattgctgcaccattgaatgcgcttacaaagaagggagtgcctttcacttggggcacatcacaagagaacgccttccacatgttgaaagataagttgacccatgcacctctcctccaacttcccgattttaataagacttttgaacttgaatgtgatgctagtgggattggattgggtggtgttttgctacaagaaggaaaacctgttgcatattttagtgaaaagttgagtgggcctgttctgaattattctacttatgataaggaattgtatgctcttgtgcgaactttagaaacatggcagcattatttgtggcccaaggaatttgtcatacattctgatcatgagtctttgaagcatattcgtagtcaagggaagctgaaccgtagacatgctaaatgggttgaatttattgaatcttttccttatgttatcaaacacaagaaagggaaggagaacatcattgctgatgctttgtctaggagatacactttgttgacacaacttgactacaagatttttggcctagaaacaatcaaagaccaatatgcgcatgatgctgattttaatgatgtgttgctgcattataaggatggaagaacatggaacaaattcgtcatcaatgatgggtttgttttcagagctaacaagctatgcattccagctagctccgttcgcttgttgttgttgcaggaagcgcttggaggcggtttgatgggacattttggtgccaagaagacacatgacatccttgctagtcatttcttttggccacagatgcgaagagatgttggcaggttcgttgctcgctgcgctacatgtcaaaaggctaagtcacgcttacatccacatggtttgtatatgcctcttcctgttcctactgttccttgggaagatatttcaatggattttgtgttaggattgcctaggaccaagagggggcgtgatagcatttttgtggttgtggatcgattttctaaaatggcacatttcataccatgtcataaaactgatgatgcttctcatattgctgatttgttctttcgagaaattgttcgcttgcatggtgtgccaaacacaattgtttctgatcgtgacacaaaatttcttagccatttttggagaactttgtgggctaaattggggactaaacttttgttttctactacttgttatccccaaactgatggacaaactgaagtggtgaatagaaccttgtctactatgcttagggctgttttgaagaaaaatatcaagatgtgggaagaatgcttgcctcatattgaatttgcttataatcgttccttgcattctactacaaaaatgtgcccatttcagattgtgtatggtttgttgcctcgtgctccaattgatttgatgcctttaccatcttctgaaaaactgaattttgatgctaagcaacgtgctgagttgatgttaaaactgcatgagacaactaaagaaaacatagagcgcatgaatgctaagtataagtttgctggtgacaaaggtagaagggaattgaattttgaacctggagatttggtttggttgcatttgcgaaaagaacgatttcctgatttgagaaagtataaattgatgcctagagctgatggaccatttaaagtgttagcaaagattaatgagaatgcatataagattgatttgcctgcagatttcggggttagtcccacatttaacgttgcagatttgaagccgtatttgggagaagaagatgagcttgagtcgaggacgactcaaatgcaagaaggggaggatgatgaggacatcaacaccatcgatacatccacgtccccccatatacagcatgatggtcctattacccgcgctcgtgcacgtcaactaaattatcaggacgagtgccctcgtggccgggttgacgcgcaccacaagttcgcggcgaccattggagacgatcgggccacaaaccctagcgggttcgcatcaggttgggtcggtggttttacaactctagactttgggaatattcatatcacctgga

SEQ ID NO: 14355 - DNA, 3657 bp, Oryza sativa
  Clone ID: TFbOSC10830j.C1.o4.fg
atgcgggctagatttgttccttcttactatgcacgtgacttgctgaatagattgcaacaattgagacagggtgcgaaaagtgtagaggaatattatcaggagttacaaatgggcttgcttcgttgtaatttagaggaaactgaggacgctgccatggctagatttttgggtgggttaaaccgcgagatttatgacatcgtagactataaagattacactaatatgacccgattgtttcatcttgcttgtaaggctgaaagggaagtgcaaggacgacgtgctagtgccaaggctaatttttctgcaggtaaaacttcatcatggcagacacgcaccactcctccggccggccgtactgcttctccatcttccacacccacaaccagtcgagcagcacctcctccatctagtgacaagtcagcggcaaaggccgctcagccagcaccgagtgcttcttcaatggcatccacaggccgaatgagagatgttcagtgccaccgttgcaagggctttgggcatgtgcagcgtgactgccctagcaagcgagttttggtagtcaaaaacgatggtgagtactcctctgctagtgatttcgatgatgatacacttgctttgcttgcggctgaccatgcagataatgagccaccggaagagcacattggggctgctgcatttgcagatcactatgagagcctcattgtgcagcgtgtccttagcgcacaaatggagaaggcggagcaaaatcagcgacacacgttgttccaaacaaagtgtgtcgtcaaagagcgttgttgccgcatgatcattgatggaggtagctgcaacaacttggctagcagcgagatggtggagaagcttgcacttagcaccaaaccgcacccacatccatactacatccaatggctgaacaacagtggtaaggcgaaggtaacaaaactggtgcacattaattttgcaattggaaattaccatgatgttgttgaatgtgatgttgtgcccatgcaagcatgtaatattctgctaggtagaccatggcaatttgatagggattctatgcatcatggtaggtccaaccagtactcttttctgtaccatgataagaaaattgtgttgcatcccatgtctcctgaagatattttgcgtgatgatgttgctaaggctgccaaatccaaatgtgagagtgataaaaaagagcaatctgatggcaagaaacctgagacaatcaatttgaaacccaaatgcttacttgctactaaatctgatattactgagttgattgcatcaccttcagttgcctatgctttggtatgcaaagatgctttgatttcacttcacgatatgcagcattctttgccccctgctgttgctaacattttgcaggagtactctgatgtgtttcccaaggaagtgccaccggggctgccaccggtgcgcggcattgagcatcaaatcgacttgatcccaggtgcttccctaccgaaccgtgcgccataccgaaccaaccctgaggaaaccaaggagattcagcgtcaagttcatgagttgcttgataaagggtatgtacgcgagtctcttagtccatgtgcggttacggtaattttggtaccaaagaaagatggttcatggcgtatgtgtgttgattgtagagctattaataacattaccattcgatatcgtcatcctattcctaggttagatgatatgcttgatgaattgagtggctctattgtgttctccaaagttgatttgcgtagtggttaccaccagattcgtatgaagttgggtgatgaatggaaaacagcatttaaaacgaagtttgggttgtatgagtggttagtgatgccttttggtttaactaatgcacccagcactttcatgaggttgatgaatgaggttttgcgtcctttcattggaaaatttgtggtggtctactttgatgatatcttgatttacagcaagtctatgggtgaacattttaatcatttacgtgctgtttttaatgctcttcgtgatgcacgtttatttggtaaccttgagaagtgcaccttttgcacagatcgagtttcttttcttggctatgttgtaactccgcatgggattgaggttgatcaagccaaggttgaggcaattcagagttggccgactcctaaaacggtctcacaagtgcggagctttctaggactcgcggggttctatcgccgctttgtgcaggatttcagcaccattgctgcaccattgaatgcgcttacaaagaagggagtgcctttcacttggggcacatcacaagagaacgccttccacatgttgaaagataagttgacccatgcacctctcctccaacttcccgattttaataagacttttgaacttgaatgtgatgctagtgggattggattgggtggtgttttgctacaagaaggaaatcctgttgcatattttagtgaaaagttgagtgggcctgttctgaattattctacttatgataaggaattgtatgctcttgtgcgaactttagaaacatggcagcattatttgtggcccaaggaatttgtcatacattctgatcatgagtctttgaagcatattcgtagtcaagggaagctgaaccgtagacatgctaaatgggttgaatttattgaatcttttccttatgttatcaaacacaagaaagggaaggagaacatcattgctgatgctttgtctaggagatacactttgttgacacaacttgactacaagatttttggcctggaaacaatcaaagaccaatatgcgcatgatgctgattttaatgatgaagcgcatggaggcggtttgatgggacattttggtgccaagaagacacatgacatccttgctagtcatttattttggccacagatgcgaagagatgttggcagggctgttttgaagaaaaatatcaagatgtgggaagaatgcttgcctcatattgaatttgcttataatcgttccttgcattctactacaaaaatgtgcccatttcagattgtgtatggtttgttgcctcgtgctccaattgatttgatgcctttaccatcttctgaaaaactgaattttgatgctaagcaacgtgctgagttgatgttaaaactgcatgagacaactaaagaaaacatagagcgcatgaatgctaagtataagtttgctggtgacaaaggtagaagggaattgaattttgaacctggagatttggtttggttgcatttgcgaaaagaacgatttcctgatttgagaaagtctaaattgatgcctagagctgatggaccatttaaagtgttagcaaagattaatgagaatgcatataagattgatttgcctgcagacttcggggttagtcccacatttaacgttgcagatttgaagccgtatttgggagaagaagatgagcttgagtcgaggactactctaatgcaagaaggggacgatgatgaggacatcaacaccatcgatacatccacgtccccccatatacagcatgatggtcctattacccgcgctcgtgcacgtcaactaaattatcaggacgagtgccctcgtggccgggttgatgcgcaccacaagttcgcggcgaccattggagacggtgtatcggttgctaaggcgcagcgtctttggacagttgtagtcgggccgtga

SEQ ID NO: 14356 - DNA, 2950 bp, Oryza sativa
  Clone ID: TFbOSC21171j.C1.o1.fg
atggcaggtccagaggataaagatgaggagggtgcatctcattccccacgcaccaaaggcatcatccaatactttacaaggcaagtgaagcagcacacagaaggacttgatacagatttgcaggtgacaaatgagaagattggacaattggagtccacgcagatctccaccaacactaagcttacagggctggagacagcggtcgcccgcattgacactagccttgctgctcttgtgaggcattttgatgctctcaatgctggaggcaatggtgggggtaatgatgatgacattgacggagagtacgtcgaggataatttggaggatgaatatattgctgacactgaacaagatgatcgagatgctcgagatcgtcgacggctacacaacaatcgacgaggtatgggtggtcgccgccgacgcgaggtacgcaacaatgatgatgctttttctaaaattaaatttaagattcctccttttgatggaaaatatgatcctgatgcgtacctctcttgggagattgctgttgaccaaaaatttgcatgccatgagtttcctgagagcactagagttagagctgctacgagtgagttcaccgattttgcttcggtttggtggatagaacatggcaagaaaaatcctaataacatgccacaaacttgggatgctttgaaacgggtcatgcgggctagatttgttccttcttactatgcacgtgacttgctgaataggttgcaacaattgagacagggtgcgaaaagtgtagaggaatattatcaggagttacaaatgggcttgcttcgttgtaatttagaggaaactgaggacgctgccatggctagatttttgggtgggttaaaccgcgagatttatgacatcgtagactataaagattacactaatatgacccgattgtttcatcttgcttgtaaggctgaaagggaagtgcagggacgacgtgctagtgccaaggctaatttttctgcaggtaaaacttcatcatggcagacacgcaccactcctccggccggccgtactgcttctccatcttccacacccacaaccagtcgagcagcacctcctccatctagtgacaagtcagcgacaaaggctgctcagcccgcaccgagtgcttcttcaatggcatccacaggccgaatgagagatgttcagtgccaccgttgcaagggctttgggcatgtgcagcgtgactgccctagcaagcgagttttggtagtcaaaaacgatggtgagtactcctctgctagtgatttcgatgatgatacacttgctttgcttgcggctgaccatgcagataatgagccaccggaagagcacattggggctgcatttgcggatcactatgagagcctcattgtgcagcgtgtccttagcgcacaaatggagaaggcggagcaaaatcagcgacacacgttgttccaaacaaagtgtgtcgtcaaagagcgttgttgccgcatgatcatggatggaggtagctgcaacaacttggctagcagcgagatggtggagaagcttgcacttagcacaaaaccgcacccacatccatactacatccaatggctgaacaacagtggtaaggcgaaggtaacaaaactggtgcacattaattttgcaattggaaattaccatgatgttgttgaatgtgatgttgtgcccatgcaagcatgtaatattctgctaggtagaccatggcaatttgatagggattctatgcatcatggtaggtccaaccagtactcttttctgtaccatgataagaaaattgtgttgcattccatgtctcctgaagatattttgcgtgatgatgttgctaaggctgccaaatccaaatgtgagagtgataaaaaagcccaatctgatggcaagaaacctgagacaatcaatttgaaacccaaatgcttacttgctactaaatctgatattaatgagttgattgcatcaccttcagttgcctatgctttggagtactctgatgtgtttcccaaggaagtgccaccggggctgccaccggtgcgcggcattgagcatcaaatcgacttgatcccaggtgcttccctaccgaaccgtgcgccataccgaacaaaccctgaggaaaccaaggagattcagcgtcagttcatgagttgcttgataaagggtatgtacgcgagtctcttagtccatgtgcggttccgagctattaataacattaccattcgatatcgtcatcctattcctaggttagatgatatgcttgatgaattgagtggctctattgtgttctccaaagttgatttgcgtagtggttaccaccagattcgtatgaagttgggtgatgaatggaaaacagcatttaaaacgaagtttgggttgtatgagtggttagtgatgccttttggtttaactaatgcacccagcactttcatgaggttgatgaatgaggttttgcgtcctttcattggaaaatttgtggtggtctactttgatgatatcttgatttacagcaagtctatgggtgaacattttaatcatttacgtgctgtttttaatgctcttcgtgatgcacgtttatttggtaaccttgagaagtgcaccttttgcacagatcgagtttcttttcttggctatgttgtaactccgcaggggattgaggttgatcaagccaaggttgaagcaattcagagttggccgactcctaaaacggtctcacaagtgcggagctttctaggactcgcggggttctatcgccgctttgtgcaggatttcagcaccattgctgcaccattgaatgtgcttacaaagaagggagtgcctttcacttggggcacatcacaagagaacgccttccacatgttgaaagataagttgacccacgcacctctcctccaacttcccgattttaataagacttttgaacttgaatgtgatgctagtgggattggattgggtg

SEQ ID NO: 14357 - DNA, 4704 bp, Oryza sativa
  Clone ID: TFbOSC27261j.C1.o2.fg
atggcaggtctagaggataaagatgaggagggtgcatctcattccccacgcaccaaaggcatcatccaatactttacaaggcaagtgaagcagcacacagaaggacttgatacagatttgcaggtgacaaatgagaagattggacaattggagtccacgcagatctccaccaacactaagcttacagggctggagacagcggtcgcccgcattgacactagccttgctgctcttgtgaggcattttgatgctctcaatgctggaggcaatggtgggggtaatgacgatgacattgacggagagtacgtcgaggataatttggaggatgaatatattgctgacactgaacaagatgatcgagatgctcgagatcgtcgacggctacacaacaatcgacgaggtatgggtggtcgccgccgacgcgaggtacgcaacaatgatgatgctttttctaaaattaaatttaaaattcctccttttgatggaaaatatgatcctgatgcgtacctctcttgggagattgctgttgaccaaaaatttgcatgccatgagtttcctgagaacactagagttagagctgctacgagtgagttcaccgattttgcttcggtttggtggatagaacatggcaagaaaaatcctaataacatgccacaaacttgggatgctttgaaacgggtcatgcgggctagatttgttccttcttactatgcacgtgacttgctgaataggttgcaacaattgagacagggtgcgaaaagtgtagaggaatattatcaggagttacaaatgggcttgcttcgttgtaatttagaggaaactgaggacgctgccatggctagatttttgggtgggttaaaccgcgagatttatgacatcgtagactataaagattacactaatatgacccgattgtttcatcttgcttgtaaggctaaaagggaagtgcagggacgacgtgctagtgccaaggctaatttttctgctggtaaaacttcatcatggcagacacgcaccactcctccggccggccgtactacttctccatcttccacacccacaaccagtcgagcagcacctcctccatctggtgacaagtcagcgataaaggctgctcagccagcaccgagtgcttcttcaatggcatccacaggccgaatgagagatgttcagtgccaccgttgcaagggctttgggcatgtgcagcgtgactgccctagcaagcgagttttggtagtaaaaaacgatggtgagtactcctctgctagtgatttcgatgatgatacacttgctttgcttgcggctgaccatgcagataatgagccaccggaagagcacattggggctgcatttgcggatcactatgagagtctcattgtgcagcgtgtccttagcgcacaaatggagaaggcggagcaaaatcagcgacacacgttgttccaaacaaagtgtgtcgtcaaagagcgttgttgccgcatgatcattgatggaggtagctgcaacaacttggctaacagcgagatggtggagaagcttgcacttagcaccaaaccgcatccacatccatactacatccaatggctgaacaacagtggtaaggcgaaggtaacaaaactggtgcacattaattttgcaattggaaattaccatgatgttgttgaatgtgatgttgtgcccatgcaagcttgtaatattctgctaggtagaccatggcaatttgatagggattctatgcattatggtaggtcaaaccagtactcttttctgtaccatgataagaaaattgtgttgcatcccatgtctcctgaagatattttgcgtgatgatgttgctaaggctgccaaatccaaatgtgagagtgataaaaaagcccaatctgatggcaagaaacctgagacaatcaatttgaaacccagatgcttacttgctactaaatctgatattaatgagttgattgcatcaccttcagttgcctatgctttggtatgcaaagatgctttgatttcacttcacgatatgcagcattctttggcccctgctgttgctaacattttgcaggagtactctgatgtgtttcccaaggaagtgccaccggggctgccaccggtgcgcggcattcagcatcaaatcgacttgatcccaggtgcttccctaccgaatcgtgcgccataccgaaccaaccctgaggaaaccaaggagattcagcgtcaagttcatgagttgcttgataaagggtatgtacgcgagtctcttagtccatgtgcggttccggtaattttggtaccaaagaaagatggttcatggcgtatgtgtgttgattgtagagctattaataacattaccattcgatatcgtcatcctattcctaggttagatgatatgcttgatgaattgagtggctctattgtgttctccaaagttgatttgcgtagtggttaccaccagattcgtatgaagttgggtgatgaatggaaaacagcatttaaaacaaagtttgggttgtatgagtggttagtgatgccttttggtttaactaatgcacccagcactttcatgaggttgatgaatgaggttttgcgtcctttcattggaaaatttgtggtggtctactttgatgatatcttgatttacagcaagtctatgggtgaacattttaatcatttacgtgctgtttttaatgctcttcgtgatgcacgtttatttggatttcagcaccattgctgcaccattgaatgcgcttcaaagaagggagtgcctttcacttggggcacatcacaagagaacgccttccacatgttgaaagataagttgactcatgcacctctcctccaacttcccgattttaataagacttttgaacttgaatgtgatgctagtgggattggattgggtggtgttttgctacaagaaggaaaacctgttgcatattttagtgaaaagttgagtgggcctgttctgaattattctacttatgataaggaattgtatgctcttgtgcgaactttagaaacatggcagcattatttgtggcccaaggaatttgtcatacattctgatcatgagtctttgaagcatattcgtagtcaagggaagctgaaccgtagacatgctaaatgggttgaatttattgaatcttttccttatgttatcaaacacaagaaagggaaggagaacatcattgctgatgctttgtctaggagatacactttgttgacacaacttgactacaagatttttggcctggaaacaatcaaagaccaatatgcgcatgatgctgattttaatgatgtgttgctgcattgtaaggatggaagaacatggaacaaattcgtcatcaatgatgggtttgttttcagagctaacaagctatgcattccagctagctccgttcgcctgttgttgttgcaggaagcgcatggaggcggtttgatgggacattttggcgccaagaagacacatgacatccttgctagtcatttcttttggccacagatgcgaagagatgttggcaggttcgttgctcgctgcgctacatgtcaaaaggctaagtcacgcttacatccacatggtttgtatatgcctcttcctgttcctactgttccttgggaagatatttcaatggactttgtgttaggattgcctaggaccaagagggggcgtgatagcatttttgtggttgtggatagattttctaaaatggcacatttcataccatgtcataaaactgatgatgcttctcatatcgctgatttgttctttcgagaaattgttcgcttgcatggtgtgccaaacacaattgtttctgatcgtgacacaaaatttcttagccatttttggagaactttgtgggctaaattggggactaaacttttgttttctactacttgtcatccccaaactgatggacaaactgaagtggtgaatagaaccttgtctactatgcttagggctgttttgaagaaaaatatcaagatgtgggaagaatgcttgcctcatattgaatttgcttataatcgttccttgcattctactacaaaaatgtgcccttttcagattgtgtatggtttgttgcctcgtgctccaattgatttgatgcctttaccatcttctgaaaaactgaattttgatgctaagcaacgtgctgagttgatgttaaaactgcatgagacaactaaagaaaacatagagcgcatgaatgctaagtataagtttgctggtgacaaaggtagaagggaattgaattttgaacctggagatttggtttggttgcatttgcgaaaagaacgatttcctgatttgagaaagtctaaattgatgcctagagctgatggaccatttaaagtgttagcaaagattaatgagaatgcatataagattgatttgcctgcagatttcggggttagttccacatttaacgttgcagatttgaagccgtatttgggagaagaagatgagcttgagtcgaggacgactcaaatgcaagaaggggaggatgatgaggacatcaacaccatcgatacatccacgtccccccatgtacagcatgatggtcctattacccgcgctcgtgcacgtcaactaaattatcaggacgagtgccctcgtggccgggttgacgcgcaccacaagttcgcggcgaccattggagacggtgtatcggttgctaaggcgcagcgtctttggacagttgtagtcgggccgtga

SEQ ID NO: 14358 - DNA, 4293 bp, Oryza sativa
  Clone ID: TFbOSC28357j.C1.o1.fg
atggctactacagatacaaccatagctcacattatggatgaacaagatgatatcaagatcaagtcctccaagtgctggaatccgattcggccacctgctacactgctgacttcaaacggctaccgaatttgcatacgacctccgttttcggcccatgagtacttgatggaaagttctcggagtcctctttccaacagatctggcctcatcagcagactccatctcgtttggccgcaaatacaaaaacaaggtgctgcgtcacctgtcatgggccaatgggcttgtaacttcgtttgggaccccggcccaagtggggcccatgtggggaatagggttgatctgcaccggcaagatcaacaacccacggagagttatcacaactcaccgaaagatcgggccaacaacagccttgagtgtcgagaggaactcagggttcatcaggtggtctcagagctttcatttctcggattgcgcaagggaatacgagaacatcgacttctacaccttcgacgagatatgacgacttcttcatgtgatgcatatgaggaagttcagaaaagtctccaaaatgagaagaacgatatgtttgagatgtcacttccatcactcgcgaatgaggagatggctgatgcagctacattatctgaagagggcataaaaggtaaattaaatggtgcagaaattactcaaggaatagggttgatctgcaccggcaagatcaacaacccacggagaggtgtatcgattgctaaggcgcaacacaacgtctcactagcaccaatattacaagagatggtttccactaatcagagtgctttcataaggaagagagctatacatgacaacttcatgtatgtgcaaaacccggtcaagagactgcatagaaggaaaacacccaccttgttgctcaaacttgacatctcaaaggcattcgactctttgttgctggatttcctaggagctgttcaaggcttcccaaccagttacttagcctacctcttcaccttagaaaactatggaagaggcatggactccccagcgacccccatgaacttctcgccgcttctcagtctagcaccccgtaatgaaccatgctatacaaaagaagaaaatcaagatgtgacaatttcatccctctcattgaaaaaattggctccagaattccaggacgagtgccctcgtggccgggttgacgcgcaccacaagttcgcggcgaccattggagacggtccagagaataaagatgaggagggtgcatctcattccccacgcaccaaaggcaccatccaatactttacaaggaaagtgaagcagcacacagaaagacttgagacagatttgcaggtgacaaatgagaagattggacaattggagtccacgcagatcttcaccaacactaagcttacagggctggagacagcggtcgcccgcattgacactagccttgctgcacttgtgaggcattttgatgctctcaatgctggaggcaatggtgggggtaatgacgatgacattgacggagagtacgtcgaggataatttggaggatgaatatattgctgacactgagcaagatgatcgagatgctcgagatcatcgacggctacacaacaatcgacgagaggaaactgaggatgctgccatggctagatttttgggtgggttaaaccgcgagatttatgacatcgtagactataaagattacactaatatgacccgattgtttcatcttgcttgtaaaacttcatcatggcagacacgcaccactcctccggccggccgtactgcttctccatcttccacacccgcaaccagtcgggcagcacctcctccatctagtgacaagtcagcgacaaaggctgctcagccagcactgagtgcttcttcagtggcatccacaggccgaacgagagatgttcagtgccaccgttgcaagggctttgggcatgtgcagcgtgactgccctagcaagcgagttttggtagtcaaaaacgatggtagaccatggcaatttgatagggattctatgcatcatggtaggtcaaaccagtactcttttctgtaccatgataagaaaattgtgttgcatcccatgtctcctgaagatattttgcgtgatgatgttgctaaggctgccaaatccaaatgtgagagtgataaaaaagcccaatctaatggcaagaaacctgagacaatcaatttgaaacccaaatgcttacttgctactaaatctgatattaatgagttgattgcatcaccttcagttgtctatgctttggagtactctgatgtgtttcccaaggaagtgccaccggggctgccaccggtgcgcggcattgagcatcaaatcgacttaatcccaggtgcttccctacccaaccgtgcgccataccgaaccaaccctgaggaaaccaaggagattcagcgtcaagttcatgagttgcttgataaaaggttagatgatatgcttgatgaattgagtggctctattgtgttctccaaagttgatttgcgtagtggttaccaccagattcgtatgaagttgggtgatgaatggaaaacagcatttaaaacgaagtttgggttgtatgagtggttagtgatgccttttggtttaactaatgcacccagcactttcatgaggttgatgaatgaggttttgcgtcctttcattggaaaatttgtggtggtctactttgatgatatcttgatttacagtaagtctatgggtgaacattttaatcatttacgtgctgtttttaatgctcttcgtgatgcacgtttatttggtaaccttgagaagtgcaccttttgcacagatcgagtttcttttcttggctatgttgtaactctgcaggggattgaggttgatcaagccaaggttgaggcaattcagagttggccgactcctaaaacggtctcacaagtgcggagttttctaggactcgcggggttctatcgccgctttgtgcaggatttcagcaccattgctacaccattgaatgcgcttacaaagaagggagtgcctttcacttggggcacatcacaagagaacgccttccacatgttgaaagataagttgacccatgcacctctcctccaacttcccgattttaataagacttttgaacttgaatgtgatgctagtgggattggattgggtggtattttgctacaagaaggaaaacctgttgcatattttagtgaaaagttgagtgggcctgttctgaattattctacttatgataaggaattgtatgctcttgtgcgaactttagaaacatggcagcattatttgtggcccaaggaatttgtcatacattctgatcatgagtctttgaagcatattcgtagtcaagggaaactaaactgtagacatgctaaatgggttgaatttattgaatcttttccttatgttatcaaacacaagaaagggaaggagaacatcattgctgatgctttgtctaggagatacactttgttgacacaacttgactataagatttttggcctggaaacaatcaaagaccaatatgcgcatgatgctgattttaatgatgtgttgctgcattgtaaggatggaagaatatggaacaaattcgtcatcaatggtgggtttgttttcagagctaacaagctatgcattccagctagctccgttcgcttgttgttgttgcaggaagcgcatggaggcggtttgatggcacattttggtgccaagaagacacatgacatccttgctagtcatttcttttggccacagatgcgaagagatgttggcagggctgttttgaagaaaaatatcaagatgtgggaagaatgcttgcctcatattgaatttgcttataatcgttccttgcattctactacaaaaatgtgcccatttcagattgtgtatggtttgttgcctcgtcctccaattgatttgatgcctttaccatcttctgaaaaactgaattttgatgctaagcaacatgctgagttgatgttaaaactgcatgagacaactaaagaaaacatagagcgcatgaatgctaagtataagtttgctggtgacaaagatttcagggttagtcccacatttaacattgcagatttgaagctgtatttgggagaagaagatgagcttgagtcgaggacgactcaaatgcaagaaggggaggatgatgaggacatcaacaccatcgatacatccacgttccccccatgtacaccatcgatacatccacgccgcctccatgtacagcatgatggtcctattacccgcgctcgtgcacgtcaactaaattatcag

SEQ ID NO: 14359 - DNA, 1416 bp, Oryza sativa
  Clone ID: TFbOSC29471j.C1.o1.fg
atggcaggtccagaggataaagatgaggagggtgcatctcattccccacgcaccaaaggcatcatccaatactttacaaggcaagtgaagcagcacacagaaggacttgatacagatttgcaggtgacaaatgagaagattggacaattggagtccacgcagatctccacaaacactaagcttacagggttggagacagcggtcgcccgcattgacactagccttgctgctcttgtgaggcattttgatgctctcaatgctggaggcaatggtgggggtaatgacgatgacattgacggagagtacgtcgaggataatttagaggatgaatatattgctgacactgaacaagatgatcgagatgctcaagatcgtcgacggctacacaacaatcgacgagattcctcctttgatggaaaatatgatcctgatgcgtacctctcttgggagattgctgttgaccaaaaatttgcatgccatgaatttcttgagaacactagagttagagctgctacgagtgagttcaccgattttgcttcggtttggtggatagaacatggcaagaaaaatcctaataacatgccacaaacttgggatgctttgaaacgggtcatgcgggctagatttgttccttcttacgatgcatgtgacatgctgaataggttgcaacaattgagacagggtgcgaaaagtgtagaggaatattatcaggagttacaaatgggcttgcttcgttgtaatttagaggaaactgaggacgctgccatggctagatttttgggtgggttaaaccgcgagatttatgacatcgtagactataaagattacactaatatgacccgattgtttcatcttgcttgtaaggctgaaagggaagtgcagggacgacgtgctagtgccaaggctaatttttctacaggtaaaacttcatcatggcaacgcaccactcctccggccggccgtattgcttctctatcttccacacccacaaccagtcgagcagcacctcctccatctagtgacaagtcagcgacaaaggctgctcagccagcaccgagtgcttcttcaatggcatccataggccaaatgagagatgttcagtgccaccgttgcaagggctttgggcatgtgcagcgtgactgccctagcaagcgagttttggtagtcaaaaacgatggtgagtactcctctgctagtgatttcgatgatgatacacttgctttgcttgcggctgaccatgcagataatgagccaccggaagagcacattggggctgcatttgcggatcactatgagagcctcattgtgcagcgtgtccttagcgcacaaatggagaaggcgggagcaaaatcagcgacacacgttgttccaaacaaagtgtgtcgtcaaagagcgttgttgccgcatgatcattga

SEQ ID NO: 14360 - DNA, 1018 bp, Oryza sativa
  Clone ID: TFbOSC400436j.C1.o27.gm
atggagaggatccaaagggaagaggattcgcgcggggtggattcggattgcagggcagcgccaacttctgacggccgccacgacttcatgcgaactccgatttgggacgagtgccctcgtggccgggttgacgcgccccacaagttcgcggcgaccattggagacgcccaccaacagctccaccacaaacccgactacagcttgacaggtcttgttgctacagcaccgatacacctcgttccacggttgctaacttgtgggttgctgtccccctcctgtgggcaaggtccagaggataaagatgaggagggtgcatctcattccccacgcaccaaaggcatcatccaatactttacaaggcaagtgaagcagcacacagaaggacttgatacagatttgcaggtgacaaatgagaagattggacaattggagtccacgcagatctccaccaacactaagcttacagggctggagacagcggtcgcccgcattgacactagccttgctgctcttgtgaggcattttgatgctctcaatgctggaggcaatggtgggggtaatgacgatgacattgacggagagtacgtcgaggataatttggaggatgaatatattgctgacactgaacaagatgatcgagatgctcgagatcgtcgacggctacacaacaatcgacgaggccgaatgagagatgttcagtgccaccgttgcaagggctttgggcatgtgcagcgtgactgccctagcaagcgagttttggtagtcaaaaacgatggtgagtactcctctgctattgatttcgatgatgatacacttgctttgcttgcggctgaccatgcagataatgagccaccggaagagcacattggggctgcatttgcggatcactatgagagcctcattatgcagcatgtccttagcgcacaaatggagaaggcggagcaaaatcagcgacacacgttgttccaaacaaagtgtgtcgtcaaagagcgttgttgccgcatgatcattgatggag

SEQ ID NO: 14361 - DNA, 4185 bp, Oryza sativa
  Clone ID: TFbOSC400452j.C1.o7.fg
atgggcaacttaagaggtcatgagttcaaggattggaatggtgtcgtacaatataggggcattcatgcaagtaaatttgttagttttgaagggggcattcatgcaagttcaggttttaaagtgtgggcactccaacagctactagcctggaagactcaaagtcttaaaggtgccatttctattttgggccccacaaccaataactctaatgggacgcacatttctccgatagtctcaaaggtgctcatgtggttgaaaaacactgtaggcgccggttttagctatttcaacacctatagtgctgtcctctgcgcgtctttctgcagaagtgaagcaagcagcacagtggctgccccgctgcagtgcagatcgactaggctacaaatattcccaggcagctatagtttgcaagcctttgggcgcatgatgaggagcttgatcgagctacttcgactcttcatcctgtatacatgtgacttaatgcctcaggatagtattgccggtgatggatcgggagtcgacttggtggacgagtgcccttgtggccaggttgacgcgcaccacaagttcgcggtgaccattggagacggtgtatcggttgctaaggcgcagcgtctttggacggtgacaaatgagaagattggacaattgaagtccacgcagatctccaccaacactaagcttacagtgctggagacagcggtcgcccgcattgacacttgccttgctgctcttgtgaggcattttgatgctctcaatgctggaggcaatggtgggggtaatgacgatgacattgacggaaagtacgtcgaggataatttggaggatgaatatattgctgacactgaacaagatgatcgagatgctcgagatcgtcgacggctacacaacaatcgacgagaacatggcaagaaaaatcctaataacatgccacaaacttgggatgctttgaaacgggtcatgcgggctagatttgttccttcttactatacacgtgacttgctgaataggttacaacaattgagacaaggtgcaaaaagtgtagaggaatattatcaggagttacaaatgggcttgcttcgttgtaatttagaggaaactgaggacgctgccatggctagatttttgggtgggttaaaccgcgagatttttgacatcgtagactataaagattacactaatatgacccgattgtttcatcttacttgtaaggctgaaagggaagtgcagggacgacgtgctagtgccaaggctaatttttctgcaggtaaaacttcatcatggcagacacgcaccactcctccggccggccgtactgcttctccatcttccacacccacaatcagtcgagcagcacctcctccatctagtgacaagtcagcgacaaaggctgctcagccagcactgagtgcttcttcaatggcatccacaggccgaacgagagatgttcagtgccaccgttgcaagggctttgggcatgtgcagcgtgactgccctagcaagcgagttttggtagtcaaaaaagatggtgagtactcctctgctagtgatttcgatgatgatacacttgctttgcttgcggctgaccatgcagataatgagccaccggaagagcacattggggctgcatttgcggatcactatgagagcctcattgtgcagcgtgtccttggcgcacaaatggagaaggcggagcaaaatcagcaacacacgttgttccaaacaaagtgtgtcgtcaaagagcgttgttgccgcatgatcattgatggaggtagctgcaacaacttggctagcagcgagatggtggagaagcttgcacttagcaccaaaccgtacccacatccatactacattcaatggctgaacaatagtggtagaccatggcaatttgatagggattctatgcatcatggtaggtcaaaccagtacttttttctgtaccatgataagaaaattgtgttgcatcccatgtctcctgaagatattttgcgtgatgatgttgctaaggctaccaaatccaaatgtgagagtgataaaaaagcccaatctgatggcaagaaacctgagacaatcaatttgaaacccaaatgcttaattgctactaaatctgatattaatgagttgattgcatcaccttcagttgcctatgctttggagtactctgatgtgtttcccaaggaagtgccaccggggctgccaccggtgcttccctacccaaccgtgcgccataccggaccaaccctgaggaaaccaaggagattcagcgttaagttcatgagttgcttgataaagggtatgtacgcgagtctcttagtccatgtgcggttccggtttgatgatatgcttgatgaattgagtggctctattgtgttctccaaagttgatttgcgtagtggttaccaccagattcgtatgaagttgggtgatgaatggaaaattgcatttaaaacgaagtttaggttgtatgagtggttagtgatgccttttggtttaactaatgcacccagcactttcatgaggttgatgaatgaggttttgcgtcctttcattggaaaatttgtggtggtctactttgatgatatcttgatttacagcaagtctatgggtgaacattttaatcatttacgtgctgtttttaatgctcttcgtgatgcacgtttatttggtaaccttgagaagtgcagcttttgcacagatcgagtttcttttcttggctatgttgtaactccgcaggggattgaggatttcagcaccattgctgcactattgaatgcgcttacaaagaagggagtgcctttcacttggggcacatcacaagagaacgccttccacatgttgaaagataagttgacccatacacctctcctccaacttcccgattttaataagacttttgaacttgaatgtgatgctagtgggattggattgggtggtgttttgctacaagaaggaaaacctgttgcatattttagtgaaaagttgagtgggcctgttctgaattattctacttatgataaggaattgtatgctcttgtgcgaactttagaaacatggcagcattatttgtggcccaaggaatttgtcatacattctgatcatgagtctttgaagcatattcgtagtcaagggaaactgaacagtagacatgctaaatgggttgaatttattgaatcttttccttatgttatcaaacacaagaaagggaaggagaacatcattgctgatgctttgtctaggagatacactttgttgacacaacttgactacaagatttttggcctggaaacaatcaaagaccaatatgcgcatgatgctgattttaatgaagcgcatggaggtggtttgatgggacattttggtgccaagaagacacatgacatccttgctagtcatttcttttggccacagatgcgaagagatgttggcagggctgttttgaagaaaaatatcaagatgtgggaagaatgcttgcctcatattgaatttgcttataatcgttccttgcattctactacaaaaatgtgcccatttcagattgtgtatggtttgttgcctcgtgctccaattgatttgatgcctttaccatcttctgaaaaactgaattttgatgctaagcaatgtgctgagttgatgttaaaactgcatgagacaactaaagaaaacatagagcgcatgaatgctaagtataagtttgctggtgacaaaggtagaagggaattgaattttgaacctagagatttggtttggttgcatttgcgaaaagaacgatttcctgatttaagaaagtctaaattgatgcctagagctgatggaccatttaaagtgttagcaaagattaatgagaatgcgtataagcttgatttgcctgcagatttcggggttagtcccacatttaacgttgcagatttgaagccgtatttgggagaagaagatgagcatgagtcgaggacgactcaaatgcaagaaggggaggatgatgaggacatcaacaccatcgatacatccacgtccccccatgtacaacatgatggttctattacccgcgctcgtgcacgtcaactaaattatcaggacgagtgccctcgtggccgggttgacgcgcaccacaagttcgcgtcgaccattggagacggtgtatcggttgctaaggcgcagcgtctttggacggttgtagtcgggccgtga

SEQ ID NO: 14362 - DNA, 3492 bp, Oryza sativa
  Clone ID: TFbOSC400454j.C1.o10.fg
gacgagtgcccttgtggccaggttgacgcgcaccacaagttcgcggtgaccattggagacggtgtatcggttgctaaggcgcagcgtctttggacggtgacaaatgagaagattggacaattgaagtccacgcagatctccaccaacactaagcttacagtgctggagacagcggtcgcccgcattgacacttgccttgctgctcttgtgaggcattttgatgctctcaatgctggaggcaatggtgggggtaatgacgatgacattgacggaaagtacgtcgaggataatttggaggatgaatatattgctgacactgaacaagatgatcgagatgctcgagatcgtcgacggctacacaacaatcgacgagaacatggcaagaaaaatcctaataacatgccacaaacttgggatgctttgaaacgggtcatgcgggctagatttgttccttcttactatacacgtgacttgctgaataggttacaacaattgagacaaggtgcaaaaagtgtagaggaatattatcaggagttacaaatgggcttgcttcgttgtaatttagaggaaactgaggacgctgccatggctagatttttgggtgggttaaaccgcgagatttttgacatcgtagactataaagattacactaatatgacccgattgtttcatcttacttgtaaggctgaaagggaagtgcagggaccacgtgctaatgccaaggctaatttttctgcaggccgaacgagagatgttcagtgccaccgttgcaagggctttgggcatgtgcagcgtgactgccctagcaagcgagttttggtagtcaaaaaagatggtgagtactcctctgctagtgatttcgatgatgatacacttgctttgcttgcggctgaccatgcagataatgagccaccggaagagcacattggggctgcatttgcggatcactatgagagcctcattgtgcagcgtgtccttggcgcacaaatggagaaggcggagcaaaatcagcaacacacgttgttccaaacaaagtgtgtcgtcaaagagcgttgttgccgcatgatcattgatggaggtagctgcaacaacttggctagcagcgagatggtggagaagcttgcacttagcaccaaaccgtacccacatccatactacattcaatggctgaacaatagtggtagaccatggcaatttgatagggattctatgcatcatggtaggtcaaaccagtacttttttctgtaccatgataagaaaattgtgttgcatcccatgtctcctgaagatattttgcgtgatgatgttgctaaggctaccaaatccaaatgtgagagtgataaaaaagcccaatctgatggcaagaaacctgagacaatcaatttgaaacccaaatgcttaattgctactaaatctgatattaatgagttgattgcatcaccttcagttgcctatgctttggagtactctgatgtgtttcccaaggaagtgccaccggggctgccaccggtgcttccctacccaaccgtgcgccataccggaccaaccctgaggaaaccaaggagattcagcgttaagttcatgagttgcttgataaagggtatgtacgcgagtctcttagtccatgtgcggttccggtttgatgatatgcttgatgaattgagtggctctattgtgttctccaaagttgatttgcgtagtggttaccaccagattcgtatgaagttgggtgatgaatggaaaattgcatttaaaacgaagtttaggttgtatgagtggttagtgatgccttttggtttaactaatgcacccagcactttcatgaggttgatgaatgaggttttgcgtcctttcattggaaaatttgtggtggtctactttgatgatatcttgatttacagcaagtctatgggtgaacattttaatcatttacgtgctgtttttaatgctcttcgtgatgcacgtttatttggtaaccttgagaagtgcagcttttgcacagatcgagtttcttttcttggctatgttgtaactccgcaggggattgaggatttcagcaccattgctgcactattgaatgcgcttacaaagaagggagtgcctttcacttggggcacatcacaagagaacgccttccacatgttgaaagataagttgacccatacacctctcctccaacttcccgattttaataagacttttgaacttgaatgtgatgctagtgggattggattgggtggtgttttgctacaagaaggaaaacctgttgcatattttagtgaaaagttgagtgggcctgttctgaattattctacttatgataaggaattgtatgctcttgtgcgaactttagaaacatggcagcattatttgtggcccaaggaatttgtcatacattctgatcatgagtctttgaagcatattcgtagtcaagggaaactgaacagtagacatgctaaatgggttgaatttattgaatcttttccttatgttatcaaacacaagaaagggaaggagaacatcattgctgatgctttgtctaggagatacactttgttgacacaacttgactacaagatttttggcctggaaacaatcaaagaccaatatgcgcatgatgctgattttaatgaagcgcatggaggtggtttgatgggacattttggtgccaagaagacacatgacatccttgctagtcatttcttttggccacagatgcgaagagatgttggcagggctgttttgaagaaaaatatcaagatgtgggaagaatgcttgcctcatattgaatttgcttataatcgttccttgcattctactacaaaaatgtgcccatttcagattgtgtatggtttgttgcctcgtgctccaattgatttgatgcctttaccatcttctgaaaaactgaattttgatgctaagcaatgtgctgagttgatgttaaaactgcatgagacaactaaagaaaacatagagcgcatgaatgctaagtataagtttgctggtgacaaaggtagaagggaattgaattttgaacctagagatttggtttggttgcatttgcgaaaagaacgatttcctgatttaagaaagtctaaattgatgcctagagctgatggaccatttaaagtgttagcaaagattaatgagaatgcgtataagcttgatttgcctgcagatttcggggttagtcccacatttaacgttgcagatttgaagccgtatttgggagaagaagatgagcatgagtcgaggacgactcaaatgcaagaaggggaggatgatgaggacatcaacaccatcgatacatccacgtccccccatgtacaacatgatggttctattacccgcgctcgtgcacgtcaactaaattatcaggacgagtgccctcgtggccgggttgacgcgcaccacaagttcgcgtcgaccattggagacggtgtatcggttgctaaggcgcagcgtctttggacggttgtagtcgggccgtga

SEQ ID NO: 14363 - DNA, 3705 bp, Oryza sativa
  Clone ID: TFbOSC400675j.C1.o16.fg
atggcaggtccagaggataaagatgaggaggctgcatctcattccccacgcaccaaaggcatcatccaatactttacaaggcaagtgaagcagcacacagaaggacttgatacagatttgcaggtgacaaatgagaagattggacaattggagtccacgcagatctccaccaacactaagcttacagggctggagacagcggtcgcccgcattgacactagccttgctgctcttgtgaggcattttgatgctctcaatgctggaggcaatggtgggggtaatgacgatgacattgacggagagtacgtcgaggataatttggaggatgaatatattgctgacactgaacaagatgatcgagatgctcgagatcgtcgacggctacacaacaatcgacgaggtatgggtggtcgccgccgacgcgaggtacgcaacaatgatgatgctttttctaaaattaaatttaagattcctccttttgatggaaaatatgatcctgatgcgtacctctcttgggagattgctgttgaccaaaaatttgcatgccatgagtttcctgagagcactagagttagagctgctacgagtgagttcaccgattttgcttcggtttggtggatagaacatggcaagaaaaatcctaataacatgccacaaacttgggatgctttgaaacgggtcatgcgggctagatttgttccttcttactatgcacgtgacttgctgaataggttgcaacaattgagacagggtgcgaaaagtgtagaggaatattatcaggagttacaaatgggcttgcttcgttgtaatttagaggaaactgaggacgctgccatggctagatttttgggtgggttaaaccgcgagatttatgatatcgtagactataaagattacactaatatgacccgattgtttcatcttgcttgtaaggctgaaagggaagtgcagggacgacgtgctagtgccaaggctaatttttctgcaggccgaatgagagatgttcagtgccaccgttgcaagggctttgggcatgtgcagcgtgactgccctagcaagcgagttttggtagtcaaaaacgatggtgagtactcctctgctagtgatttcgatgatgatacacttgctttgcttgcggctgaccatgcagataatgagccaccggaagagcacattggggctgcatttgcggatcactatgagagcctcattgtgcagcgtgtccttagcgcacaaatggagaaggcggagcaaaatcagcgacacacgttgttccaaacaaagtgtgtcgtcaaagagcgttgttgccgcatgatcattgatggaggtagctgcaaaaacttggctagcagcgagatggtggagaagcttgcacttagcaccaaaccgcacccacatccatactacatccaatggctgaacaacagtggtaaggcgaaggtaacaaaactggtgcacattaattttgcaattggaaattaccatgatgttgttgaatgtgatgttgtgcccatgcaagcatgtaatattctgctaggtagaccatggcaatttgatagggattctatgcatcatggtaggtccaaccagtactcttttctgtaccatgataagaaaattgtgttgcatcccatgtctcctgaagatattttgcgtgatgatgttgctaaggctgccaaatccaaatgtgagagtgataaaaaagcccaatctgatggcaagaaacctgagacaatcaatttgaaacccaaatgcttacttgctactaaatctgatattaatgagttgattgcatcaccttcagttgcctatgctttggagtactctgatgtgtttcccaaggaagtgccaccggggctgccaccggtgcgcggcattgagcatcaaatcgacttgatcccaggtgcttccctaccgaaccgtgcgccataccgaaccaaccctgaggaaaccaaggagattcagcgtcaagttcatgagttgcttgataaaggcactttcatgaggttgatgaatgaggttttgcgtcctttcattggaaaatttgtggtggtctactttgatgatatcttgatttacagcaagtctatgggtgaacattttaatcatttacgtgctgtttttaatgctcttcgtgatgcacgtttatttggtaaccttgagaagtgcaccttttgcacagatcgagtttcttttcttggctatgttgtaactccgcaggggattgaggttgatcaagccaaggttgaggcaattcagagttggccgactcctaaaacggtctcacaagtgcggagctttctaggactcgcggggttctatcgccgctttgtgcaggatttcagcaccattgctgcaccattgaatgcgcttacaaagaagggagtgcctttcacttggggcacatcacaagagaacgccttccacatgttgaaagataagttgacccatgcacctctcctccaacttcccgattttaataagacttttgaacttgaatgtgatgctagtgggattggattgggtggtgttttgctacaagaaggaaaacctgttgcatattttagtgaaaagttgagtgggcctgttctgaattattctacttatgataaggaattgtatgctcttgtgcgaactttagaaacatggcagcattatttgtggcccaaggaatttgtcatacattctgatcatgagtctttgaagcatattcgtagtcaagggaagctgaaccgtagacatgctaaatgggttgaatttattgaatcttttccttatgttatcaaacacaagaaagggaaggagaacatcattgctgatgctttgtctaggagatacactttgttgacacaacttgactacaagatttttggcctggaaacaatcaaagaccaatatgcgcatgatgctgattttaatgatgtgttgctgcattgtaaggatggaagaacatggaacaaattcgtcatcaatgatggatgcgaagagatgttggcaggttcgttgctcgctgcgctacatgtcaaaaggctaagtcacgcttacatccacatgattgtgtatggtttgttgcctcgtgctccaattgatttgatgcctttaccatcttctgaaaaactgaattttgatgctaagcaacgtgctgagttgatgttaaaactgcatgagacaactaaagaaaacatagagcgcatgaatgctaagtataagtttgctggtgacaaaggtagaagggaattgaattttgaacctagagatttggtttggttgcatttgcgaaaagaacgatttcctgatttgagaaagtctaaattgatgcctagagctgatggaccatttaaagtgttagcaaagattaatgagaatgcatataagattgatttgcctgcagatttcggggttagtcccacatttaacgttgcagatttgaagccgtatttgggagaagaagatgagcttgagtcgaggacgactcaaatgcaagaaggggaggatgatgaggacatcaacaccatcgatacatccatgtccccccatgtacagcatgatggtcctattacccgcgctcgtgcacgtcaactaaattatcaggacgagtgccctcgtggccgggttgacgcgcaccacaagttcgcggcgaccattggagacggtgtatcggttgctaaggcgcagcgtctttggacagttgtagtcgggccgtga

SEQ ID NO: 14364 - DNA, 4860 bp, Oryza sativa
  Clone ID: TFbOSC400675j.C1.o24.fg
atggcaggtccagaggataaagatgaggagggtgcatctcattccccacgcaccaaaggcatcatccaatactttacaaggcaagtgaagcagcacacagaaggacttgatacagatttgcaggtgacaaatgagaagattggacaattggagtccacgcagatctccaccaacactaagcttacagggctggagacagcggtcgcccgcattgacactagccttgctgctcttgtgaggcattttgatgctctcaatgctggaggcaatggtggggttaatgatgatgacattgacggagagtacgtcgaggataatttggaggatgaatatattgctgacactgaacaagatgatcgagatgctcgagatcgtcgacggctacacaacaatcgacgaggtatgggtggtcgccgccgacgcgaggtatgcaacaatgatgatgctttttctaaaattaaatttaagattcctccttttgatggaaaatatgatcctgatgcgtacctctcttgggagattgctgttgaccaaaaatttgcatgccatgagtttcctgagagcactagagttagagctgctacgagtgagttcaccgattttgcttcggtttggtggatagaacatggcaagaaaaatcctaataacatgccacaaacttgggatgctttgaaacgggtcatgcgggctagatttgttccttcttactatgcacgtgacttgctgaataggttgcaacaattgagacaggaggaaactgaggatgctgccatggctagatttttgggtgggttaaaccgcgagatttatgatatcgtagactataaagattacactaatatgacccgattgtttcatcttgcttgtaaggctgaaagggaagtgcagggacgacgtgctagtgccaaggctaatttttctgcaggtaaaacttcatcatggcagacacgcaccactcctctagccggccgtactgcttctccatcttccacacccacaactagtcgagcagcacctcctccatctagtgacaagtcagcgacaaaggctgctcagccagcaccgagtgcttcttcaatggcatccacaggccgaatgagagatgttcagtgccaccgttgcaagggctttgggcatgtgcagcgtgactgccctagcaagcgagttttggtagtcaaaaacgatggtgagtactcctctgctagtgatttcgatgatgatacacttgctttgcttgcggctgaccatgcagataatgagccaccggaagagcacattggggctgcatttgcggatcactatgagagcctcattgtgcagcgtgtccttagcgcacaaatggagaaggcggagcaaaatcagcgacacacgttgttccaaacaaagtgtgtcgtcaaagagcgttgttgccgcatgatcattgatggaggtagctgcaacaacttggctagcagcgagatggtggagaagcttgcacttagcaccaaaccgcacccacattcatactacatccaatggctgaacaacagtggtaaggcgaaggtaacaaaactggtgcacattaattttgcaattggaaattaccatgatgttgttgaatgtgatgttgtgcccatgcaagcatgtaatattctgctaggtagaccatggcaatttgatagggattctatgcatcatggtaggtccaaccagtactcttttctgtaccatgataagaaaattgtgttgcatcccatgtctcctgaagatattttgcgtgatgatgttgctaaggctgccaaatccaaatgtgagagtgataaaaaagcccaatctgatggcaagaaacctgagacaatcaatttgaaacccaaatgcttacttgctactaaatctgatattaatgagttgattgcatcaccttcagttgcctatgctttggtatgcaaagatgctttgatttcacttcacgatatgcagcattctttgccccctgctgttgctaacattttgcaggagtactctgatgtgtttcccaaggaagtgccaccggggctgccaccggtgcgcggcattgagcatcaaatcgacttgatcccaggtgcttccctaccgaaccgtgcgccataccgaaccaaccctgaggaaaccaaggagattcagcgtcaagttcatgagttgcttgataaagggtatgtacgcgagtctcttagtccatgtgcggttccggtaattttggtaccaaagaaagatggttcatggcgtatgtgtgttgattgtagagctattaataacattaccattcgatatcgtcatcctattcctaggttagatgatatgcttgatgaattgagtggctctattgtgttctccaaagttgaattgcgtagtggttaccaccagattcatatgaagttgggtgatgaatggaaaacagcatttaaaacgaagtttgggttgtatgagtggttagtgatgccttttggtttaactaatgcacccagcactttcatgaggttgatgaatgaggttttgcgtcctttcattggaaaatttgtggtggtctactttgatgatatcttgatttacagcaagtctatgggtgaacattttaatcatttacgtgctgtttttaatgctcttcgtgatgcacgtttatttggtaaccttgagaagtgcaccttttgcacagatcgagtttcttttcttggctatgttgtaactccgcaagggattgaggttgatcaagccaaggttgaggcaattcagagttggccgactcctaaaacggtctcacaagtgcggagctttctaggactcgcggggttctattgccgctttgtgcaggatttcagcaccattgctgcaccattgaatgcgcttacaaagaagggagtgcctttcacttggggcacatcacaagagaacgccttccacatgttgaaacataagttgacccatgcacctctcctccaacttcccgattttaataagacttttgaacttgaatgtgatgctagtgggattggattgggtggtgttttgctacaagaaggaaaacttgttgcatattttagtgaaaagttgagtgggcctgttctgaattattctacttatgataaggaattgtatgctcttgtgcgaactttagaaacatggcagcattatttgtggcccaaggaatttgtcatacattctgatcatgagtctttgaagcatattcgtagtcaagggaagctgaaccgtagacatgctaaatgggttgaatttattgaatcttttccttatgttatcaaacacaagaaagggaaggagaacatcattgctaatgctttgtctaggagatacactttgttgacacaacttgactacaagatttttggcctggaaacaatcaaagaccaatatgcgcatgatgctgattttaatgatgtgttgctgcattgtaaggatggaagaacatggaacaaattcgtcatcaatgatgggtttgttttcagagctaacaagctatgcattccagctagctccgttcgcttgttgttgttgcaggaagcgcatggaggcggtttgatgggacattttggtgccaagaagacacatgacatccttgctagccatttcttttggccacagatgcgaagagatgttggcaggttcgttgctcgctgcgctacatgtcaaaaggctaagtcacgcttacatccacatggtttgtatatgcctcttcctgttcctactgttccttgggaagatatttcaatggattttgtgttaggattgcctaggaccaagagggggcgtgatagcatttttgtggttgtggatagattttctaaaatggtacatttcataccatgtcataaaactgatgatgcttctcatatcgctgatttgttctttcgagaaattgttcgcttgcatggtgtgccaaacacaattgtttctgatcgtgacacaaaatttcttagccatttttggagaactttgtgggctaaattggggactaaacttttgttttctactacttgtcatccccaaactgatggacaaattgaagtggtgaatagaaccttgtctactatgcttagggctgttttgaagaaaaatatcaagatgtgggaagaatgcttgcctcatattgaatttgcttgtaatcgttccttgcattctactacaaaaatgtgcccatttcagattgtgtatagtttgttgcctcgtgctccaattgatttgatgcctttaccatcttctgaaaaactgaattttgatgctaagcaacgtgctgagttgatgttaaaactgcatgagacaactaaagaaaacatagagcgcatgaatgctaagtataagtttgctggtgacaaaggtagaagggaattgaattttgaacctggagatttggtttggttgcatttgcgaaaagaacgatttcctgatttgagaaagtctaaattgatgcctagagctgatggaccatttaaagtgttagcaaagattaatgagaatgcatataagattgatttgcctgcagatttcggggttagtcccacatttaacgttgcagatttgaagccgtatttgggagaagaagatgagcttgagtcgaggacgactcaaatgcaagaaggggaggatgatgagaacatcaacaccatcgatacatccacgtccccccatgtacagcatgatggtcctattacccgcgctcgtgcacgtcaactaaattatcaggtgagttctttcttgagttcatattcctcgtctttataccccggagacgcgtgcactcgtgttttactcaggaacgatggagaggatccaaagggaagaggattcgcgtggggtggattcggactgcagggcagcgccaacttctga

SEQ ID NO: 14365 - DNA, 7344 bp, Oryza sativa
  Clone ID: TFbOSC401054j.C1.o75.fg
atggcaggtccagaggataaagatgaggagggtgcatctcattccccacgcaccaaaggcatcatccaatactttacaaggcaagtgaagcagcacacagaaggacttgatacagatttgcaggtgacaaatgagaagattggacaattggagtccacgcagatctccaccaacactaagcttacagggctggagacagcggtcgcccgcattgacactagccttgctgctcttgtgaggcattttgatgctctcaatgctggaggcaatggtgggggtaatgatgatgacattgacggagagtacgtcgaggataatttggaggatgaatatattgctgacactgaacaagatgatcgagatgctcgagatcgtcgacggctacacaacaatcgacgaggtatgggtggtcgccgccgacgcgaggtacgcaacaatgatgatgctttttctaaaattaaatttaagattcctccttttgatggaaaatatgatcctgatgcgtacctctcttgggagattgctgttgaccaaaaatttgcatgccatgagtttcctgagagcactagagttagagctgctacgagtgagttcaccgattttgcttcggtttggtggatagaacatggcaagaaaaatcctaataacatgccacaaacttgggatgctttgaaacgggtcatgcgggctagatttgttccttcttactatgcacgtgacttgctgaataggttgcaacaattgagacagggtgcgaaaagtgtagaggaatattatcaggagttacaaatgggcttgcttcgttgtaatttagaggaaactgaggacgctgccatggctagatttttgggtgggttaaaccgcgagatttatgacatcgtagactataaagattacactaatatgacccgattgtttcatcttgcttgtaaggctgaaagggaagtgcagggacgacgtgctagtgccaaggctaatttttctgcaggtaaaacttcatcatggcagacacgcaccactcctccggccggccgtactgcttctccatcttccacacccacaaccagtcgagcagcacctcctccatctagtgacaagtcagcgacaaaggctgctcagcccgcaccgagtgcttcttcaatggcatccacaggccgaatgagagatgttcagtgccaccgttgcaagggctttgggcatgtgcagcgtgactgccctagcaagcgagttttggtagtcaaaaacgatggtgagtactcctctgctagtgatttcgatgatgatacacttgctttgcttgcggctgaccatgcagataatgagccaccggaagagcacattggggctgcatttgcggatcactatgagagcctcattgtgcagcgtgtccttagcgcacaaatggagaaggcggagcaaaatcagcgacacacgttgttccaaacaaagtgtgtcgtcaaagagcgttgttgccgcatgatcattgatggaggtagctgcaacaacttggctagcagcgagatggtggagaagcttgcacttagcacaaaaccgcacccacatccatactacatccaatggctgaacaacagtggtaaggcgaaggtaacaaaactggtgcacattaattttgcaattggaaattaccatgatgttgttgaatgtgatgttgtgcccatgcaagcatgtaatattctgctaggtagaccatggcaatttgatagggattctatgcatcatggtaggtccaaccagtactcttttctgtaccatgataagaaaattgtgttgcattccatgtctcctgaagatattttgcgtgatgatgttgctaaggctgccaaatccaaatgtgagagtgataaaaaagcccaatctgatggcaagaaacctgagacaatcaatttgaaacccaaatgcttacttgctactaaatctgatattaatgagttgattgcatcaccttcagttgcctatgctttggtatgcaaagatgctttgatttcacttcacgatatgcagcattctttgccccctgctgttgctaacattttgcaggagtactctgatgtgtttcccaaggaagtgccaccggggctgccaccggtgcgcggcattgagcatcaaatcgacttgatcccaggtgcttccctaccgaaccgtgcgccataccgaacaaaccctgaggaaaccaaggagattcagcgtcaagttcatgagttgcttgataaagggtatgtacgcgagtctcttagtccatgtgcggttccggtaattttggtaccaaagaaagatggttcatggcgtatgtgtgttgattgtagagctattaataacattaccattcgatatcgtcatcctattcctaggttagatgatatgcttgatgaattgagtggctctattgtgttctccaaagttgatttgcgtagtggttaccaccagattcgtatgaagttgggtgatgaatggaaaacagcatttaaaacgaagtttgggttgtatgagtggttagtgatgccttttggtttaactaatgcacccagcactttcatgaggttgatgaatgaggttttgcgtcctttcattggaaaatttgtggtggtctactttgatgatatcttgatttacagcaagtctatgggtgaacattttaatcatttacgtgctgtttttaatgctcttcgtgatgcacgtttatttggtaaccttgagaagtgcaccttttgcacagatcgagtttcttttcttggctatgttgtaactccgcaggggattgaggttgatcaagccaaggttgaagcaattcagagttggccgactcctaaaacggtctcacaagtgcggagctttctaggactcgcggggttctatcgccgctttgtgcaggatttcagcaccattgctgcaccattgaatgtgcttacaaagaagggagtgcctttcacttggggcacatcacaagagaacgccttccacatgttgaaagataagttgacccacgcacctctcctccaacttcccgattttaataagacttttgaacttgaatgtgatgctagtgggattggattgggtggtgttttgctacaagaaggaaaacctgttgcatattttagtgaaaagttgagtgggcctgttctgaattattctacttatgataaggaattgtatgctcttgtgcgaactttagaaacatggcagcattatttgtggcccaaggaatttgtcatacattctgatcatgagtctttgaagcatattcgtagtcaagggaagctgaaccgtagacatgctaaatgggttgaatttattgaatcttttccttatgttatcaaacacaagaaagggaaggagaacatcattgctgatgctttgtctaggagatacactttgttgacacaacttgactacaagatttttggcctggaaacaatcaaagaccaatatgcgcatgatgctgattttaatgatgtgttgctgcattgtaaggatggaagaacatggaacaaattcgtcatcaatgatgggtttgttttcagagctaacaagctatgcattccagctagctccgttcgcttgttgttgttgcaggaagcgcatggaggcggtttgatgggacattttggtgccaagaagacacatgacatccttgctagtcatttcttttggccacagatgcgaagagatgttggcaggttcgttgctcgctgcgctacatgtcaaaaggctaagtcacgcttacatccacatggtttgtatatgcctcttcctgttcctactgttccttgggaagatatttcaatggattttgtgttaggattgcctaggaccaagagggggcgtgatagcatttttgtggttgtggatcgattttctaaaatggcacatttcataccatgtcataaaactgatgatgcttctcatatcgctgatttgttctttcgagaaattgttcgcttgcatggtgtgccaaacacaattgtttctgatcgtgacacaaaatttcttagccatttttggagaactttgtgggctaaattggggactaaacttttgttttctactacttgtcatccccaaactgatggacaaactgaagtggtgaatagaaccttgtctactatgcttagggctgttttgaagaaaaatatcaagatgtgggaagaatgcttgcctcatattgaatttgcttataatcgttccttgcattctactacaaaaatgtgcccatttcagattgtgtatggtttgttgcctcgtgctccaattgatttgatgcctttaccatcttctgagaaactgaattttgatgctaagcaacgtgctgagttgatgttaaaactgcatgagacaactaaagaaaacatagagcgcatgaatgctaagtataagtttgctggtgacaaaggtagaagggaattgacttttgaacctggagatttggtttggttgcatttgcgaaaagaacgatttcctgatttgagaaagtctaaattgatgcctagagctgatggaccatttaaagtgttagcaaagattaatgagaatgcatataagattgatttgcctgcagattttggggttagtcccacatttaacgttgcagatttgaagccgtatttgggagaagaagatgagcttgagtcgaggacgactcaaatgcaagaaggggaggatgatgaggacatcaacaccatcgatacatccacgtccccccatatacagcatgatggtcctattacccgcgctcgtgcacgtcaactaaattatcaggacgagtgccctcgtggccgggttgacgcgcaccacaagttcgcggcgaccattggagacgatcgggccacaaaccctagcgggttcgcatcatacggactgtatgaattcacggtgatgtcattcggtttaaccaatgctcctgccttcttcatgaacttaatgaacaaagtgttcatggaatacttggataagtttgttgtggttttcattgatgacattctggtatactcacaatcagaggaagaccatcagcaccatctccgtctggtgttgggaaagttgcgggaacatcaattgtatgccaaacttagcaagtgtgagttctggttgtccgaagtcaaattcttagggcacgtgatatctgctaaaggagttgctgtggaccccgaaacagtgaccgccgtcaccgattggaagcaacccaagacagtcactcaaattcgcagtttcttaggtttggcaggatactaccggaggttcatcgagaacttctccaaaatcgctcgacccatgacacagttgttgaagaaagaagagaaatttgtgtggagcccgcaatgcgagaaggcgttccaaactctcaaggaaaagctggtttcctcgccggttttaatcttaccggatactcgcaaggacttcatggtgtattgtgacgcttcgccccaaggattggggtgcgtgctcatgcaggaaggtcatgtggtggcctatgcctcacgccagctatggcctcatgaaggcaactaccctacccatgatttggagttagccgcggtggttcatgctctaaaaatctggcggcactatctcattgggaatcgctgtgaaatatatactgatcataagagtttgaaatacatcttcactcagtcggacctgaatcttcggcagagaagatggttagaactcatcaaggattatgatgtgggaattcactatcatcctggtaaggccaatgtggtcgccgacgctctaagtcgaaaaagccattgcaacactcttggagtccgtggcattccacccgaacttaatcaacagatggaagccctgaacctaagcatagttagtcgtggattcttggctacgctggaagccaagcctaccttgctcgatcaaatccgcgaggctcagaagaacgatccggacatgcgtggactcctcaagaatatgaaacagggtaaagccgctggtttcatagaggatgaacacggaaccctatggaacagaaaccgggtatgcgttccagatgtcagggaacttaaacagctgatacttcaggaagctcacgagagtccttattccatccacccgggcagtacgaagatgtacttagacttgaaagagaaatactggtgggttagtatgaagcgggaaattgcggagttcgtggccctttgtgacgtgtgccagcgtgtcaaggcagagcaccaacgaccggccggacttctccaacctctccaagtaccagaatggaaatgggatgaaattgggatggatttcatcaccggacttccaaaaacccaaggtggatatgattctatatgggtagttgtggaccgattaaccaaggtagctcggtttattcctgtgaagaccacctatggagggaacaaactagccgagctctacttcgctaggatcgtgagtctccatggcgttcctaagaaaattgtatctgatagggaaagccaattcacctctcacttttggaagaagctccaagaagagctgggtacccgattaaatttcagcaccgcgtatcacccgcagacagatggacagaccgagcgtctaaatcagatcctagaagatatgcttcatgcatgtgtcctagatttcgggaagacctgggataagagtctcccctatgccgagttctcctacaataacagctaccaagccagcatacaaatggcaccttatgaagcgttgtatgggcgcaaatgccggacaccgctcttgtgggaccaagttggggaaagccaagtgttcgggactgatatactgagagaagctgaagcgaaggtcagaaccatttgggataatctaaaggtggcccagtcccggcagaaaagttatgcagataaccgtcgccgtaacttggaattcgcagtggacgattttgtgtaccttcgggtcacgccattgcgaggtgtacacaggtttcagacgaaagggaagctcgcacctcggttcgtgggtcctttccgtatcattgctcggcgcggagaagtcgcttaccagttggagctgcccgcctccttgggcaacgtgcatgatgtgttccatgtgtcgcaactcaagaaatgccttcgagtgccgtccgagcaggccgactcagagcagattgaagttcgcgaagacttgacctacgtggagaggccagtgaaaatcctggacaccatggagcgcaggaccaggaaccgggtaatccgtttttgcaaggtccaatggagcaaccacgccgaggaagaagctacttgggagcgtgaaaacgagctgaaggcagcccatcctgatctcttcgctagttcctccgaatctcggggtcgagattccgtttaa

SEQ ID NO: 14366 - DNA, 4428 bp, Oryza sativa
  Clone ID: TFbOSC401286j.C1.o4.fg
atgtcgaacgaggtgaaccatgtagggaaggctcccatgtttaatggcacaaactactctacttggaaaattaaaatgtctactcacctcaaagctatgagcttccatatttggagtattgtggatgtagactttgctatcaccggcacgcccttgacggagattgatcaccgcaacctccaactcaatgcccaagccatgaatgctttgttcaactctttgagtcaagaggagttcgatagagtgagcaaccttgagaccgcatatgagatttggaacaagttggcggagatccatgagggcacaagcgagtacaaggatgccaagcttcatttcctcaagatccaatatgagacattctccatgttgcctcatgagagtgtgaatgacatgtatgggaggctcaatgtcattgtgaatgatctcaaggggcttggggcaaactacactgatcttgaggttgcccaaaagatgcttagggctctaccggagaagtatgagacccttgtcaccatgctcatcaactccgacatgtcaaggatgacacccgcaagcctcttggggaagatcaacaccaatgacatgtacaagttgaagaagaaggagatggaggaagcctcaccttccaagaagtgcattgctctccaagccgaagttgaagataagggcaagggcaaggtgaatgaagtcaatgaggacttggaggaagagatagcccttcttgatagaaggttcaatgatctcttgggaaggagaaaggagagaggaaggggctccaactcaaataggagaagaaataaaagacccaacaagactctctccaacttgaagtgctttgagtgtggtgagaagggacactttgcttccaagtgctcttccaaggatgatgatggagacaagtcatccaagaaaaagagtggaggctacaagctcatgaagaagctcaagaaggaaggcaagaagattgaggcattcatcggggaatgggactcaaatgaggagagctccgcttcatccgggtccgaggaagaaggtggtgatgatgcaagctccaagaagaagaagatggccgttgttgccatcaaggaggctccatcattgttcgctccaatttgtctcatggcaaagggctcctctaaggtaacatctcttagtgatagtgagagtgatgatgattgtgatgatgtttcctatgatgagcttgtgagtatgtttgaggagttccatgcttatagtgaaaaggagattgtcaacttcaaggccctaaagaaggatcatgcttctttagagatcttgtatgaggagctaaagacctctcatgagagactcaccatttctcatgagaagcttaagaaagctcatgaaaacctccttttcactactcaacatggagctctcattgatgttggcatatcttgtgatttgcttgatgatagtgctacttgccatattgctcatgttgcatcatctagcatttctacctcttgtgatgatcctgtggatatgcctagctctagctctagctcttgtatttctatttatgatgcctcacttgttgttgagaacaatgagcttaaggagcaagtggccaagctcaacaagagtttggagaggtgcttcaagggacggctcataatggtagcattgttgctagatatgtgggttcccctatactcagtggtgaactaccgcactggtggaagccattgggtgcttgatagtggatgcactcaacacatgaccggtgatagagctatgttcaccacatttgaagaaggagggaaagaacaagaaaaagtgacatttggagacaatagtaaaggaaagggtgttagattaaccaaatttgaaagtcggtgtgatgaagggtttcttataggttatgcttcaaatagcaaggcataccgggtctacaacaagaacaaaggtgatgaaggcttgatgagagctatgaagaacatgtcaattggagatgtcaagcctattgaagtggaagacaagccatccacctccactcaagatgagccatctacttccgctacgccaagtcaagctcaagttgaagtggaggaggagaaggcacaagatccacctatgccaccgaggatacacaccgctctttccaaggatcacccaattgaccaagtgttgggcgacattagtaagggtgttcaaactcgatctcgtgtcgcttcgatttgtgaacattactcgtttgtttcttgtcttgagccaaaacatatagatgaagctctttgtgatccggattggatgaatgctatgcatgaagagctcaacaattttgcaagaaacaaggtgtggactttggttgaaagacctagaaaccacaatgtcatagggacaaagtgggtctttaggaacaaacaagatgagaacgggttggtggtgagaaacaaggcaagattggtggcacaaggttttacacaagttgaaggtttggactttggtgaaacttttgcccccgtggcaagacttgaggttattcgcatccttcttgcatttgcatcatgctttgatataaaactatttcaaatggatgtgaaaagtgcttttctaaatggtaaaattgccgaacttgtctttgttgaacaacctcccggttttgaagatcctaaaaatcctaaccatgtttataaactctcaaaagctctttatggtttaaaacaagctccttgggcttggtatgaaagattgagagattttcttttgtcaaaggatttcaaaattggaaaagttgacaccacccttttcacaaaaatcattggtgatgatttctttgtgtgtcaaatttatgttgatgacatcatattcggttctactaatgaggtattttgcaaggaatttggtgatatgatatctagggaatttgagatgtccacgattggagagttgagcttcttccttggacttcaaatcaagcaactcaaggatgggacgttcgtgagccaaaccaagtacatcaaggatctactcaagaggtctggcttggaggatgcgaagcccatcaagacacctatggcaaccaacgggcatctcgaccttaatgagggagtgatgcctccccgcacttgccatggtcgtcgtgcacccactccggatgccgtgagtgagcctgaggaatcgagcggagatgattatgctcaaagtgatgaagaggttgaggcaaatgttgagggggctagtgaggaggctagtggagatgataacagtggaagtggagaggatgaggatgaaggaagtgataatatgcacattgatccctccatccagtttgttgtgaacatgaggaatccatcgcagtataccatcttgaggcaccatgatcagtttttgaggcctcgggacaccccggatccccgttttcacaccgctttccagaagtctgtgtatgagcaggatctcttcaagactgttggcattgactggattgtgaccctcaagcaagactacaatgaagatttgatccggcagttttatgttacagtgtgggtggctggggactatagtgagatgaagtggatgtccgacaccctccactgttctatctctaggaggcaattccggcggctcctcaatattcgcttggactttggagatgacttgcatgagaagcacacccataatctgctctccatagactatctctctcagttttatgaagatggagtgcggtacacacatgggaaggttgccggcttgaggactatccccagtgtggttaacaggattgtgagagctaccatcctccctcgccttggcaacaatgatgacattaggggggtggcttggcacgtcatcgatgcaatcattcagggccgtcagttcgacattgtgtctctcatgatgcaagagattgccatctccaaggggaccttcactcagggaatctattatgccccttacatcatgaggttgattcaagacaagcttggggctgctgggcaaaatttgaagaagcacaagcagtacaagccccgccttcagcttggagctccctgtgctcctagggcggcgccctcctctcatcctggagctagctcaagctcagcacctcttcctcctcctcctcctgggtatgatccaaatactttcttccatccacagtatgcttattttggaatgcaacccaacgagtacttcaacccggtacttggagctattaataccctaagtgaaagcattcaacgcttgtctaccgggcatgaagctttgcatgaggatgttcgtggcttgcgcaccgatgttggagacttgaatgcttccgtggggagattgcacactagagtgggtacattagattctcgagtccaaatgttggagagctcccaagcatttgtgtatcatcgtagtcatgatgctccttatccttccactttggtgcgtcctccttctcctccacaagagtga

SEQ ID NO: 14367 - DNA, 5004 bp, Oryza sativa
  Clone ID: TFbOSC401345j.C1.o7.fg
atggcaggtccagaggataaagatgaggagggtgcatctcattccccacgcaccaaaggcatcatccaatactttacaaggcaagtgaagcagcacacagaaggacttgatacagatttgcaggtgacaaatgagaagattggacaattggagtccacgcagatctccaccaacactaagcttacagggctggagacagcggtcgcccgcattgacactagccttgctgctcttgtgaggcattttgatgctctcaatgctggaggcaatggtgggggtaatgacgatgacattgacggagagtacgtcgaggataatttggaggatgaatatattgctgacactgaacaagatgatcgagatgctcgagatcgtcgacggctacacaacaatcgacgaggtatgggtggtcgccgccgacgcgaggtacgcaataatgatgatgctttttctaaaattaaatttaagattcctccttttgatggaaaatatgatcctgatgcgtacctctcttgggagattgctgttgaccaaaaatttgcatgccatgagtttcctgagagcactagagttagagctgctacgagtgagttcaccgattttgcttcggtatggtggatagaacatggcaagaaaaatcctaataacatgccacaaacttgggatgctttgaaacgggtcatgcgggctagatttgttccttcttactatgcacgtgacttgctgaataggttgcaacaattgagacaggaggaaactgaggacactgccatggctagatttttgggtgggttaaaccgcgagatttatgacatcgtagactataaagattacactaatatgacccgattgtttcatcttgcttgtaaaacttcatcatggcagacacgcaccactcctccggccggccgtactgtttctccatcttccacacccacaaccagtcgagcagcacctcctccatctagtgacaagtcagcgacaaaggctgctcagccagcaccgagtgcttcttcaatggcatccacaggccgaatgagagatgttcagtgccaccgttgcaagggctttgggcatgtgcagcgtgactgccctagcaagcgagttttggtagtcaaaaacgatggtgagtactcctctgctattgatttcgatgatgatacacttgctttgcttgcggctgaccatgcagataatgagccaccggaagagcacattggggctgcatttgcggatcactatgagagcctcattatgcagcatgtccttagcgcacaaatggagaaggcggagcaaaatcagcgacacacgttgttccaaacaaagtgtgtcgtcaaagagcgttgttgccgcatgatcattgatggaggtagctgcaacaacttggctagcagcgagatggtggagaagcttgcacttagcaccaaaccgcacccacatccatactacatccaatggctgaacaacagtggtaaggcgaaggtaacaaaactggtgcacattaattttgcaattggaaattaccatgatgttgttgaatgtgatgttgtgcccatgcaagcatgtaatattctgctaggtagaccatggcaatttgatagggattctatgcatcatggtaagaaaattgtgttgcatcccatgtctcctgaagatattttgcgtgatgatgttgctaaggctgccaaatccaaatgtgagagtgataaaaaagcccaatctgatggcaagaaacctgagacaatcaatttgaaacccaaatgcttacttgctactaaatctgatattaatgagttgattgcatcaccttcagttgcctatgctttggagtactctgatgtgtttcccaaggaagtgccaccggggctgccaccggtgcgcggcattgagcatcaaatcgacttgatcccaggtgcttccctaccgaaccgtgcgccataccgaaccaaccctgaggaaaccaaggagattcagcgtcaagttcatgagttgcttgataaagggtatgtacgcgagtctcttagtccatgtgcggttctggtaattttggtaccaaagaaagatggttcatggcgtatgtgtgttgattgtagagctattaataacattaccattcgatatcgtcatcctattcctaggttagatgatatgcttgatgaattgagtggctctattgtgttctccaaagttgatttgcgtagtggttaccaccagattcgtatgaacttaggtgatgaatggaaaacagcatttaaaacgaagtttgggttgtatgagtggttagtgatgccttttggtttaactaatgcacccaccactttcatgaggttgatgaatgaggttttgcgtcctttcattggaaaatttgtggtggtctactttgatgatatcttgatttacagcaagtctatgggtgaacattttaatcatttacgtgctgtttttaatgctcttcgtgatgcacgtttatttggtaaccttgagaagtgcaccttttgcacagatagagtttcttttcttggctatgttgtaactccgcaggggattgaggttgatcaagccaaggttgaggcaattcagagttggccgactcctaaaacggtctcacaagtgcggagctttctaggactcgcggggttctatcgccgctttgtgcaggatttcagcaccattgctgcaccattgaatgcgcttacaaagaagggagtgcctttcacttggggcacatcacaagagaacgccttccacatgttgaaagataagttgacccatgcacctctccttcaacttcccgattttaataagacttttgaacttgaatgtgatgctagtgggattggattgggtggtgttttgctacaagaaggaaaacctgttgcatattttagtgaaaagttgagtgggcctgttctgaattattctacttatgataaggaattgtatgctcttgtgcgaactttagaaacatggcagcattatttgtggcccaaggaatttgtcatacattctgatcatgagtctttgaagcatattcatagtcaagggaagctgaaccgtagacatgctaaatgggttgaatttattgaatcttttccttatgttatcaaacacaagaaagggaaggagaacatcattgctgatgctttgtctagaagatacactttgttgacacaacttgactataagatttttggcctggaaacaatcaaagaccaatatgtgcatgatgctgattttaatgatgaagcgcatggaggcggtttgatgggacattttggtgccaagaagacacatgacatccttgctagtcatttcttttggccacagatgcgaagagatgttggcagggctgttttgaagaaaaatatcaagatgtgggaagaatgcttgcctcatattgaatttgcttataatcgttccttgcattctactacaaaaatgtgcccatttcagattgtgtatggtttgttgcctcgtgctccaattgatttgatgcctttaccatcttctgaaaaactgaattttgatgctaagcaacgtgctgagttgatgttaaaactgcatgagacaactaaagaaaacatagagcgcatgaatgctaagtataagtttgctggtgacaaaggtagaagggaattgaattttgaacctggagatttggtttggttgcatttgcgaaaagaacgatttcctgatttgagaaagtctaaattgatgcctagagctgatggaccatttaaagtgttagcaaagattaatgagaatgcatataagattgatttgcctgcagatttcggggttagtctcacatttaacgttgcagatttgaagccgtatttgggagaagaagatgagtttgagtcgaggacgactcaaatgcaagaaggggaggatgatgaggacatcaacaccatcgatacatccatgtcctcccatgtacagcatgatggtcctattacccgcgctcgtgaacgtcaactaaattatcagtgggacaagcccgaccactcgtcggacccccatcccctaactggtgatggtgacttcggagacagagaggacaaagggcaaatttgcaattacatttctcaaaatcaaagcgcttttgtccgcaaaagggcaattcacgacaacttcctttatgtgcaaaacatggtaaagctgctccacaggacaaaaaaacaaagcctgttcatcaagatagacattgcgaaggcttttgacaccgtgaattggtcctacctcctagagattcttcgacaatttggttttggaaaccgatggttaaattggatcactaatcttttctccacctcctcatcccaggtgctcttaaatgggtccccggggcaaaaaatcaaccatgctaggggcctacgacaaggtgatccactatccccaatgcttttcatcctggctatgaagccttttcatcgaatcctaaaagaagcagaaaatgtcaatgtccttgctccccttggggtaagaaatgggagattcaggtgctcgctatatgctgacgatgttgcggtttttgcaaacccgaaacaagaagagttgacagctctttctcatatactggcatgctttgcacaagcttctgggctacacacaaatatcaacaaaactgaaatctaccccatcagatgcgaaggcatcgatctgcaaaatcttcttgctggatggccgggccaaacaaaatatttcccctgcaaatatcttggactacctcttcatttcagaaaactaaggaaaattgacttccttcctttaatagacaagattgggtctaggctaccaggttggaaagggcgttttttcacttctgcgggacgtcaagccctagtatcatctgttctaagtgctatgccaactcatcatcttactgtcctacaagctccaaagtgggttttcaaaagaatcgatcgtttcagaagatctttcctatggaagggtgaagatcccgaccattcaaacccgggagatagtctgatcaactggtaa

SEQ ID NO: 14368 - DNA, 4347 bp, Oryza sativa
  Clone ID: TFbOSC411423j.C1.o3.fg
atggattgtgttgtgcaaggggtattgtcacaactcctttccgagatgccgcgctacaagcctgagtacttgtttggtgttgagggttttgtccaggagttgcgtacgatgtcctttgtcataggatttgggactgcccctttttatgcccagattcctcatgatcgtcatgaagagaagtgccgagtcaaagtcaccttgaacagtaatagtgaagatatcccctcagtgatgttcgaagctggaggaagaaactacatccattcatgtcaggaggtggcaaggatcgccataggagagctccgtgatcgctacagtgatcagttggccgacactgagtatcgctaccatcctcgtcaaccacagggaagtgaccgtggcagctaccttgagaccgaaggagttgagaatgatgttaccacaagacatttggttgagatgctgtgggctatggatgaaacccgtgcagagactgtgttagcagctcaagatcgtgaagaccggaatcgtggtaagatttgcaagctagaagacaaggtggatcgtttggagaaggaactagccgcgttgaagggagaagcaccaccgcagaaggccaggattcgtcttaccgcaagaaagagagctctatttgtccctcgctatcaattggcgccaaaggtccgtgtggtggagaaagaagttaccccagcccttgcggatcctccggtcatcatcataagtgatgatgaagaagaagaatccaagcgcaaccattccaagattgagtgggtagctactcaagatgatgaagacgagccgaacgagccttcaatcgacctccgatgctcggaagaactagaatgccattttcccccggtttctcttcttgtgccctgtccatgccagatggtgaacactcgcagcaacgggaatggccccaacaacaacaataataacaataacaacaacaatgaaggaaacccaactcttgcccaagttcttgctcaacagactcagttaatgaacatgatgatgcagcaactccagaaccagcagaaccaaggaaataaccatgcacctccccagaacaagttagcagaatttcttcatgtgaggccacctattttctctagtaccactaatcctgttgaagctggtgattggttgcacgccatagaaaagaagttggatttgcttcagtgcactgatcaggagaagacgcatataccatcgggagttgtgtctctcaagaagaaggaattcaggtcgctcactcagggatctcactctgttacggagtatctgtacgagttcaatcgtctggctcgttatgctccggaagatgtgcgcaatgacgaagagcgccaggagaagttcttggaaggacttaatgatgagctttcttgcccactcatgactggggattatcctgatttccagaagttagtggataaggctattcgccaggaggacaagtacaatcgcatggagcagaagaaacgccggattgctcaattcaagacgcaacaggggaataatcagaagccgcgtcttactttaggaccccagtccatgccacagggaggttcttcgtctgttgttcgtccgcagcgtcagttcttcaacaacaatgctggcaacaacatccgcaatcaagctccatgccctgttgcagcttcgacacagcaacagcctgccaagagggagcaaggcagcaagcccgtggtgtgtttcagctgtggagacccaggacattacgctgacaagtgttcgaagccccgacgcgtgaaggttgtccctgcccagagcaacactaccgcaccagcgccaaaggctcgtgtcaatcatgtcgctgctgcagaagctcaagatgctccagatgtgattttgagtacgtttcttgttaactcagttcctgcaacagtgctttttgattctggtgctacacattcattcttatctatgagttttgcgggaaatcatgggatggaagtagaagatcttagacgtcctttgatggttagtaccccaagtaatcaagcactctctttgcaacgtagcccctctgtcagaatagaaattcaaggagtaccatttctggccaatctcatcctgttagaatccaaagaccttaatgtcatcctagggatggactggttagccagacataaaggtgtgatagactgtgctaacagaaaagtaactctcaccagcaatgatggtcgagttgtaactgttcatgcattgtcttctgagtttttaaggtcaagactgaaccaaataactttggaagagattcctatagttcgggagtatcccgatgtgttcccagatgatttacctggtatgccgcccaaaagggatatagagttcagaatagatttggtaccaggaacaactccgatccataagagaccttatagaatggcagccaatgagttggcagaagtcaagaggcaagtagacgatttgcttcagaaaggatacatcagaccgagttcatcaccatggggagctccgctaaaaggtgccaccgttttctccaagatagatcttcgatcagggtatcaccagttgaggatcaaagaggaagatatacttaagacagcttttaccactaggtatggattgttcgaatgtactgttatgtcttttggacttaccaatgcccccgctttcttcatgaacttgatgaataaggtgtttatggaatacctagacaagttcgtggtagtctttattgatgacattcttatctactctcgaaccaaagaagagcatgtagaacatcttcgtcttgcattagagaagctacgagaacatcaactgtatgctaagtttagcaagtgtgaattttggttgtctgaagtgaagttccttggtcacgtcatctcagcaggaggagttgccatcgatcctagtaatgtggaatccgtaaccaattggaaacaaccaaagacagtttcagagattcgcagtttcctaggcctcgcaggatattatcggaggtttatagagaatttctccaagatcgctaagcccatgacacggctgcttcagaaagatgtaaagtacaagtggtcagaagaatgtgagcagagttttcaagagttgaagaatcgcttgatatcagctcctattttgattttacctgatccaaagaagggtttccaagtgtattgcgatgcatccaaacttgggttaggttgtgttctgatgcaagatgggaaggtggttgcctatgcatctcgtcagttacgtccgcatgagaagaactaccctactcatgatcttgagttagctgcagtagttcatgcgttgaagatttggcgtcattatcttttcggtactcgtacagaggtgtacaccgatcacaagagtttaaagtatatctttactcagccggatctgaacatgagacaacggagatggttggaattaattaaggattatgacatgggaattcattatcacccgggaaaggctaatgttgtagcagacgctcttagcagaaaaggctattgcaatgctacggaaggacgaccattgccatttgaattatgcaaggagtttgaaagattaaatttgggaattgtcagaagaggtttcctcgcagccttagaagcgaagcccactctaattgatcaagttagagaagcccaaattaatgatcctgatattcaagaaattaagaagaatatgagaagaggaaaagctatcggtttcttggaagatgagcaaggaactgtatggttgggtgagagaatcttcgtccccgacaataaagatttaaaagatgcaattctgaaagaagctcatgatactttatactccattcaccctggtagtacaaaaatgtaccagtatctcaaggaaagattttggtgggcaagtatgaagcgtgaaatcgcagagtacgtagcagtatgtgatgtttgtcagcgagtcaaggcagaacatcggaaacccgccggtttgttgcagcctttgaagattcctgaatggaaatgggaagaaatcggtatggattttatcactggtctacctagaacatcatcaggccacgactctatttgggtgatagtcgacagacttaccaaagtggctcatttcatcccagtaaagacaacctattctggaagtcggttggcggaattgtatatggccaggattgtgtgtttgcatggcgttcgtaagaaaatagtgtctgatcgaggcagccagtttacttcaaatttttggaagaagcttcaggaagagatgggttctaagttgaactttagtactgcttatcatccgcagacagacggacaaactgaaagggtaaatcagattttggaagacatgttgagagtatgtgtttag

SEQ ID NO: 14369 - DNA, 2799 bp, Oryza sativa
  Clone ID: TFbOSC423400j.C1.o4.gm
atggctgccggctggatgggcaaggttgtgactcgtgtgaagtgtgactcacaagtcctgcgaccgtcggtctacgatcactgccggacggggcacccgacggcgacgaacaaacccgaggatcccacaaacgaagatgacgagaatgagcacaagaacgttcaagcagctaatgcaatacttagcgccttgagtggaagtgagttcaaccgtgtggacgacatcgagagtgccaaagtgatttgggacacgcttcggaatttgcatgaaggcacggatagtgttcgcgagtccaaggtggagatcctcaaggggcaatttgagcggtttgtgatattggatggtgagagcccaagcgacatgtatgatcgattgaacaagattgtcaatgagatcaagggatttggctccaaggacatgatcgatgaggttgtggtcaaaaagatgattcgagcaatcactccaaggaactctatcttggtaaccataattcgtgagcgtccggactacaagactctcacaccttatgacttgctcgggcatacccttgcccatgacatgctcaaacaagagtccaaggaggtcatccaattcatcaaccaaagctcaaccacaagcatcaagaaggaagacttggcgttgaagggaagttcttccaagcactactccaacaagtcaagtggaagacactccgcaagagtgtgctatatgtgcaaagagcccgagcacttcatcgcagattgcccccacatcaatgaagaaaagaagaagattgagaagaaggttgagaagaaggagaaacacaagcatagcaagcatgatcactatggccaatctcaccttgggatgatctttggctctgactccgagtcaagctcaagtaatgaagaaggagttgccacgttcgccgtcaagccttcatcagcaccgagactcttcaactactcaagtgatgaggatgctcccatttgcctcatggcaaagaagcctaaggtaccttcctccctcaagtcattcaatgttgatcttgttagtgatgaggaggatgatgttcaggatgaggttatggatgaggaattgttcaagtccataaccaaggaatctctaccacacttgagtgagtttcttgggagaattgaggatcagtatgcaacccttgagaggcaagaggcattactcattcgtgaaaaagagcggtctcatgaactcaaggggcctcaaattggtacaacagcgaccttcacagaacttgggaaacgtgaaaaggtagcctctgttaacgcgttatgtaaactttttgaccaaccaaccgcgatccagcagtggagcacagtcacggcactcatcagcagctatgcgactgccaggcgacggggccatggcagcttcccatcagcagcttctcacggctgccgcagtggtggttctcgcctctctgcgtgcggtggcgcagcccgccggcgacggctatggcaacgccaccttctccctctgctccggcgtcgacaacacccaggcggcgggccgttctacttggtccggcagactactgcctccgaagccgtcaaggcggccaccgctgcgacggcggacaggtcctcgagcgtggttagcgacggggagtactacgcgctcgcgcagtgccgcgccgacgtgcccgcgggggactgctcgcggtgcctcgccgcctgcctcggagtcatcggcgggagcggagacgacttgtgcgagaaagccgcggtgcgctacgacgaccgctgcctcctccgcttcgccaagggcgacgacttcaccggcttcgacgtcgacgagcacacggcgaccgtgttcgacggcgggcgcagcggcctcaccgtcgccgaggaggtgcccacccgcctgctcgccacggtggcggccgccgccccggcgagcaggtcgaggaccgccgccgggatagcgtcctacggcggcggcggcagcctgtacgggctggcgcagtgcaccacccagatcccggcgccggactgcgccaggtgcctccgcggcgcgctgtcccgcctctcggaggacttcaactccaccgccgccgggatgcaactgcttcgctccagctgcatgctgcgctacgggagctccctcttcttcaaccagtcgtcgccgctcctccccgtcgcccacctcgccatcgccccggccggtggaggcgccggcccgcccgcagccgctccaccatcaccaggccaccgtcctgctcgagctcgaacgatcgccatttccgctgggcagcctggttaccagactctggtgaactcgacaggtaaattcgcagagcgaaataagcttggatctggtggctgtggcacagtctacaaggggatattgcataacaatgaagaaatagccgtgaagaaactcaccagaaaagatttgagagaagtggaaagggaggtttccctggtggcgcagcttcagcacgagaacattgtcaagttcttgggccactgcttccggcacgacaaaatgttcctcgtctacgaatacctgagcaacgggactctgagccgctatttcaaatccgactgtcagaagctggactggccaaaatggcttaacatcatcagagggatcgctcgtggcctttcttatctccacagagattctgggaaggacatcgtccatcgtgatctcaaaccttccaatgtcctccttattccaacttcaatgcaaagattgctgactttgatcttgcaagaccatacgaccggaacaaaagccatgagagcactcaaaagagagcaggcacccagtatgttctag

SEQ ID NO: 14370 - DNA, 4890 bp, Oryza sativa
  Clone ID: TFbOSC900333j.C1.o19.fg
atggcaggtctagaggataaagatgaggagggtgcatctcattccccacgcaccaaaggcatcatccaatactttacaaggcaagtgaagcagcacacagaaggacttgatacagatttgcaggtgacaaatgagaagattggacaattggagtccacgcagatctccaccaacactaagcttacagggctggagacagcggtcgcccgcattgacactagccttgctgctcttgtgaggcattttgatgctctcaatgctggaggcaatggtgggggtaatgacgatgacattgacggagagtacgtcgaggataatttggaggatgaatatattgctgacactgaacaagatgatcgagatgctcgagatcgtcgacggctacacaacaatcgacgaggtatgggtggtcgccgccgacgcgaggtacgcaacaatgatgatgctttttctaaaattaaatttaagattcctccttttgatggaaaatatgatcctgatgcgtacctctcttgggagattgctgttgaccaaaaatttgcatgccatgagtttcctgagaacactagagttagagctgctacaagtgagttcaccgattttgcttcggtttggtggatagaacatggcaagaaaaatcctaataacatgccacaaacttgggatgctttgaaacgggtcatgcgggctagatttgttccttcttactatgcacgtgacttgctgaataggttgcaacaattgagacaggatgcgaaaagtgtagaggaatattatcaggagttacaaatgggcttgcttcgttgtaatttagaggaaactgaggacgctgccatggctagatttttgggtgggttaaaccgcgagatttatgacatcgtagactataaagattacactaatatgacccgattgtttcatcttgcttgtaaggctgaaagggaagtgcagggacgacgtgctagtgccaaggctaatttttctgcaagtaaaacttcatcatggcagacacgcaccactcctccggccggccgtactacttctccatcttccacacccacaaccagtcgagcagcacctcctccatctggtgacaagtcagcgataaaggctgctcagccagcaccgagtgcttcttcaatggcatccacaggccgaatgagagatgttcagtgccaccgttgcaagggctttgggcatgtgcagcgtgactgccctagcaagcgagttttggtagtaaaaaacgatggtgagtactcctctgctagtgatttcgatgatgatacacttgctttgcttgcggctgaccatgcagataatgagccaccggaagagcacattggggctgcatttgcggatcactatgagagcctcattgtgcagcgtgtccttagcgcacaaatggagaaggcggagcaaaatcagcgacacacgttgttccaaacaaagtgtgtcgtcaaagagcgttgttgccgcatgatcattgatggaggtagctgcaacaacttggctagcagcgagatggtggagaagcttgcacttagcaccaaaccgcacccacatccatactacatccaatggctgaacaacagtggtaaggcgaaggtaacaaaactggtgcacattaattttgcaattggaaattaccatgatgttgttgaatgtgatgttgtgcccatgcaagcttgtaatattctgctaggtagaccatggcaatttgatagggattctatgcatcatggtaggtcaaaccagtactcttttctgtaccatgataagaaaattgtgttgcatcccatgtctcctgaagatattttgcgtgatgatgttgctaaggctgccaaatccaaatgtgagagtgataaaaaagcccaatctgatggcaagaaacctgagacaatcaatttgaaacccagatgcttacttgctactaaatctgatattaatgagttgattgcatcaccttcagttgcctatgctttggtatgcaaagatgctttgatttcacttcacgatatgcagcattctttgccccctgctgttgctaacattttgcaggagtactctgatgtgtttcccaaggaagtgccaccggggctgccaccggtgcgcggcattgagcatcaaatcgacttgatcccaggtgcttccctaccgaatcgtgcgccataccgaaccaaccctgaggaaaccaaggagattcagcgtcaagttcatgaattgcttgataaagggtatgtacgcgagtctcttagtccatgtgcggttccggtaattttggtaccaaagaaagatggttcatggcgtatgtgtgttgattgtagagctattaataacattaccattcgatatcgtcatcctattcctaggttagatgatatgcttgatgaattgagtggctctattgtgttctccaaagttgatttgcgtagtggttaccaccagattcgtatgaagttgggtgatgaatggaaaacagcatttaaaacaaagtttgggttgtatgagtggttagtgatgccttttggtttaactaatgcacccagcactttcatgaggttgatgaatgaggttttgcgtcctttcattggaaaatttgtggtggtctactttgatgatatcttgatttacagcaagtctatgggtgaacattttaatcatttacgtgctgtttttaatgctcttcgtgatgcacgtttatttggtaaccttgagaagtgcaccttttgcacagatcgagtttcttttcttggctatgttgtaactccgcaggggattgaggttgatcaagccaaggttgaggcaattcagagttggccgactcctaaaacggtctcacaagtgcggagctttctaggactcgcggggttctatcgccgctttgtgcaggatttcagcaccattgctgcaccattgaatgcgcttacaaagaagggagtgcctttcacttggggcacatcacaagagaacgccttccacatgttgaaagataagttgactcatgcacctctcctccaacttcccgattttaataagacttttgaacttgaatgtgatgctagtgggattggattgggtggtgttttgctacaagaaggaaaacctgttgcatattttagtgaaaagttgagtgggcctgttcagaattattctacttatgataaggaattgtatgctcttgtgcgaactttagaaacatggcagcattatttgtggcccaaggaatttgtcatacattctgatcatgagtctttgaagcatattcgtagtcaagggaagctgaaccgtagacatgctaaatgggttgaatttattgaatcttttccttatgttatcaaacacaagaaagggaaggagaacatcattgctgatgctttatctaggagatacactttgttgacacaacttgactacaagatttttggcctggaaacaatcaaagaccaatatgcgcatgatgctgattttaatgatgtgttgctgcattgtaaggatggaagaacatggaacaaattcgtcatcaatgatgggtttgttttcagagctaacaagctatgcattccagctagctccgttcgcctgttgttgttgcaggaagcgcatggaggcggtttgatgggacattttggcgccaagaagacacatgacatccttgctagtcatttcttttggccacagatgcgaagagatgttggcaggttcgttgctcgctgcgctacatgtcaaaaggctaagtcacgcttacatccacatggtttgtatatgcctcttcctgttcctactgttccttgggaagatatttcaatggactttgtgttaggattgcctaggaccaagagggggcgtgatagcatttttgtggttgtggatagattttctaaaatggcacatttcataccatgtcataaaactgatgatgcttctcatatcgctgatttgttctttcgagaaattgttcgcttgcatggtgtgccaaacacaattgtttctgatcgtgacacaaaatttcttagccatttttggagaactttgtgggctaaattggggactaaacttttattttctactacttgtcatccccaaactgatggacaaactgaagtggtgaatagaaccttgtctactatgcttagggctgttttgaagaaaaatatcaagatgtgggaagaatgcttgcctcatattgaatttgcttataatcgttccttgcattctactacaaaaatgtgcccttttcagattgtgtatggtttgttgcctcgtgctccaattgatttgatgcctttaccatcttctgaaaaactgaattttgatgctaagcaacgtgctgagttgatgttaaaactgcatgagacaactaaagaaaacatagagcgcgtgaatgctaagtataagtttgctggtgacaaaggtagaagggaattgaattttgaacctggagatttggtttggttgcatttgcgaaaagaacgatttcctgatttgagaaagtctaaattgatgcctagagctgatggaccatttaaagtgttagcaaagattaatgagaatgcatataagattgatttgcctgcagatttcggggttagttccacatttaacgttgcagatttgaagccgtatttgggagaagaagatgagcttgagtcgaggacgactcaaatgcaagaaggggaggatgatgaggacatcaacaccatcgatacatccacgtccccccatgtacagcatgatggtcctattacccgcgctcgtgcacgtcaactaaattatcaggacgagtgccctcgtggccgggttgacgcgcaccacaagttcgcggcgaccattggagacggtgtatcggttgctaaggcgcagcgtctttggacagttgtagtcgagccgtga

SEQ ID NO: 14371 - DNA, 186 bp, Oryza sativa
  Clone ID: TFbOSC30329j.C1.o1.np
ttgtcaggcctaaagcgcctttgtaataatagcaaagaaccaggtcatttctccagagattgtccacagccgaagcgtaacctgcgtcatcactccggccattatgcaagaagaagacaagtcactcgccttgtggtcactggagcaaacgccgtacctgtgaggcctcatgttaattctaaccca

SEQ ID NO: 14372 - DNA, 4161 bp, Oryza sativa
  Clone ID: TFbOSC401329j.C1.o3.fg
atggccggcacttcttcatcctccaacacctcaaccggtggctactccttgatgggttgcattaaagatattccgaccctaaaaggagataactacgcagaatggaaaagaaaactcgaccttgcttttatcttgggagaggtggactgggtgttgactaccccatgtcctatagaacctactgaacttgtcagaggtgaaaatgagtcagatgctgactggcaaaagagacagagggacaatgctcctctcgtcatgtcgtatgacattgaacaaaagaaatggtccttagccaacaagaaatgtttggctgtggtaaagaatacgattgagcctaccatattgggctcgatcccagagtgtgacgctgtctcagagtaccttgaaagaataaagagtcagtttactggctcttcaaagacttatgctacacagctgatcaagcagcttgtgacagaaaggtaccatggaggtggtgttagagaccacatacttagaatgagcaacatggcttccaaattgaagccaatggatttgggcataacagatgactttctggtccatctggttatggcctcattgccaaagcagtttgacaattttattgtcaactacaacataagtccagagaaatggaactttgagaagctcattgctaattgtgtgcaagaggaggagagaatcaaagaatcaaatggtggttcaataaactatgttaaagataagaaaaagaaccacaagtctcccacctcaaaaggtaaacagtctcagcatctgcctcaacaacaacagttcgctgttgagaaagatcaatgtctccactgcaagaagacaggacactacaagagagattgtcctgactttttgaaaatgatcatggcaaagaaaggtgagaacattattacatttgtaaatgaatctcattatgttggttactctagatccacatggtggattgattctggagcaactattcatgcttgtaattgtttaaaggcattccgttcgacgaggactacgcaaagaagagaaagcaccattagagttgccaatggagttgaagaaaaagttgaagctgttggagattttcctctagagctcgcgaatggcttcatacttttacttcgagatgtcttttatgttccttctttgcaaagaaacttaataagtgtatcaaagttggattttgatggatatgattgccgctttggaagtggcaaatgtgaactatggcataataatgcatgtattggtcttgctgtgttgcgagacgagctttatttgttatctctttctgagaatgtgaatgttgtgtcctcgttgacaaaagaaaacaagaaaagaaaggggagaattgagagactagttaagaatgaaattcttcctccattggagttctcagacttagaacaatgcatagaatgcattaaaggaaaatttgtaaagagcatcaaaaagggtgcaaaacgaagcgcaggaattttagagatcattcatacagatatttgtggtccatttcctgtgaaaagtgtggatggctatgactcgttcataacattcacagatgattactcccgctatggttatatttatccaattaaagagcgatcagaagcattggataaatttaagatattcaaagctgaagttgaaaatcagcatgatataaagattaaagtagtaagatctgaccgtgggggggagtactatggtcgacatacgccttatgggcaagtccctggaccttttgcaaggttcttgctagagaatggaatagtagcccagtattcaacaccgggcgaacctcaacagaatggggtagctgaaaggcgcaaccgtaccctcatggatatggtgcgcagcatgatgagctactccacactaccactcggtttatggatggaggcgttaaaaaccgccattcatattctcaacagagttccaagcaaatcggtgcccaaaacaccgtatgagctatggacaggaagagtaccctcgctaactcacctccgtgtgtgggggagtcctgcagaggccaaagtatttaacccaaatattgggaagttggaccccaaaacagtcagctgccattttattggctatcctgaaagatcaaaaggctatcgtttctactgtccaaacagttatacaaagtttgtagaaacgagacacgccgtcttcttggaagacgaaatgattagggggagctcggtagttcgagaaattgatcttgaggagaggcgggtgtctgtacccgctccgtcgactcaggaacctttcttctctctacctgctgatgttgtgcctgcaatgcctgtcattgaggtaccagcacctgttgttacccttcctgtggcaacaatgaatgagagtgaggaacctgttatacaggattcaacagaaatggttgccacaccagaggaggagctacaacagtctcaaatagataatgtgccagtacaggagactcatcaagagcctcaggtacaggatgtgccaaatgtgcaggcccctagaaggtctgaaagagtcagaagatcggctatccgtgatgactataaagtttataatatagaagagtcgcatatggaggatgatcccacctcatatgaagaggccatgagaagcgctcgctcatctgaatggttggaatccatgaaagatgaaatggaatcaatgaaactaaacgatgtttgggatttagaagaaattcctaaaggagccaaaacagtaggctgtaaatgggtctacaaaaccaaatatgactccagagggaatatagaaaagtttaaagcgcgacttgtggcaaaaggcttcacacaacgagaagggattgattacaatgagacattttctccagtctcttgtaaagattccttcaggattataatggcactagtggcacattatgatttggaattacatcagatggatgtaaaaacggcatttctaaatggagatttggaggaaaaagtatacatggcgcaaccgaaaggttttgtcatgaaaggaaacgaaaatatgggatgtcgtctaaagagatccatttatggattaaagcaagcttcgagacagtggtacttgaagtttgatgggacaataaagaaatttgggtttcaagagaatgtcgaggacaactgtatttattcaaagtttaaaaatgggagatttattttcctaattctgtatgtggatgacattctactggctagtagtgatgtcagtctactgcaggaaacaaagaaattcttgtcctcaaactttgacatgaaagacctcggtgaggcttcatatgttttgggcatagagattcaccgagatagaacaaagtatgcattgggactttctcaaaagacatatatagaaaaggtgttgaagaaattcaacatgtacagatgcagtgctacacctgctcctataatgaaaggcgaaaagtatggggcatcgcaatgtcccagaaatcagtatgagctcaatgaaatgaaaacaaagccatatgcgtcagctgtaggaagcctacagtacgcgcaagtgtgcacacgacctgacttggcatttgttaccgggttacttggcagatttcagagtaatccaggcctagagcactggaaattggtaaagaaagtcttgcgttatttgcaaggaacaaaaggcctcatgctgtcttacagaagatcagaatcactccagatagtggggtactcagattctgactttgcaaaagataatacaaagtcaacatcgggatatgtgtttaccctggcaggaggagctatttcatggaaaagctcaaaacagactatcactgcagggtctactatgtatgccgagtttatagcatgctatgaggcaacggggcaggtgaactggctaaagaagttcatacccggtttaaaggtggttgacagtattgagaaaccactaaagttatactgcgacaacgaacccgcagtaatgtacgctcacaacaatcagtcaagtggtgctgccaaacacattgacataaagtactatgttgtgaaggacaaagtccgggatcaaacaatcagtctcgagcacattaaaacagaaaggatgctcgcggatccgctcacgaaaggcctaccacccaacgtgttcaaggaacatgtagccggcatgggtttaagggaagccttatga

SEQ ID NO: 14373 - DNA, 3891 bp, Oryza sativa
  Clone ID: TFbOSC411956j.C1.o3.fg
atggcgacgccgtccacgcggtcgcgtggctactccttgatgggttgcattaaagatattccgaccctaaaaggagataactacgcagaatggaaaagaaaactcgaccttgcttttatcttgggagaggtggactgggtgttgactaccccatgtcctatagaacttgctgaacttatcagaggtgaaaatgagtcagatgctgactggcaaaagagacagagggacaatgctcctctcgtcatgtcgtatgacattgaacaaaagaaatggtccttagccaacaagaaatgtttggctgtggtaaagaatacgattgagcctaccatattgggctcgatcccagagtgtgacgctgtctcagagtaccttgaaagaataaagagtcagtttactggctcttcaaagacttatgctacacagctgatcaagcagcttgtgacagaaaggtaccatggaggtggtgttagagaccacatacttagaataagcaacatggcttccaagttgaagccaatggatttgggcataacagatgactttctggtccatctggttatggcctcattgccaaagcagtttgacaattttattgtcaactacaacataagtccagagaaatggaactttgagaagctcattgctaattgtgtgcaagaggaggagagaatcaacgaatcaaatggtggttcaataaactatgttaaagataagaaaaaaaaccacaagtctcccacctcaaaaggtaaacagtctcagcatctgcctcagcaacaacagttcgctgttgagaaagatcaatgtctccactgcaagaagacaggacactacaagagagattgtcctgactttttgaaaatgatcatggcaaagaaaggtgagaacattattacatttgtaaatgaatctcattatgttggttactctagatccacatggtggattgattctggagcaactattcatgcttgtaattgtttaaaggcattccgttcgacgaggactacgcaaagaagagaaagcaccattagagttgccaatggagttgaagaaaaagttgaagctgttggagatcttcctctagagctcgcgaatggcttcatacttttacttcgagatgtcttttatgttccttctttgcaaagaaacttaataagtgtatcaaagttggattttgatggatatgattgccgctttggaagtggcaaatgtgaactatggcataataatgcatgtattggtcttgctgtgttgcgagacgagctttatttgttatctctttctgagaatgtgaatgttgtgtcctcgttgacaaaagaaaacaagaaaagaaaggggagaattgagagactagttaagaatgaaattcttcctccattggggttctcagaacaatgcatagaatgcattaaaggaaaatttgtaaagagcatcaaaaagggtgcaaaacgaagcgcaggaattttagagatcattcatacagatatttgtggtccatttcctgtgaaaagtgtggatggctatgactcgttcataacattcacagatgattactcccgctatggttatatttatccaattaaagagcgatcagaagcactggataaatttaagatattcaaagctgaagttgaaaatcagcatgatataaagattaaagtagtaagatctaaccgtgggggggagtactatggtcgacatacgccttatgggcaagtccctggaccttttgcaaggttcttgctagagaatggaatagtagcccagtattcaacaccgggcgaacctcaacagaatggggtagctgaaaggcgcaaccgtacccttatggatatggtgcgcagcataatgagctactccacactaccactcggtttatggatggaggcgttaaaaaccgccattcatattctcaacagagttccaagcaaatcggtgcccaaaacaccgtatgagctatggataggaagagtaccctcgctaactcacctccgtgtgtgggggagtcctacagaggccaaagtatttaacccaaatattgggaagttggaccccaaaacagtcagctgccattttattggctatcctgaaagatcaaaaggctatcgtttctactgtccaaacagttatacaaagtttgtagaaacgagacacgccgtcttcttggaagacgaaatgattagggggagctcggtagttcgagaaattgatcttgaggagaggcgggtgtctgtacccgctccgtcgactcaggaacctttcttctctctacctgctgatgttgtgcctgcaatgcctgtcattgaggtaccaacacctgttgttacccctcctgtggcaacaatgaatgagagtgaggaacctgttatacaggattcaacagaaatggttgccacaccagaggaggagctacaacagcctcaaatagataatgtgccagtacaggagactcatcaagagcctcaggtacaggatgtgccaaatgtgcaggcccctagaagagggaatatagaaaagtttaaagcgcgacttgtggcaaaaggcttcacacaacgagaagggattgattacaatgagacattttctccagtctcttgtaaagattccttcaggattataatggcactagtggcacattatgatttggaattacatcagttggatgtaaaaacggcatttctaaatggagatttggaggaaaaagtatacatggcgcaaccgaaaggttttgtcatgaaaggaaacgaaaatatgggatgtcgtctaaagagatccatttatggattaaagcaagcttcgagacagtggtacttgaagtttgatgggacaataaaaaaatttgggtttcaagagaatgtcgaggacaactgtatttattcaaagtttaagaatgggagatttattttcctaattctgtatgtggatgacattctactggctagtagtgatgtcagtctactgcaggaaacaaaaaaattcttgtcctcaaactttgacatgaaagacctcggtgaggcttcatatgttttgggcatagagattcaccgagatagaacaaagtatgcattgggactttctcaaaagacatatatagaaaaggtgttgaagaaattcaacatgtacagatgcagtgctacacctgctcctataatgaaaggcgaaaagtatggggcatcgcaatgtcccagaaatcagtatgagctcaatgaaatgaaaacaaagccatatgcgtcagctgtaggaagcctacagtatgcgcaagtgtgcacacgacctgacttggcatttgttaccgggttacttggcagatttcagagtaatccaggcctagagcactggaaattggtaaagaaagtcttgcgttatttgcaaggaacaaaaggcctcatgctgtcttacaaaagatcagaatcactccagatagtggggtactcagattctgactttgcaaaagataatacaaagtcaacatcgggatacgtgtttaccctggcaggaggagctatttcatggaaaagctcaaaacagactatcactgcagggtctactatgtatgccgagtttatagcatgctatgaggcaacggggcaggtgaactggctaaagaagttcatacccggtttaaaggtggttgacagtattgagaaaccactaaagttatactgcgacaacgaacccgcagtaatgtacgctcacaacaatcagtcaagtggtgctgccaaacacattgacataaagtactatgttgtgaaggacaaagtccgggatcaaacaatcagtctcgagcacattaaaacagaaaggatgctcgcggatccgctcacgaaaggcctaccacccaacgtgttcaaggaacatgtagccggcatgggtttaagggaagccttatga

SEQ ID NO: 14374 - DNA, 5082 bp, Oryza sativa
  Clone ID: TFbOSC414037j.C1.o3.fg
atggccggcacttcttcatcctccaacacctcaaccggtggctactccttgatgggttgcattaaagatattccgaccctaaaaggagataactacgcagaatggaaaagaaaactcgaccttgcttttatcttgggagaggtggactgggtgttgactaccccatgtcctatagaacctactgaacttgtcagaggtgaaaatgagtcagatgctgactggcaaaagagacagagggacaatgctcctctcgtcatgtcgtatgacattgaacaaaagaaatggtccttagccaacaagaaatgtttggctgtggtaaagaatacgattgagcctaccatattgggctcgatcccagagtgtgacgctgtctcagagtaccttgaaagaataaagagtcagtttactggctcttcaaagacttatgctacacagctgatcaagcagcttgtgacagaaaggtaccatggaggtggtgttagagaccacatacttagaatgagcaacatggcttccaaattgaagccaatggatttgggcataacagatgactttctggtccatctggttatggcctcattgccaaagcagtttgacaattttattgtcaactacaacataagtccagagaaatggaactttgagaagctcattgctaattgtgtgcaagaggaggagagaatcaaagaatcaaatggtggttcaataaactatgttaaagataagaaaaagaaccacaagtctcccacctcaaaaggtaaacagtctcagcatctgcctcaacaacaacagttcgctgttgagaaagatcaatgtctccactgcaagaagacaggacactacaagagagattgtcctgactttttgaaaatgatcatggcaaagaaaggtgagaacattattacatttgtaaatgaatctcattatgttggttactctagatccacatggtggattgattctggagcaactattcatgcttgtaattgtttaaaggcattccgttcgacgaggactacgcaaagaagagaaagcaccattagagttgccaatggagttgaagaaaaagttgaagctgttggagattttcctctagagctcgcgaatggcttcatacttttacttcgagatgtcttttatgttccttctttgcaaagaaacttaataagtgtatcaaagttggattttgatggatatgattgccgctttggaagtggcaaatgtgaactatggcataataatgcatgtattggtcttgctgtgttgcgagacgagctttatttgttatctctttctgagaatgtgaatgttgtgtcctcgttgacaaaagaaaacaagaaaagaaaggggagaattgagagactagttaagaatgaaattcttcctccattggagttctcagacttagaacaatgcatagaatgcattaaaggaaaatttgtaaagagcatcaaaaagggtgcaaaacgaagcgcaggaattttagagatcattcatacagatatttgtggtccatttcctgtgaaaagtgtggatggctatgactcgttcataacattcacagatgattactcccgctatggttatatttatccaattaaagagcgatcagaagcattggataaatttaagatattcaaagctgaagttgaaaatcagcatgatataaagattaaagtagtaagatctgaccgtgggggggagtactatggtcgacatacgccttatgggcaagtccctggaccttttgcaaggttcttgctagagaatggaatagtagcccagtattcaacaccgggcgaacctcaacagaatggggtagctgaaaggcgcaaccgtaccctcatggatatggcgttaaaaaccgccattcatattctcaacagagttccaagcaaatcggtgcccaaaacaccgtatgagctatggacaggaagagtaccctcgctaactcacctccgtgtgtgggggagtcctgcagaggccaaagtatttaacccaaatattgggaagttggaccccaaaacagtcagctgccattttattggctatcctgaaagatcaaaaggctatcgtttctactgtccaaacagttatacaaagtttgtagaaacgagacacgccgtcttcttggaagacgaaatgattagggggagctcggtagttcgagaaattgatcttgaggagaggcgggtgtctgtacccgctccgtcgactcaggaacctttcttctctctacctgctgatgttgtgcctgcaatgcctgtcattgaggtaccagcacctgttgttacccttcctgtggcaacaatgaatgagagtgaggaacctgttatacaggattcaacagaaatggttgccacaccagaggaggagctacaacagtctcaaatagataatgtgccagtacaggagactcatcaagagcctcaggtacaggatgtgccaaatgtgcaggcccctagaaggtctgaaagagtcagaagatcggctatccgtgatgactataaagtttataatatagaagagtcgcatatggaggatgatcccacctcatatgaagaggccatgagaagcgctcgctcatctgaatggttggaatccatgaaagatgaaatggaatcaatgaaactaaacgatgtttgggatttagaagaaattcctaaaggagccaaaacagtaggctgtaaatgggtctacaaaaccaaatatgactccagagggaatatagaaaagtttaaagcgcgacttgtggcaaaaggcttcacacaacgagaagggattgattacaatgagacattttctccagtctcttgtaaagattccttcaggattataatggcactagtggcacattatgatttggaattacatcagatggatgtaaaaacggcatttctaaatggagatttggaggaaaaagtatacatggcgcaaccgaaaggttttgtcatgaaaggaaacgaaaatatgggatgtcgtctaaagagatccatttatggattaaagcaagcttcgagacagtggtacttgaagtttgatgggacaataaagaaatttgggtttcaagagaatgtcgaggacaactgtatttattcaaagtttaaaaatgggagatttattttcctaattctgtatgtggatgacattctactggctagtagtgatgtcagtctactgcaggaaacaaagaaattcttgtcctcaaactttgacatgaaagacctcggtgaggcttcatatgttttgggcatagagattcaccgagatagaacaaagtatgcattgggactttctcaaaagacatatatagaaaaggtgttgaagaaattcaacatgtacagatgcagtgctacacctgctcctataatgaaaggcgaaaagtatggggcatcgcaatgtcccagaaatcagtatgagctcaatgaaatgaaaacaaagccatatgcgtcagctgtaggaagcctacagtacgcgcaagtgtgcacacgacctgacttggcatttgttaccgggttacttggcagatttcagagtaatccaggcctagagcactggaaattggtaaagaaagtcttgcgttatttgcaaggaacaaaaggcctcatgctgtcttacagaagatcagaatcactccagatagtggggtactcagattctgactttgcaaaagataatacaaagtcaacatcgggatatgtgtttaccctggcaggaggagctatttcatggaaaagctcaaaacagactatcactgcagggtctactatgtatgccgagtttatagcatgctatgaggcaacggggcaggtgaactggctaaagaagttcatacccggtttaaaggtggttgacagtattgagaaaccactaaagttatactgcgacaacgaacccgcagtaatcatcgtgctggagaagaagacgttcttggtggagcggttcgacaagtacgtcaagacgctcggatccgggatccacgtgctcgcccccctcgtcgaccacatcgcgtacgtccactcactcaaggaggaggccatccccatccccgaccagtccgccatcaccaaggacaacatctccatccagatcgacggtgtcctctacgtcaagaatttttggggaaacttcaaattgcatgttctagatgaagcacttcttgctttcaagaaggcagttacaacttctgatgggatattcctcaactggcgtgaacaagatgtggatccttgcaattggaaggatgttagatgtgacagtcacaccaagagactcaaggcaaggagaggcagtgtctcatgggaatcaggggtaaggtgcttctcgattggcccatcagaactggtagcacgtggttcgaaggtatggctatccacgcgcgcaggggggcacctggaagcaggcggcgtcgacgatgccgaaggcggcgacggcgacccaggcggcccagccggaaggctgcctcttgccgcgcgaggcggcgaaggcgacgagcagtgtgccggcggggaggaggcgaagctcggcgacgaagaaggggcccgtcttggctatgacccccttcatggccaccatggccgtgccccagaagaagaagggcgacaccagcgacgcccactcccaccactccctccccacgaatgccgccgaggccgagacgccatcctcctcctcggagacccgcgcgaggccttcgacgaagcactcgacgtccgtgcccgtgccgacgcagtcaaccgcgtccggcggggagggcggcatcgcctcgcggcggaagggttccgcacctgggcggtcgtcgacgtagcactcaacgtcggcggcccgtgccgacgcagtcaaccgcgtcaccgggttaggcggcgtgtggcggggcgcggccgccgccgcgagccgccgcgagatgtcgcacgccacggccaccgcgcgggacggagtagacagtggagggcgggaggatggagtacggcggggcggggcaagacggagtacggcggcgcgggagtacggcggggcggggcggcgctgactgagggcggcggcggacgcgaatggaggcagcggcgcgagtggactgggtga

SEQ ID NO: 14375 - DNA, 2174 bp, Oryza sativa
  Clone ID: TFbOSC100686j.C1.o4.np
gtgaagacagggaatgatccccgtgcctccaatgacgctaggggcagcgaagagcagaccgatggagctcatatcagtggtgcatctgacagcagttcatctccaccgcccgagaacccaacggtcactcagatgatgacaatgatgatacaacagatgcagcaacattaccatcagatgttgcagcaggcgcagcagaaccagcagcaggcgcagcagaaccagcagtctggtcctccatcatcacacctgtccaaactgttagactttcatcatatccagccacccactttctcaagcaccaccaacccaatgtaggccaacgactggctccgtgcgattgagaagaagctgaaccttctgcaatgcaatgaccaagagaaggttgcttttgctacacatcagttgcaaggtcccgcttctgcttggtgggataactacgtggtgacccgtccagattcaacggaggttacttgggcagagttttgtcaaagcttcaggaaggcacaaattcctgaggggattatggcacaaaagaaaagagagttccgcgcactgcatcaagaaaccaggatagttacagagtacttgcatgagttcaaccgccttgcgcgctacgctcctaaggatgtgcgcaccgatgccgagaagcaggagaagtttttgtttggtctcgatgataaattgaccaaccagctgatctccggagtctatgatgactttgagaagctcgtggacaaggctatccgtcaggaagagcaacgcaacaaaatggaccgaaatagaaaggtagctcagatcagctttcctcaggggaacaattagaagcctcgcttcatgacgggacagctaggtgagccttccaccctgatcatccgtcagcaccatccttaccacccgagtaacttcaacaacgactacaacggtggcagtcacaacaacagtaagcagcataaccacaactcgacttcacccccattaatggcaccagctcagtcagatccgccagctatgtcagctcagtcagaacagctcaagaaggagtctgcaggaaagccaagaccctgcttcaactgtggcaagcacggccactttgctggcaagtgtccgaagctaaagcgcgttggacctaggttcgtccaggcccgcgtcaatcatgcgtctgcagagaaagcacaggcatcaccagaggtcgtgctgggcacgtttccggtgaactcatatccagcaacagttctctttgattctggtgcctcgcattcttttatatccaagagatttgctggggcacatggattatcggtagtggaacttaaaatactgatgcaggttcatacccctggaaatgacatgaggacagcacactactgcccctcagtgactatagagatcaagaggtcacggtttctatccaacctcatccttctcgaatccaaagacctagatgtcattctcggaatggattggttgaccagacacaagggagtgatcgactgcgcaagtcgcactatcaccctaagcaacgacaaaggggagaagatcaccttccgttctccagtgtcacagaagtccgtagcgagtctgaatcaggctgttattgaggatcagacagaaatagcggaaaaaaatcccaagaagttggaggatatacctatagtacaagagtatcctgaggtgttcccagaaggcctcactacaatgccaccgaagagagaaatcgagttccagattgatctggcacccggaactgctccaatctacaagaggccgtacagaatggcagctaatgagctagcagaagtcaaaaagcaggttgacgaacagctgcagaaagggtacatccgaccgagtacttcaccttggggtgctccggttatctttgtggaaaagaaagacaagaccaagaggatgtgcgttgattatcgcgcccttaatgaggtcacaatcaagaacaaatatccgttgccaagaattgatgatctgtttgatcagctaaaaggagctaaggtgttttccaatatagacctgcgatcaggctatcatcagttgagaattcgggaagaggatattcccaagacagccttcgccactcggtcttgctctcttttcccccacaccagaggagttttcggacacgaatgaaaaaactaatttcataactcgcctgaaaaccg

SEQ ID NO: 14376 - DNA, 3735 bp, Oryza sativa
  Clone ID: TFbOSC21389j.C1.o4.fg
atggaggccaacgactggctccgtgctattgagaagaagctgaacctactgcaatgcaacgaccaagagaaagttgcttttgctacacaccagttgcaaggtcccgcttctgcctggtgggataactacgtggtgacccgtccagatgcaacgaaggttacttgggtagagttttgtcaaaactttaggaaggcacagattcctgaagggattgtggcacaacagaagagagagttccgtgcattgcaacaaggaaccagaacggttacagagtacctgcacgagttcaaccgcctcgcgcgctacgctcctgaggacgtgcgcaccgatgctgagaagcaggagaagtttttgtttgggctcgacgatgaattgaccaaccagctaatctccggagtctatgaggactttgagaagcttgtggacaaggctatccgccaggaagagcaacgcaacaaaatggaccgaaaaagaaaggcagctcagatcagctttcctcaggggaacaatcagaagcctcgcttcatgacgggacagctaggtgggccttccaccctgatcgtctgtcagcaccgtccctatcacccgagtaacttcaacaacgattacaacggtggcagtcacaacaatagtaagcagcacaaccacaactcgactccacccctactaatggcaccagctcagtcagatctgccagctgtgtcagctcagtcagaacaacccaagaagggggctgtaggaaagccaagaccctgcttcaactgtggcaagcacggccactttgctggcaagtgtccgaagctgaatcgcactggacccaggttcatccaggcccacgccaatcatgtgtctgcagaggaagcacaggcagcaccagaggtcgtgttgggcacgtttccagtgaactcatatccagcaacagttctctttgattcaggtgcctcgcattctttcatttccaaaagatttgctgggacacatggattatcggtagtggaacttaaaataccgatgcaggttcatacccctggaaatgatatgaggacagcacactactacccctcggtgactatagagatcaaaagatcaccgtttctatccaacctcatccttctcgaatctaaagacctagatgtcattctcggaatggattggttgaccagaaacaagggagtgattgactgcgcaagccgcaccatcaccctaaccaacgacaaaggggagaagatcaccttccgttccccagcgtcgcagaagtccgtagcgagtctgaatcaggctgctattgagggtcagacagaaacagtggagaaaagtcccaggaagttggaggatattcctatagtacaagagtatcctgaggtgttcccagaagacctcactacaatgccaccgaagagagaaatcgagttccggatcgatttggcacccgggactgctccaatttacaagaggccgtacagaatgacagctaatgagctagcagaggtcaagaagcaggttgacgaacagctgcagaaagggtacatccgaccgagtacttcaccttggggtgctccggttatctttgtggagaagaaagacaagactaagaggatgtgcgttgattatcgcgcccttaatgaggtcacaatcaagaacaaatatccgttgcccagaattgatgacctgtttgatcagctaaaaggagctaaggtgttttccaagatagacctgcgatcaggctatcatcagttgagaattcgggaagaggatattcccaagacagccttcaccactcggtatgggttgtttgagtgcacggttatgtcctttggactcaccaatgaaccggctttcttcatgaacttgatgaacaaagtgtttatggagtttcttgacaagtttgtcgtggtattcattgacgacatacttatttattcaaaatcagaagaggaacatgagcagcatctccgtctggtactcgagaaattgaaggagcaccagctatatgccaagtttagcaagtgtgacttctggttatcagaggtcaaatttctgggtcacatcatttctgctcaaggcgtggcagtggatccatcaaatgtggagtcagttacaaagtggaccccactaaagacagtttctcagatccggagttttcttggacttgcgggctattaccgtcggttcatcgaaaatttctccaagattgccaggcccatgacacagttgctaaagaaagatgaaaaattcaagtggtcagctgagtgcaaccaaagttttgaagaactcaagaagaggttagtctctgcaccagttctaattctgccagatcagacaaaagacttccaagtctactatgatgcatctcgccaagggttgggatgtgtgttgatgcaagaaggcagagtggtcgcatacgcttcgcgacagttgcgtccacacgagaccaattatcccactcatgaccttgagttggcagcagtggttcatgctctgaaaatctggcggcactatcttattggcaaccgctgtgaagtatacactgatcacaagagtctgaagtacatcttcactcagcctgacttgaatctccgacagcgaagatggctggagttaattaaagattatgacatggggatacattatcatccagacaaagcaaatgtggtagcagatgctttgagcagaaaaagctattgcaatgccttatgcactgaagacatgtgtggcaaattgcagcaagatcttgagcacctaaatttgggcatcgtcgaacacggtactaaaatgtaccaggacctcaaagagaaattctggtgggccagcatgagaagagagatagccggattcgtcgcactctgcgatgtttgtcggcgagtcaaagcagaacatcagaggcccgcaggactgctacaaccccttcagatcccggaatggaaatgggaagaaatcggaatggatttcatcactggtttgcccaggacatcgtcagggcatgattcaatttgggtagtcgtggatcgcctcacgaaagttgctcatttcattccggtgcacactacctatacggggaaaagttatcaagccagtttgcaaatggcaccgtttaaagcgttgtacggacggaaatgccgcactccgatcttctgggatcaaattggagaacgtcagttgtttgggacggaagtattaactgaagcagaggagaaagtcagaaccgtcagagaaaggctaagaattgcgcaatctcgacagaagagttatgctgacaaccgccgaagagagcttactttcgaagcaggggattatgtgtaccttcgtgtcactccgcttcggggagtacaccgcttccaaaccaaaggcaagttggcaccacgctttgtgggaccatacaggatcttggaacgcagaggtgaagtcgcttaccagcttgagctcccatctaatatggttggtatccacgatgtgtttcatgtatctcaattgaagaagtgtttgagggtacctgaggaacaagctagctcagagcacattgacatccaggaagatctgacttatgtggagaagccgatttgtatccttgagaccagtgagagatggaccagaaacaaggtgatcaggttttgcaaagttcagtggagccaccactcagaagaagaggccacctgggaaagagaagatgaattgaaggccgctcatccgcacctcttcgccagctcttccgaatctcggggtcgagattccgtttaa

SEQ ID NO: 14377 - DNA, 3723 bp, Oryza sativa
  Clone ID: TFbOSC400910j.C1.o23.fg
atggcaagcggaagcggcgagggcaagggccgccgccaccaggacaatatcccaagcgtcgtcctgctcgagctctggggccacgtcgccgacgatgaccaccggcctgacgccaccaccgccacttccacgacgagcaccggcctgccaatctcggtgaccttgtgcgccgccaccccgccaagcctctcgcacctctccgtcgactgccctggtctggtggatctggatcccaatcccttagataagtttgtggcgcccacggtgatcagcacggatgccgacctcgtcctccttcgtgtccctgtcgatcgctttgccagatttgatcactgtttcagcgactacttcgtctacaaggtgcactctcactctgaaagcgcaaagctgcaccgtctcccgagcccacgtggccgtggctttgcagacgacaacattgccatactgagctgcggcaacgacgacgacgactcctacgctgtggccgctcttcaacccttgcatcatgtccacttcaggcttcacctgtgtcgctctacccccgatggaaagccagggagttggacctcccatcagttgacagtggaggagccgctgaggggaacggtgtgccccgtccctgactcagcactgaggaggatcttccatgccaccaccaaggtgattacgcttggaggtgctaaaggtacagttggctgggttgatctctggcgaggcatccttctctgtgatgtgctcgacgagattgagagccccaagctccgcgatttgccgctgcccttgccctctacgggcaactggcctttgttcctcaatcgctgcccctactattgtcgtgacatcgtcgtcaaccagagcagagacactatcaagtacgtcgagatggaattcaccatcttgaactcatctcaagatccacgctcctcgtatcacgaatgggtggccagccaagaatttcgaagttcgcatctagacatcttggtcgatgatggtagcttgaagatcaacacatggaacatgcctatcccgattttttcacaactatttgcatcgaatttggaagaaaaaggtataccactccccaccacaaggggagcagccaagatggtattcactcttaacatgagggcacgtgttctcgaagaactggagaaacttcatagcatgagtcaccttggttttatgcgttgcttcctttccactgggatctccaaacatcttaagcctacagttgggaagcaaaatggagttgggagctgtcacgcccagaaattcccgaatagaattccaagcagaatgtgcattaaaatccccgtccaggaccagccggggatgcaacggtacgagcctatagaacagctcccgcagcacctccagttccgcccgcagttcctgcagctccagttccagctcccgcgttcactctctccttcgctccagcatcagccgccaggggtccagccagtggcaccggagatggtctacaccaggactggtagccgcgcaacaggcgagggcagcaacggcgaagaacgcgctgatggtgtgcaccccaacagtgattctggcaatggtccgccaccacttcccgagaatccgacgcttgcccaagttatggcacatcagactcagatgatggcagccatgatgcagcagatgcagcagcagcaccagcagatgcaccagaggatgatgcagcacgccgaacagcagcatcaacagtttggtccccctccccctcagtccaagttgccagagtttctacgcgtcaggccacccaccttctccagcaccaccaaccctatggaggcgaacgactggctccatgcaatagagaagaagctgaatctcctgcagtgtaatgatcaggagaaggtcgcttttgccacacaccagcttcagggtcccgcgtcagcttggactgtgacagagtacctccatgagttcaatcgcctcgcgcgatatgcaccagaggatgtccgcaccgacgccgagaagcaggagaagttcatggcgggtctggatgacgagctgaccaaccaactgatatctggggactacgccgactttgagaggctggttgacaaggcaatccgtcaggaggaccaacgcaacaagatggacaggaagaggaaggccgctcagttcagggcacatcagggaagtcaccagaggccgcgcttcactcccggacagcagggtggacctaccaccatgatcgtccgccagcaccgcccgttcaaccctagcaacttccaccagggcaccagtggcagtcagaaccaccatggaggtcagcccaaccgcggtgcagctccacgcccatcagtggcaccggcacagtcaggccagcccgcgcaagccaagaaggagacgggagcaaaaccagggtcctgcttcaactgtgacgagcttggccacttcgctgacaaatgcccgaagcccaggcgtgccgggccaaggtttatccaggctcgtgtcaaccacgcatctgcagaggaggcacaagcagcaccggaggtcgtactgggtacgttccctgttaactcaatccctgcaacagtactttttgattctagtgcaacgcattctttcatctcaaagaaatttgtcgggatgcatgggttaataagagaggaacttagcacaccgatgcgggttcataccccagggaatagctccacttcggttcaattcagcccttctataacaatagaaattcaaaggtcaccatttctagccaacctcattcttctcgaatccaaagacctaaatgtcattcttgggatggattggctgaccaagtttaagggagtcatcgattgtgcgagtcgcacagtcaccttgaccaacgagaagggagaaaccgtgattgagacggaaatcccagtggacaccgtagagaagaacttgagaaaattggaagatatacccatagtctgcgagtatccagaagtgttccccgaagacctcactaccatgccacccaagagagagattgaattccggattgacttggcaccgggaactgctccaatctataagagaccgtacagaatggcggccaacgaattagcagaggtcaagaagcaagttgatgagcagctgcagaaagggtacatacgaccaagcacttcaccttggggcgctccggtcatttttgtggagaaaaaggataagacgaagaggatgtgcgtcgattatcgcgcacttaacgaggtcacaatcaagaataaatatcctttaccgcgaatcgacgatttatttgatcaactgaatggagctaaagtgttttctaagatagacctgcgatcaggctaccaccagttgagaatccgggaagaggatattccgaagacggccttcaccactcggtacgggctatatgagtgcacggttatgtccttcggacttaccaacgcacccgcattcttcatgaatctgatgaacaaagtgttcatggaatttctggacaagtttgttgtggtgttcatcgacgacatacttatctactcaaaatccgaggaagaacatgagcaacatctccgtctggtacttgaaaagttgaaggagcaccagctatacgccaagttcagcaagtgtgacttctggttgacggaagtcaaatttctgggcgtgacaggagccccagtggccagtttagttttctgtaaagtcaacgtacaaccatcttcacacatgtcacgcccggaaattcactag

SEQ ID NO: 14378 - DNA, 1938 bp, Oryza sativa
  Clone ID: TFbOSC5283j.C1.o1.fg
atgtcagctcagtcaaaacagctcaagaaggagtctgcaggaaagccaagaccctgcttcaactgtggcaagcacggccactttgctggcaagtgtccgaagctgaagcgcattggacctagacataagggagtgatcgactgcgcaagtcgcaccatcaccctaaccaacgacaaaggagagaagatcaccttccgttctccgacaaaaatagcggaaaaaaatcccaagaagttggaggatatacctatagtacaagagtatcctgaggtgttcccagaagacctcactacaatgccaccgaagagagaaatcaagttccggattgatttggcacccgggactgctccaatttacaagaggccgtatagaatggcagctaatgagctagcagaggtcaagaagcaggttgacgaacagctgcagaaagggtacatccgaccgagtacttcaccttggggtgctccggtaatctttgtggagaagaaagacaagaccaagaggatgtgtgttgattatcgcgcccttaatgaggtcacaatcaagaacaaatatccgttgccaagaattgatgacctgtttgatcagctaaaaggagctaagttgagaattcgggaagaggatattcccaagacagccttcaccactcggtatgggttgtttgagtgcacggttatgtcatttggactcaccaatgcaccggctttcttcatgaacttgatgaacaaagtgtttatggagtttcttgacaagtttgtcgtggtgttcattgacgacatacttatttattcaaaatcagaagaggaacatgagcaacatctctgtctggtgctcgagaaattaaaggagaaccagttatatgccaagttcagtaagtgtgacttctggttatcagaggtcaaatttctcggtcacgtcattactgctcaaggtgtggtagtggatccatcgaatatggagtcagttacaaagtggaccccaccaaagacagtttctcagattcggagtttccttggacttgtgggctattaccgtcggttcattgaaaatttctccaagattgccagacccatgacacagttgctaaagaaagatgaaaaattaaagtggtcagctaagtgcaaccaaagttttgaagaacttaagaagagcaattatcctactcatgatcttgagttggcagcagtggttcatgctctgaaaatctggcggcactatcttattggaaaccgctgcgaagtctacactgaccacaagagtctgaagtacatcttcactcagcccgatctgaacctacgtcagcgaagatggctggagttgataaaagattatgacatggggatacattatcatccaggcaaagcaaatgtggtggcagacgctctgagcagaaagagctattgcaatgcagtatgtaccgaaggcatgtgtgacaaattgcagcaagatcttgagcacctaaatttgggcatcgtggaacacgggtacgtagctgccctagaggcacggcctacgctcgtggatcaagtcagagcagctcaggtaaatgatcctgaaataactgagttgaagaagaatatgagggttggaaaagcccgggatttccacgaggatgagcatggcacaatctggttgggagaaagattgtgtgtacctgacgacaaagaatttaaggatctgatactcacagaagttcatcaaactcagtattcaattcatcccggcagcaccaaaatgtaccaagacttcaaagaaaagttctggtgggtcagcatgagaagggagatagccgaattcgtcgcactctgcgatgtttgtcagactaacgtgccatctctgggaggtaacacgctagctccagctggggacgagcgcctagaagccctcgtcctgacgggatggggcgaggcgtgcgtcagattgcctgtcgccacctaa

SEQ ID NO: 14379 - DNA, 2250 bp, Oryza sativa
  Clone ID: TFbOSC5418j.C1.o1.fg
atgtgggcacttcgtggttgtactggacgatggaatcccaagaagttggaggatatacctatagtacaagagtatcctgaggtgttcccagaagacctcactacaatgccaccgaagagagaaatcgagttccagattgatctggcacccggaactgctccaatctacaagaggccgtacagaatggcagctaatgagctagcaaaagtcaaaaagcaggttgacgaacagctgcagaaagggtacatccgaccgagtacttcaccttggggtgctccggttatctttgtggaaaagaaagacaagaccaagaggatgtgcgttgattatcgcgcccttaatgaggtcacaatcaagaacaaatatccgttgccaagaattgatgatctgtttgatcagcttaaaggagctaagatggtgaagacagggaatgatccccgtgcctccaatgacgctaggggcagcgaagagcagaccgatggagctcatatcagtggtgcatctgacagcagttcatctccaccgcccgagaacccaacggccaacgactggctccgtgcgattgagaagaagctgaaccttctgcaatgcaatgaccaagagaaggttgcttttgctacacatcagttgcaaggtcccgcttctgcttggtgggataactacgtggtgacccgtccagattcaacggaggttacttgggcagagttttgtcaaagcttcaggaaggcacaaattcctgaggggattatggcacaaaagaaaagagagttccgcgcactgcatcaagaaaccaggatagttacagagtacttgcatgagttcaaccgccttgcgcgctacgctcctaaggatgtgcgcaccgatgccgagaagcaggagaagtttttgtttggtctcgatgataaattgaccaaccagctgatctccggagtctatgatgactttgagaagctcgtggacaaggctatccgtcaggaagagcaacgcaacaaaatggaccgaaatagaaagctaggtgagccttccaccctgatcatccgtcagcaccatccttaccacccgagtaacttcaacaacgactacaacggtggcagtcacaacaacatcagatccgccagctatgtcagctcagtcagacagctcaagaaggagtctgcaggaaagccaagaccctgcttcaactgtggcaagcacggccactttgctggcaagtgtccgaagctaaagcgcgttggacctaggttcgtccaggcccgcgtcaatcatgcgtctgcagagaaagcacaggcatcaccagaggtcgtgctgggcacgtttccggtgaactcatatccagcaacagttctctttgattctggtgcctcgcattcttttatatccaagagatttgctggggcacatggattatcggtagtggaacttaaaatactgatgcaggttcatacccctggaaatgacatgaggacagcacactactgcccctcagtgactatagagatcaagaggtcacggtttctatccaacctcatccttctcgaatccaaagacctagatgtcattctcggaatggattggttgaccagacacaagggagtgatcgactgcgcaagtcgcactatcaccctaagcaacgacaaaggggagaagatcaccttccgttctccagtgtcacagaagtccgtagcgagtctgaatcaggctgttattgaggatcagacagaaatagcggaaaaaaatcccaagaagttggaggatatacctatagtacaagagtatcctgaggtgttcccagaaggcctcactacaatgccaccgaagagagaaatcgagttccagattgatctggcacccggaactgctccaatctacaagaggccgtacagaatggcagctaatgagctagcagaagtcaaaaagcaggttgacgaacagctgcagaaagggtacatccgaccgagtacttcaccttggggtgctccggttatctttgtggaaaagaaagacaagaccaagaggatgtgcgttgattatcgcgcccttaatgaggtcacaatcaagaacaaatatccgttgccaagaattgatgatctgtttgatcagctaaaaggagctaaggtgttttccaatatagacctgcgatcaggctatcatcagttgagaattcgggaagaggatattcccaagacagccttcgccactcggtcttgctctcttttcccccacaccagagttgaagtccttctcagttga

SEQ ID NO: 14380 - DNA, 2304 bp, Oryza sativa
  Clone ID: TFbOSC5447j.C1.o2.fg
atgtgggcacttcgtggttgtactggacgatggaatcccaagaagttggaggatatacctatagtacaagagtatcctgaggtgttcccagaagacctcactacaatgccaccgaagagagaaatcgagttccagattgatctggcacccggaactgctccaatctacaagaggccgtacagaatggcagctaatgagctagcaaaagtcaaaaagcaggttgacgaacagctgcagaaagggtacatccgaccgagtacttcaccttggggtgctccggttatctttgtggaaaagaaagacaagaccaagaggatgtgcgttgattatcgcgcccttaatgaggtcacaatcaagaacaaatatccgttgccaagaattgatgatctgtttgatcagctaaaaggagctaagatggtgaagacagggaatgatccccgtgcctccaatgacgctaggggcagcgaagagcagaccgatggagctcatatcagtggtgcatctgacagcagttcatctccaccgcccgagaacccaacggccaacgactggctccgtgcgattgagaagaagctgaaccttctgcaatgcaatgaccaagagaaggttgcttttgctacacatcagttgcaaggtcccgcttctgcttggtgggataactacgtggtgacccgtccagattcaacggaggttacttgggcagagttttgtcaaagcttcaggaaggcacaaattcctgaggggattatggcacaaaagaaaagagagttccgcgcactgcatcaagaaaccaggatagttacagagtacttgcatgagttcaaccgccttgcgcgctacgctcctaaggatgtgcgcaccgatgccgagaagcaggagaagtttttgtttggtctcgatgataaattgaccaaccagctgatctccggagtctatgatgactttgagaagctcgtggacaaggctatccgtcaggaagagcaacgcaacaaaatggaccgaaatagaaagctaggtgagccttccaccctgatcatccgtcagcaccatccttaccacccgagtaacttcaacaacgactacaacggtggcagtcacaacaacagtaagcagcataaccacaactcgacttcacccccattaatggcaccagctcagtcagatccgccagctatgtcagctcagtcagaacagctcaagaaggagtctgcaggaaagccaagaccctgcttcaactgtggcaagcacggccactttgctggcaagtgtccgaagctaaagcgcgttggacctaggttcgtccaggcccgcgtcaatcatgcgtctgcagagaaagcacaggcatcaccagaggtcgtgctgggcacgtttccggtgaactcatatccagcaacagttctctttgattctggtgcctcgcattcttttatatccaagagatttgctggggcacatggattatcggtagtggaacttaaaatactgatgcaggttcatacccctggaaatgacatgaggacagcacactactgcccctcagtgactatagagatcaagaggtcacggtttctatccaacctcatccttctcgaatccaaagacctagatgtcattctcggaatggattggttgaccagacacaagggagtgatcgactgcgcaagtcgcactatcaccctaagcaacgacaaaggggagaagatcaccttccgttctccagtgtcacagaagtccgtagcgagtctgaatcaggctgttattgaggatcagacagaaatagcggaaaaaaatcccaagaagttggaggatatacctatagtacaagagtatcctgaggtgttcccagaaggcctcactacaatgccaccgaagagagaaatcgagttccagattgatctggcacccggaactgctccaatctacaagaggccgtacagaatggcagctaatgagctagcagaagtcaaaaagcaggttgacgaacagctgcagaaagggtacatccgaccgagtacttcaccttggggtgctccggttatctttgtggaaaagaaagacaagaccaagaggatgtgcgttgattatcgcgcccttaatgaggtcacaatcaagaacaaatatccgttgccaagaattgatgatctgtttgatcagctaaaaggagctaaggtgttttccaatatagacctgcgatcaggctatcatcagttgagaattcgggaagaggatattcccaagacagccttcgccactcggtcttgctctcttttcccccacaccagagttgaagtccttctcagttga

SEQ ID NO: 14381 - DNA, 1008 bp, Oryza sativa
  Clone ID: TFbOSC900148j.C1.o3.fg
atggcagcttctcaaccgagtgttcatggtgaaaatcatgatgagcccgacagccctatcacacgggctgaggtgcagcaaatagggaataatcttcttcaagcgatggaacatttgctaaatgcacgccttccggctgctggaggtggagcggttcagccaccgtttggtgatcccaaggatgatattgtggatgcacaatcggcggatgttgctgattcagaactccatggcccgcctaatggtggaggtcgtggttttgtagctgctggagcacgaggaggagagaatgatttggagcagcagcatgcccgtccttgccgaggtgctgtccttggtaatggagaacatcatcgtggtcaccatgatcgtgatgactcggataatgttgctcggatgtttccatacaacactttgcaagatcttcttgaccaagctcagtgcacggaaagatccattcagcaagaatggcgtaattggttctctagtggccgctccaatgcagctccatggcgtcgcacacagcaagccaccacttttgttggcaatcattctcagggagcctctacacgagcctctccacctgctgctacagccaagccgcaaccatcttcggcatcatctccagctgcatgcacagagtctcgtcggcctactgctcccacaccaacatcttcatcgcgtagccgcgatattgtgtgtcacaaatgtcaaggtcatggccacattgctgctgagtgtcctagtaggaggaccatgcttgtaactgagacgggtgaatgggaatctgcaagtgagaccaaggatgatagtttacgtgaagacgagatggttaacaagcaagcggatagtgatgctattcaagtagataatggagacaataattgcttcatctctcgtcgagtgcttagtgtgcaagttgcaaaggaagacaatggtcagcgacacaatatttttcacactcgagctgcaacaacattgctagtttggagttggtggaaagattag

SEQ ID NO: 14382 - DNA, 4377 bp, Oryza sativa
  Clone ID: TFbOSC400150j.C1.o3.fg
atgccgaagatggtggtggaggtggccgaccggtacacggcgaggagggacgggcggccgaacaactccggcgaggcggacggagaggttcgcggcgacgttccggcgaaaccgagggcaggccggggtggagggcgatgcggcgtcgccgagggaggagacggcgacgtcggccgacgctctggcgcggcgaccggggcagccggaggagatgtcgacgaggaggaaggtgaggccggcgcgggcgacggcgttccggcgaaattcgggcgaggaggaggtgatgccggggaagaaggcgatgccgcggtgtcgaaggaggagacggcggcgtcgatcggcgcaccggcgatgaacagcagccggctggagggagtacagtggcaccaatgccactggttgccggcgggggcaccgttccggcgagtttccggcgaggagacgatgccgccccattcaccgagaaatttgatcaaggtgttaggattcgtcagggagctgaggttgatggcttttgaggtaggctatgaagttgctcctgagtatcgccggatttcccatgaccccaacgaggagaagtgtcgtgttcgtgtgacgttggctagtgatcgtgaagaccttccgtccattaagttcgaagctggaggaagatcgtacagccatgcttgtcaagaagcagctttggtggccattggagagttgcgtcaacgttttgaagaagagttggattcatcagctttctatgctatggatgcagtaagtgtggagcgagacaaagcagctcatgacagggaaaactggaatcgaggcaagatttgcaagttggagagcaagttagcttcgaagattcgcgtgatgggtgaagttgtgcccgatcgtgctgaacctgtcatcgacatcatggtgaacacgcgcaccggaagtggaagtggagctgctaacaatggaggagatcccacgctagctcagattctggcccaacaaacacaactgatcaatctgttagtgcagcaggcacagaatcagcaggcaaacaatcagaaccagaatccacccccacctccccaaaacaagctggcagatttcttacgtgtgagaccccctaccttttcaagcaccaccaatccagtagaagcaggagattggctgcatgcggtggagaagaagttggatttgatccagtgtactgagcaggagaaagtttcttttgcttcgcatcaattgcatggtcctgctgctgaatggtgggatcattttcgccaaggcagggctgaaggagagcctattacttggcaggaattcacggccgctttcaagaagacacacataccaacgggtgttgtagctctaaagaagagagaatttagagcactcaaccagggatctcgttcggtcaccgagtacctccacgatttcaaccgtttagctcgttatgctccggaagatattcgcaccgatgaagagcgtcaggagaagttcttagagggactaaatgatgagttgtcttatgccttgatgtctacggatttccgggatttccagcagctggtggacaaggcgattcgtcaggaagacaagtataaccggatggagcagaagaagcgcagggctgcccaattcaaggcacaacagggcagtaaccagaggccgcgtctcgttacgggacctcaagctccatcgtaccctcaaggaggatcttcatcagttgtccgcccccaacgccagttctacgacaacaatactggtaatcgtggcaatgacaaccgcaacatggttgctcgtcctgcagcaactccagctcagaaccagcccgtcaggaaggaacagggaagcaagccaggggtgtgcttcaattatggtgatccaggacattatgctgataagtgtcctaagcctcggcgcgtgaagaacgctccagccccgaacaactccaatgctccagcaccgaaggcacgtgttaatcatgttgcagcagcagaagctcagaatgcaccagatgtggttttggaaatagaagaagttcctttcccatcctcgcttatcttgctagaatccaaagatctagatgttatcttagggatggactggttatctcgtcacagaggagttatagattgtgctaaccgtaaggtgactttaaccagtagcaatggggaaaccgtttctttctttgtgtcctctcctaaatatcatggtgtgtttttaaaccaagttgctctacaagagatccccatagtacaagactacccagacgtgtttcccgaggatttgctaggtatgccacctaagagagacatagagtttcggatagacttggtacctggaaccaaccctatccataagagaccatacagaatggcagctaatgagttagctgaggtgaagagacaggtggatgatttgcttcagaaaggatacatcagacccagtacctcgccatggggagcaccagtcatctttgtggagaagaaagatcatactcagagaatgtgcgtggattatcgagcgttgaatgaggttactatcaagaataagtaccctctacccagaattgatgacctgtttgatcaactggaaggtgctacagttttctccaagatagatctccgttctggatatcatcaacttcgaatccgtgaggaagatataccaaagaccgccttcacaactcggtatggtttgttcgaatgtaccgttatgtcatttggactcactaatgccccagcctttttcatgaatctgatgaacaaggtgtttatggaatatctagataagtttgtcgtggtgtttattgatgacattcttatttactccaagacgaaagaagaacatgaagagcatcttcgtctagctttagagaaactacgtgagcatcagctttatgccaagttcagtaaatgtgaattttggttgtccgaagtgaagtttcttggtcatgtcatctcatctggaggagtggcagtagatccaagcaatgtggagtcagtgttaagttggaagcaacccaagacggttcaaaaatttcgtagtttcttggacttggcgggaagtgaagtccaagtggacagagattgtgaacaaagtttccaagaactgaagaaaaggctagtgactgcgccggtgttatttttgcctgattcgaggaaaagtttccaagtgtattgtgatgcatcccgactcggtttgggttgtgtgttgatgcaagaaggaaaggtggttgcctatgcatctaggcaattacgtcctcatgagaataactacccaacgcatgacctagagttggcagctgtggtgcatgcattgaagatttggcgtcattatcttttcggtaaccgtacagagatgtatacggatcataaaagtttgaagtacattttcactcaacctgatttgaacatgcgtcagcgaagatggttagagttgattaaagattatgatatggaaatccactatcacccagggaaagcaaatgttgtagccgatgctcttagcaggaaaagctactgtaatatgtcagaaggtcgacatttaccttgggagttatgccaagaatttgagaagttaaacttggatatagtcagcaaaggttttgtggctactttagaagctcaacctactctgtttgatcaagttagagaagctcaagtgaatgatcctgatatccaagaaataaaaaagaacatgagaagaggaaaagccatcggttatgtagtagatgagcaaggaactgtgtggttaggagaaagaatttgcgtcccagataataaggagttgaaggatactatcatgaaagaagctcatgaaactttgtattccattcaccctggaagcactaagatgtaccaagacctaaagcaacaattctggtgggccagtatgcgacgtgagatagcagaatatgtggctctatgtgatgtatgtcagcgggtcaaggcagaacatcagaagccagccggtctgttacaaccgttgaagattccagagtggaagtgggaagaaataggaatggattttataaccggtctacccagaacgtcggcaggacatgattctatttgggtagtagttgataggttgacaaaagtcgctcacttcataccggtcaaaacaacctacacggggaataagcttgcagagttatacatggccagagtggtatgtttgcatggcgttcctaagaagatagtgtcagatagaggtagccagtttacttcgaagttttggcagaaattacaagtagagatgggtacccgtttgaatttcagtaccgcttatcaccctcaaacagattgtcacgcccggaaattcactagtaatttccgaacttatttgtgcataaaatcctcgtctaggaatcagccgaggtacacaaactga

SEQ ID NO: 14383 - DNA, 462 bp, Oryza sativa
  Clone ID: TFbOSC405457j.C1.o1.gm
agcaagggaggggaacttcagggcgtgacaaatcgcatggagcggaagaaacgccggattgctcacttcaaggcacaacaggggaatagtcagaggccgcgtcttactttaggaccccagtccatgccacagggaggttcttcgtctgttgttcgtccgcagcgtcagttcttcaacaacaacgcgggcaacaacatccgcaatcaagctccacgccctgttgcagcttcgacacagcaacaacctgccaagaaggagcaaggcatcaagcccggggtgtgcttcaactatggagacccaggacattacgctgacaagtgtccgaagccccgacgcgtgaagattgtccctgcccagagcaactctaccgcaccagcatcaaaggcccgtgtcaatcatgttgctgctgcagaagctcaaggaatgattaatggcaacctctgggagacctggaacgcataa

SEQ ID NO: 14384 - DNA, 5604 bp, Oryza sativa
  Clone ID: TFbOSC102121j.C1.o13.fg
atggcgacgacgggaacggcgaccggagcggagagaggcggcggcacggctcgggtcgacggggacggcggcgttccggcggtcggcgaccgaaacggagaggtggacgaggtcggcgaggatgcggcgaagctgaaggaggcggtgccgaagcgggagatggtccggggcaacgacggcggcgaaccggagctcggcggcgacggcggagagagaggacgacgacgcgagctcgattccgacggggaaagagagcggcgagtggcggaaacggtggagagaggcacggggagtgtttatatagagccgggggcgagagagggtggccggggaagggaggaaaccggcgcgggagagaatgatttttatttcgggatgaatttatcaggacgtgacacacatggagtggactaccagggcaagccggtcccagagcaggagggtgacgatgcagagcccgtcgctgcttgggaggtcactgcagtgatcctctctggctcacctgagaggacttcgctggcagtcaccgcgggtggagattccttctccgccgcttgccagaacgccgctctcctcgccatcggcactctgcaccagcgctacccggacgagttgcagcactcgccctaccgctaccaccctcgccgcggaggagcccgcgactacgccaccttccgggatgctagctcggaggatgacgctaccatcatgcacctggcgcgcatggtggaggcgtacgacgcggcccgtatcgacttccaccagatggtgcgccgcgggatggtcgataacaacatgaagatcctggagctgcgtcaggagaatctgcagctgaagaaggatctggacgtgctggaggcgcagctctgtcagctcaaggtcgcccagggagaggtctgtcgtcccaagcgccgccgcgtctgccgcagccagaagatcaccgctcgcaagagtacctccaggcccgagcttgtttgtcagtccctggcgtggacctgcttcgtggagacccctcgtgccgagcccgcgcccgtggttcctcaggagggggaagcctccggcgtagggagcacggaggatgcgctgctgctcaccttccgtcctggcccgtcgcagcgagtcgtatggggcatggttatgccgatggtgacgaccaggagaagtgctaataccggtgatggccaccaacccgaaggcagcaacctcaacaaccatggcagcccacctccacctcctcctccgcctccaccaccaccaccagacaccaacgccatcctcacccaaatcctcgcccagcaagccaacatgatggctgctttcctccaccacatccaaaatccaccacagcataatgctccacctccaccaccacccccgcaacactctaagctcgccgagttccttcgcattcgcccgcctaccttctccagctccaataaccccgtggatgccttggattggttgcatgcagtggggaagaagttagacactgtgcagtgcaacgatgaggagaaagctacgcagcccgaggggcagcctatcacctgggcccgtttcaccgccgctttccggagaacccatgtgcctgccggagtcatggcccttaagaaaagggcattccgggagttgaagcaaggcaaccgctctgtgatggagtatttgcatgagtttaacaacctggcccggtacgccccggaggacgttcgggaagatgaggaaaagcaagagaagttcttggcgggaatggaccctgagctgtccgtacgtctgatctccggggattatccggatttccaacgtctggtggacaagagcatccgcttggaagccaagcacaaagaattggagtcgcacaagcgtcgcttggcgaatttccgcaaccaacagggggctaaccaaagggtccgctacaccaatccctatccagggggatcctcctcgcagcagcaacagcagcaacctccctccgcgccccgacctcaatttgtggtgcgcgtcccacagccgcagcaaccgcagggtcagcaagggacccgtgcaccccgtccccctgcgccagctgtgcagcctggtcaaggccacagagacgttcaaggtcagcagagtctgtgcttcaactgcttcgagcctgggcactttgcggataaatgcccaaagccgaggcgccagcaaggccaagcgccgccccgctccaacaacggtggtaaggacgtcattcggggtcgtgtgaaccacgtgactgccgaggatgtgctgacaactccagacgtcatcgttggtacgttcctcatccattccacccctgctaccattttgttcgactctggagcttcccactcgtttatatctgtgccattcgtggggagaaatcagttgggggtagaaaggcttaggaaccctatgctcatcaccacccctggaggggttatgacagcgaagtactatagccctgccgttcccatagaaattcagggaattccgtttccctcggatctgattcttctagacaccaagaacttggatgtgatccttgggatgaattggttggctcaattccaaggagtagtggattgtgcaagacgcactgtcactctgcaccgagggccggaacaaccggttgttttatttgcacccccaacctctgtcagtagttcagaacttcatcagataggactgttagaaatccccatcgtcagagagttcggagacgtgtttccggaagaactacccggtatgccgcccaagcgagagattgagttccggatagatcttgctccaggaacaactcctttgtacaaacggccctaccgtatggcagcaaatgaactggccgaaattaagaaacagttggaagagttgaaagaaaaggggtatatacgtccgagcacttccccctggggtgctcccgtaatttttgtggagaagaaagacaagacaaagaggatgtgtgtcgactacagagctctcaatgaagttactatcaaaaataagtaccctcttccccgaatcgatgatctgttcgatcagcttaaaggtgccacggtattctccaagattgatcttcgttccggatatcaccagttgcgcatccgtgaagaagatatcccgaagactgcattcaccacgcgatatggactgtatgaattcacggtgatgtcgttcggtctgactaatgctcctgctttcttcatgaacttgatgaacaaagtgttcatggaatacttggataagtttgttgtggtcttcatcgacgacattctggtgtactcgcaatcagaggaagaccatcagcaacatctccgtctggtgttgggaaagttgcgggaacatcaattgtatgccaagcttagcaagtgtgagttctggttgtccgaagtcaaattcttagggcacgtgatatctgctaaaggagttgctgtggaccccgaaacagtgaccgccgtcaccgattggaagcaacccaagacagtcactcaaattcgcagtttcttaggtttggcaggatactaccggaggttcatcgagaacttctccaaaatcgctcgacccatgacacagttgttgaagaaagaagagaaatttgtgtggagcccgcaatgcgagaaggcgttcaaaacactcaaagaaaagctggtttcctcgccagtgttaatcttgccggatactcgcaaagacttcctggtgtattgtgacgcttcgcgccaaggattggggtgcgtgctcatgcaggaaggtcatgtggtggcctatgcctcacgccagctacggcctcatgaaggcaactaccctacccatgatttggagttagccgcggtggttcatgctctaaaaatctggcggcactatctcattgggaatcgctgcgaaatatataccgatcataagagtttgaaatacatcttcacccagtcggatctgaatcttcggcagaggagatggttagaactcatcaaggattatgatgtgggaatccactatcaccctggtaaggccaacgtggtcgcagacgcgctgagtcgaaaaagccgttgcaacactcttggcgtccgtggcattccactggagcttaatcaacagttggaagccctgaacctaagcatcgttagccatggattcttagctacactggaagccaagcctaccttactcgatcaaatccgcgaggctcagaagaatgatctagatatgcatgggatcctcaagaatatgaaacagggtaaagccgctggtttcacagaggatgaacacggaactctatggaatggaaaccgggtatgcgttccagacgtcagggaacttaaacagttgatacttcaggaagctcacgaaagtccttattccatccaccctggcagtacgaagatgtacctggacttgaaagagaaatactggtgggttagtatgaagcgggagattgcggagttcgtagccctttgtgatgtgtgccagcgtgtcaaggcagagcaccaacgaccggccggacttctccaacctctccaagtaccagaatggaaatgggatgaaattgggatggattttatcactggacttccaaaaacccaaggtggatatgattctatatgggtagttgtggaccgactaaccaaagtagctcggtttattcctgtgaagaccacctatggagggaacaaactagctgaactctatttcgctaggatcgtaagtctgcatggcgtccccaagaaaatcgtatctgatcggggaagtcagttcatctctcacttttggaagaagctccaagaagagttgggtacccgattaaatttcagcaccgcgtatcacccgcagacagatggtcaaaccgagcgtctaaaccagatcctcgaggatatgcttcgcgcatgtgtcctagatttcgggaaaacatgggataatagtctcccctatgccgagttctcctacaataacagctaccaagccagcatacaaatggcaccctatgaagcgttgtatggacgcaaatgtcggacaccgctattgtgggaccaagttggggaaagccaagtgttcgggaccgatatcctgagagaagccgaagctaaggtcagaaccatttgggaaaacctaaaggtggcacagtctcggcagaagagttatgcagacaaccgacgccgtgacctggaattcgcagtggatgactttgtgtatctccgggtaacgccattgcgaggggtacacaggtttcagacgaaagggaagctcgcacctcggttcgtgggtcctttccgcatcactgctcgacgcggagaagtagcgtaccaattggagttgcctgcttccttgggcaacgtgcatgatgtgttccatgtgtcgcaactcaagaaatgtcttcgagtgccgtccgagcaggctgactcagagcagattgaagttcgcgaagacttgacctacgtggagagaccagtgaaaatcctagacaccatggagcgcaggaccaggaatcgggtaatccgtttttgcaaggtccaatggagcaaccatgccgaggaagaagctacttgggagcgtgaagacgagctgaaggcagcccatcccgatctcttcgccagttcttccgaatctcggggtcgagattccgtttaa

SEQ ID NO: 14385 - DNA, 5577 bp, Oryza sativa
  Clone ID: TFbOSC19731j.C1.o2.np
cggccgggccccacctggcagccgcggggcgcgcccgaaggcggcctcgccggcacggccgacgggaggcggcgcgcccgcgcccctatggtcgccggcggcggccataggcacggcggagcggcggccgagagaggggagggaagggggaaacgaaatgggcggtccatggctcaccccggatcgatggcgacgacgggaacggcgaccggagcggagagaggcggcggcgcggctcgggtcgacggggacggcggcgttccggcggtcggcgaccgaaacggagaggtggacgaggtcggcgaggatgcggcgaagccgaaggaggcggtgccgaagcgggagatggtccggggcaacgacggcggcgaaccggagctcggcggcgacggcggagagagaggacgacggcgcgagctcgattccgacggggaaagagagcggcgagtggcggaaacggtggagagaggcacggggagtgtttatatagagccgggggcgagagggatgaatttatcaggacgtgacacacatggagtggactaccagggcaagccggtcccagagcaggagggtgacgatgcagagcccgtcgctgcttgggaggtcactgcagtgatcctctctggctcacctgagaggacttcgctggcagtcaccgcgggtggagattccttctccgccgcttgccagaacgccgctctcctcgccatcggcactctgcaccagcgctacccggacgagttgcagcactcgccctaccgctaccaccctcgccgcggaggagcccgcgactacgccaccttccgggatgctagctcggaggatgacgctaccatcatgcacctggcgcgcatggtggaggcgtacgacgcggcccgtatcgacttccaccagatggtgcgccgcgggatggtcgataacaacatgaagatcctggagctgcgtcaggagaatctgcagctgaagaaggatctggacgtgctggaggcgcagctctgtcagctcaaggtcgcccagggagaggtctgtcgtcccaagcgccgccgcgtctgccgcagccagaagatcaccgctcgcaagagtacctccaggcccgagcttgtttgtcagtccctggcgtggacctgcttcgtggagacccctcgtgccgagcccgcgcccgtggttcctcaggagggggaagcctccggcgtagggagcacggaggatgcgctgctgctcaccttccgtcctggcccgtcgcagcggagaagtgctaataccggtgatggccaccaacccgaaggcagcaacctcaacaaccatggcagcccacctccacctcctcctccgcctccaccaccaccaccagacaccaacgccatcctcacccaaatcctcgcccagcaagccaacatgatggctgctttcctccaccacatccaaaatccaccacagcataatgctccacctccaccaccacccccgcaacactctaagctcgccgagttccttcgcattcgcccgcctaccttctccagctccaataaccccgtggatgccttggattggttgcatgcagtggggaagaagttagacactgtgcagtgcaacgatgaggagaaagtcatctttgccacccaccagctgcaggggcccgcatctctatggtgggaccacttctaggctacgcagcccgaggggcagcctatcacctgggcccgtttcaccgccgctttccggagaacccatgtgcctgccggagtcatggcccttaagaaaagggcattccgggagttgaagcaaggcaaccgctctgtgatggagtatttgcatgagtttaacaacctggcccggtacgccccggaggacgttcgggaagatgaggaaaagcaagagaagttcttggcgggaatggaccctgagctgtccgtacgtctgatctccggggattatccggatttccaacgtctggtggacaagagcatccgcttggaagccaagcacaaagaattggagtcgcacaagcgtcgcttggcgaatttccgcaaccaacagggggctaaccaaagggtccgctacaccaatccctatccagggggatcctcctcgcagcagcaacagcagcaacctccctccgcgccccgacctcaatttgtggtgcgcgtcccacagccgcagcaaccgcagggtcagcaagggacccgtgcaccccgtccccctgcgccagctgtgcagcctggtcaaggccacagagacgttcaaggtcagcagagtctgtgcttcaactgcttcgagcctgggcactttgcggataaatgcccaaagccgaggcgccagcaaggccaagcgccgccccgctccaacaacggtggtaaggacgtcattcggggtcgtgtgaaccacgtgactgccgaggatgtgctgacaactccagacgtcatcgttggtacgttcctcatccattccacccctgctaccattttgttcgactctggagcttcccactcgtttatatctgtgccattcgtggggagaaatcagttgggggtagaaaggcttaggaaccctatgctcatcaccacccctggaggggttatgacagcgaagtactatagccctgccgttcccatagaaattcagggaattccgtttccctcggatctgattcttctagacaccaagaacttggatgtgatccttgggatgaattggttggctcaattccaaggagtagtggattgtgcaagacgcactgtcactctgcaccgagggccggaacaaccggttgttttatttgcacccccaacctctgtcagtagttcagaacttcatcagataggactgttagaaatccccatcgtcagagagttcggagacgtgtttccggaagaactacccggtatgccgcccaagcgagagattgagttccggatagatcttgctccaggaacaactcctttgtacaaacggccctaccgtatggcagcaaatgaactggccgaaattaagaaacagttggaagagttgaaagaaaaggggtatatacgtccgagcacttccccctggggtgctcccgtaatttttgtggagaagaaagacaagacaaagaggatgtgtgtcgactacagagctctcaatgaagttactatcaaaaataagtaccctcttccccgaatcgatgatctgttcgatcagcttaaaggtgccacggtattctccaagattgatcttcgttccggatatcaccagttgcgcatccgtgaagaagatatcccgaagactgcattcaccacgcgatatggactgtatgaattcacggtgatgtcgttcggtctgactaatgctcctgctttcttcatgaacttgatgaacaaagtgttcatggaatacttggataagtttgttgtggtcttcatcgacgacattctggtgtactcgcaatcagaggaagaccatcagcaacatctccgtctggtgttgggaaagttgcgggaacatcaattgtatgccaagcttagcaagtgtgagttctggttgtccgaagtcaaattcttagggcacgtgatatctgctaaaggagttgctgtggaccccgaaacagtgaccgccgtcaccgattggaagcaacccaagacagtcactcaaattcgcagtttcttaggtttggcaggatactaccggaggttcatcgagaacttctccaaaatcgctcgacccatgacacagttgttgaagaaagaagagaaatttgtgtggagcccgcaatgcgagaaggcgttcaaaacactcaaagaaaagctggtttcctcgccagtgttaatcttgccggatactcgcaaagacttcctggtgtattgtgacgcttcgcgccaaggattggggtgcgtgctcatgcaggaaggtcatgtggtggcctatgcctcacgccagctacggcctcatgaaggcaactaccctacccatgatttggagttagccgcggtggttcatgctctaaaaatctggcggcactatctcattgggaatcgctgcgaaatatataccgatcataagagtttgaaatacatcttcacccagtcggatctgaatcttcggcagaggagatggttagaactcatcaaggattatgatgtgggaatccactatcaccctggtaaggccaacgtggtcgcagacgcgctgagtcgaaaaagccgttgcaacactcttggcgtccgtggcattccactggagcttaatcaacagttggaagccctgaacctaagcatcgttagccatggattcttagctacactggaagccaagcctaccttactcgatcaaatccgcgaggctcagaagaatgatctagatatgcatgggatcctcaagaatatgaaacagggtaaagccgctggtttcacagaggatgaacacggaactctatggaatggaaaccggcgtgtcaaggcagagcaccaacgaccggccggacttctccaacctctccaagtaccagaatggaaatgggatgaaattgggatggattttatcactggacttccaaaaacccaaggtggatatgattctatatgggtagttgtggaccgactaaccaaagtagctcggtttattcctgtgaagaccacctatggagggaacaaactagctgaactctatttcgctaggatcgtaagtctgcatggcgtccccaagaaaatcgtatctgatcggggaagtcagttcatctctcacttttggaagaagctccaagaagagttgggtacccgattaaatttcagcaccgcgtatcacccgcagacagatggtcaaaccgagcgtctaaaccagatcctcgaggatatgcttcgcgcatgtgtcctagatttcgggaaaacatgggataatagtctcccctatgccgagttctcctacaataacagctaccaagccagcatacaaatggcaccctatgaagcgttgtatggacgcaaatgtcggacaccgctattgtgggaccaagttggggaaagccaagtgttcgggaccgatatcctgagagaagccgaagctaaggtcagaaccatttgggaaaacctaaaggtggcacagtctcggcagaagagttatgcagacaaccgacgccgtgacctggaattcgcagtggatgactttgtgtatctccgggtaacgccattgcgaggggtacacaggtttcagacgaaagggaagctcgcacctcggttcgtgggtcctttccgcatcactgctcgacgcggagaagtagcgtaccaattggagttgcctgcttccttgggcaacgtgcatgatgtgttccatgtgtcgcaactcaagaaatgtcttcgagtgccgtccgagcaggctgactcagagcagattgaagttcgcgaagacttgacctacgtggagagaccagtgaaaatcctagacaccatggagcgcaggaccaggaatcgggtaatccgtttttgcaaggtccaatggagcaaccatgccgaggaagaagctacttgggagcgtgaagacgagctgaaggcagcccatcccgatctcttcgccagttcttccgaatctcggggtcgagattccgtt

SEQ ID NO: 14386 - DNA, 2715 bp, Oryza sativa
  Clone ID: TFbOSC29055j.C1.o1.gm
atggcccttaagaaaagggcattccgggagttgaagcaaggcaaccgctctgtgatggagtatttgcatgagtttaacaacctggcccggtacgccccggaggacgttcgggaagatgaggaaaagcaagagaagttcttggcgggaatggaccctgagctgtccgtacgtctgatctccggggattatccggatttccaacgtctggtggacaagagcatccgcttggaagccaagcacaaagaattggagtcgcacaagcgtcgcttggcgaatttccgcaaccaacagggggctaaccaaagggtccgctacaccaatccctatccagggggatcctcctcgcagcagcaacagcagcaacctccctccgcgccccgacctcaatttgtggtgcgcgtcccacagccgcagcaaccgcagggtcagcaagggacccgtgcaccccgtccccctgcgccagctgtgcatcctggtcaaggccacagagacgttcaaggtcagcagagtctgtgcttcaactgcttcgagcctgggcactttgcggataaatgcccaaagccgaggcgccagcaaggccaagcgccgccccgctccaacaacggtggtaaggacgtcattcggggtcgtgtgaaccacgtgactgccgaggatgtgctgacaactccagacgtcatcgttggtacgttcctcatccattccacccctgctaccattttgttcgactctggagcttcccactcgtttatatctgtgccattcgtggggagaaatcagttgggggtagaaaggcttaggaaccctatgctcatcaccacccctggaggggttatgacagcgaagtactatagccctgccgttcccatagaaattcagggaattccgtttccctcggatctgattcttctagacaccaagaacttggatgtgatccttgggatgaattggttggctcaattccaaggagtagtggattgtgcaagacgcactgtcactctgcaccgagggccggaacaaccggttgttttatttgcacccccaacctctgtcagtagttcagaacttcatcagataggactgttagaaatccccatcgtcagagagttcggagacgtgtttccggaagaactacccggtatgccgcccaagcgagagattgagttccggatagatcttgctccaggaacaactcctttgtacaaacggccctaccgtatggcagcaaatgaactggccgaaattaagaaacagttggaagagttgaaagaaaaggggtatatacgtccgagcacttccccctggggtgctcccgtaatttttgtggagaagaaagacaagacaaagaggatgtgtgtcgactacagagctctcaatgaagttactatcaaaaataagtaccctcttccccgaatcgatgatctgttcgatcagcttaaaggtgccacggtattctccaagattgatcttcgttccggatatcaccagttgcgcatccgtgaagaagatatcccgaagactgcattcaccacgcgatatggactgtatgaattcacggtgatgtcgttcggtctgactaatgctcctgctttcttcatgaacttgatgaacaaagtgttcatggaatacttggataagtttgttgtggtcttcatcgacgacattctggtgtactcgcaatcagaggaagaccatcagcaacatctccgtctggtgttgggaaagttgcgggaacatcaattgtatgccaagcttagcaagtgtgagttctggttgtccgaagtcaaattcttagggcacgtgatatctgctaaaggagttgctgtggaccccgaaacagtgaccgccgtccccgattggaagcaacccaagacagtcactcaaattcgcagtttcttaggtttggcaggatactaccggaggttcatcgagaacttctccaaaatcgctcgacccatgacacagttgttgaagaaagaagagaaatttgtgtggagcccgcaatgcgagaaggcgttcaaaacactcaaagaaaagctggaaggtcatgtggtggcctatgcctcacgccagctacggcctcatgaaggcaactaccctacccatgatttggagttagccgcggtggttcatgctctaaaaatctggcggcactatctcattgggaatcgctgcgaaatatataccgatcataagagtttgaaatacatcttcacccagtcggatctgaatcttcggcagaggagatggttagaactcatcaaggattatgatgtgggaatccactatcaccctggtaaggccaacgtggtcgcagacgcgctgagtcgaaaaagccgttgcaacactcttggcgtccgtggcattccactggagcttaatcaacagttggaagccctgaacctaagcatcgttagccatggattcttagctacactggaagccaagcctaccttactcgatcaaatccgcgaggctcagaagaatgatctagatatgcatgggatcctcaagaatatgaaacagggtaaagccgctggtttcacagaggatgaacacggaactctatggaatggaaaccggccctttgtgatgtgtgccagcgtgtcaaggcagagcaccaacgaccggccggacttctccaacctctccaagtaccagaatggaaatgggatgaaattgggatggattttatcactggacttccaaaaacccaag

SEQ ID NO: 14387 - DNA, 1386 bp, Oryza sativa
  Clone ID: TFbOSC400193j.C1.o3.fg
atggcacgtcgctccacccgtcagatccgtgcccctaaccgctttggttttgaggaagagccagtccagccagaaattcccgatcaaccagttaaccaggcagatgagcaagaagctgagagtgatcatatggctgtttccggatcagttaatgatgtctcaagaggtaaccgacccccgccagtggactttcaccaacacatggccatgcaaacacatataatacaaggaatggttcagaatataattgctatgcaacaacaacacacacaagagcgtcaaccccatatggttcaagatgatggccaatcgaaactgaatgatttcttgggatctcgtccaccggagttctcccaaacaaatgagcctattgaagctgatgattggattaaagatatggaaaggaaattaaatctggtacagtgtactccgcaagagaaaaccctttacgccgcacatcagttaagaggacctgccgcagattggtgggataactactgtgctacccatacagatgctagtaccatcgtctggacagagtttgcaggagcctttcgctcagcacacatccctgaaagcataattgatttgaagaaggaagaatttgcaaatatcaagcaaggatcctcttgcatcaacgagtatttgagtcgcttcaatagattggcccgatatgccccagaagatgtagacactgataaaaagaagatcagaaaatttttaaaaggaatggacgcgaaactgcaagtgaaacttttggctcacgactttccgacgtttcagcaaatggtcgataagtccttgttactagaagatgcagaagaagagatgcaggaatacaagagacgcaaagtaatgtccctagagattcaagcaaaagaaggtttgtgtcgaaaaacaaacttgccagcacaatactatcagagagcatctcagcattcaaatggttccggttctacgtctcgttcgactatgtcagaacctggtcagcaagccacaatgatcaacagtaatagccatgaaggaagcaactccgtaccatgccctacaccttcaaaaagacgtggttataaggcaggagtcgaatgtttcatctgccatgagatgggacactattcgtgggattgccctcagaaagccaagataaagtgccttcacaaagtcaagacaaagccagtccaaccaacgacaattcttcccaacatacctggatcaaaaggctcgaagtcaccaaacagtggttctgcctcattgacctcactgcccgttggacaaggtcgtctgaaccatgtgcaagtagaaacaaatgaaaaggttgtgaatctcgagcaagttgaaggagcaggagaagaacaggttccacaggcaagagcaaagccacagtaa

SEQ ID NO: 14388 - DNA, 1134 bp, Oryza sativa
  Clone ID: TFbOSC400601j.C1.o74.fg
atgccgcttagttcacagctaccattggttggaagtcaagaccaaaatcagtatgtgtttgatcgagcatttgccacccaggtcgataagcttccaatgccagaagaggatgtccccttttgtcacgattgtagagaacgaggacactgtgccctgaattgtccatgggtatatgccaaagaagccccttcctttggtttagcagggcagacatcgctaaaccagcctcctcacaccaagtcaagcttgcagcctagtgtgcaaagtagagagcccaatggagagaatccatggaatcccgggaaatgctttcctcctagcctttcgtaccacgtggggtcacgtactaagcaagccaaacgcaagaagagtaagaatcagaagagaaaagcgccgatgcgaactgaagaagaagtatgtaagatgactattaccagcaccgaatggcctccagcagggataactattcctagacgtcaaagaggaaataccttccgaggtgcacgacagttgacccagcacctcctaagccatggtggcagagtgtctgatagtgaagggtcagatcaagtctcctcggatgatgaagatgagtctccccgacatctcggcgaggaagagatggaatcaaaggcatgcacccgttgtggagaaattggacacattgctagcatgtgtctcacactctgctcttattgtgaagaagaccatccaccaggggagtgtcccacccgcaaggtgacatgttttctgtgcgaaggaacaaaccatgtgcccaaggattgccaactcagtgtgttgttgaccaagaccgcagaaatccaacgaacaaccctacgattgtctcatcagctagtcagctccaacagcaacatcgacgatatcatccacagcaccaatgctcctcccgctgcacctgactctgcaataaatcatagtaataataccttcagcaccaaccattctctgcaccgacagcctcagcaaagatttgtcatcgatagaagaagttgtgtctctccccgacctactccaggccgagcaaagggcaatcaacctcaggaggacgataccaagcagaagaccgttatccgcttcaaccagcaatcagaaggaagcttcccctgtgaatga

SEQ ID NO: 14389 - DNA, 1629 bp, Oryza sativa
  Clone ID: TFbOSC401916j.C1.o3.fg
atgaggtatccctgggtcggcttgggaaaggctttgtcgcgaacctctgacaccggccagtgtttggactggactctgggagtccgagaaaatgaaaaaggctctgggagccgattaatcaagtggaatggctctgggaagccgagaagtaatgatctgacccgggagaccgttggttccgctgctgctgttgttgttggtgttcgcctcgtccgtgtcgtcggttgtattctcgggctgtctgagttgcaacctaagttaagtcagatctcagccgctttgaagcagatggctcgtcgttctacccgtcagacccttgctcccaatcgctttggtgttgaagaagagctagttcagtcagaaattcccgatcaaccagttaaccagacagatgagcaagaagctgagagtgatcatatggctgcttccggatcagttaatgatgtctcaagaggtaaccgacccccaccagtggaccttcaccaactcatggccatgcagacccatatattacaaggagtgattcagaatataattgctatgcaacaacaacacactcaagagtgtcaaccccatatggttcaagataatggccgctcaaaattgaatgatttcttgagatctcgcccaccggagttctctcaaacaactgagcctattgaagctgacgattggatcaaagatgtggaaaggagattaaatctgttgagaggacctgccgcagattggtgggataactactgtgctacccatacagatgctagtaccatcgtctggacagagtttgcaggagcctttcgctcagcacacatccctgaaagcataattgatttgaagaaggaagaatttgcaaatatcaagcaaggatcctcttgcatcaacgagtatttgagtcgcttcaatagattggcccgatatgccccagaagatgtagacactgataaaaagaagatcagaagatttttaaaaggaatggatgcgaaactgcgagtgaaacttttggctcacgactttccgacgtttcagcaaatggtcgataagtccttgttactagaagatgcagaacaagagatgcaagaatacaagagacgcaaagtaatgtccctagagattcaagcaaaagaaggtttgtgtcgaaaaacaaactcgccagcacaatactatcagaaagcatctcagcattcaaatggttccggttctacgtctcgttcgactatgtcagaacctggtcagcaagccacaatgatcaatagtaatagccatgaaggaagcaactccgtaccatgccctacaccttcaaaaagacgtggtcataaggcaggagtcgaatgtttcatctgccatgagatgggacactattcgtgggattgccctcagaaagccaagataaagtgccttcacaaagtcaagacaaagccagttcaaccaacgacaatccttcccaacatacctggatcaaaaggttcgaagtcaccaaacagtggatctgtcctgctaacctcaccgcccgttggacaaggtcgtctgaaccatgtgcaagtagaaacaaatggaaaagttgtgaatctcgagcaagttgaaggagcaggagaagaacaggtttcacaggcaagagcagagccacagtaa

SEQ ID NO: 14390 - DNA, 4440 bp, Oryza sativa
  Clone ID: TFbOSC20908j.C1.o1.fg
atggcgacgcgattacgaccgaagatgacggcggcggcggcggctcggaagcggtccacggcggcggcggctgctcggatgcggtccgtggcggcggcggcggctcggatacggcccacggcggcggcggctgttcggatgcggtccatggcggcggtggcggcggctcggttgcggcccacggcggcggcggctgctcggatgcggtccgtggcggcggcggcggctcggatgcggcccacgacggcggcggctgctcggatgcggcccgtggcggcggcggctgctcggatgcggcccaaggtggcggcggcggctcgaatgcggcccgcggcggtggtggctgctctgatgctgcccacggctgcgctgttgctgtctctggcggcgatgactgcgctgttgtggcctacgtcagcatcggtggcccaaggtctgtggggcgcggtggagccggagggcgatgatctcgtcgactaccggcaggaccggcaggcgctcgccgcgatacttcgcgccgtgcccgccgagatgctcgccacgctcgctgtcaaggagacggcgcaggaggcgtgggaagcgatcaagactcgccgtatcggtgtgcagtgcgtgcgtgaggcgaatgcacagcagctgcgccgagaattcggtgatatcctcttcgaggacggtgaaaccgtcgacaacttctcgatgcggatcggcggcctcgccaacaaccttcgcaccttaggtgataatatcactgaagctgaggtcgttcagaaattgttgcaggttgtcccagaacatctccagcaaatagccatctcgattgagaccttgctcgacgtcaatgagctgtctctcgaggaggttactgggcgtctgcgctccgtcgagcaacgcaagcagcgcaagactgcggcggcatcgagtcgggtcgacgccaatggccgtctcctcttcaccgaggaagaatggctggcgaaattccgcaaggcggcctctctgcaagacgccgctcactcctccggcagcaacggcgaccgccggggtcgagggcatgggaagaaggacgatggagccccgaaggaggcccagcccaagccagccaacccgggaggccgtaacccgggaaattgcaagaattgcggcaagaggggacattgggccaaagactatcgcagcgagcccaaggcccagcaagcttacgtagcccaggaggaggacgaagagcctgctctgctcctggccaagctagacgacggtggcgaacatgatccggcgatgtggatcctggatactagcgcaaccaaccatatgaccgggtcccgctccgctttcgccgagctcgacacggcggtcaccggcactgttaggtttggcgacggctcggtggttcgcatcgagggccgcggcaccgtcctgttctcctgcaggttcggggaacaccgcggcatcgccggggtctactacatcccgcggctcacggcgaacatcgtcagccttggacagctggatcgttccggcagcaaggtactgattcatcacggtgtcctgcgcgtgtgggatcctcgagggcacctactcgtccgtctccgatgctccgacgactgcctctacaccatcaagctggacatcgaccgtccggtctgcctcgcggcaaggagcgccgagccggcgtggcggtggcacgccaggtacggccacctcaactttcctgctctccgcaagctcgtgcaacaggaaatggttcgtgggctgccgctgctgcaacaagtcactcaagtctgcgatggctgtttgctcgggaagcagcggcgagcggcgttcccgacgcaatccaagtaccgcgctgacgaacacctggagctcgtccacggcgatctctgtgggccgatcgaacctgcaacgccggctggtaatcggtattttttgttgcttgtcgatgacatgagccgctatatgtggctaaccttgatcaggagcaaggatgaggccgcgaacgccatgaagcattttcaggcccgtgcagaggtggagtccgggcgcaaactccgtgcactacgcacggatcgtggcggcgaattcacctcaatcgaatttggggaatactgcgccaatctcggagttggtcggcagttgacggcgccctactccccgcagcagaacggagtagtggagcgtcgaaaccaaaccatcgtcaccactgcccgcagcatgatgaaggcgaagggtgttcctgggcggttctggggagaggccatgtctacagcgacgccctatgaagcatggtatggccaacagcccgctgtgcatttcctgcgcactttcgggtgcgtggggcacgtcaagatcaccaagcccgggctgaagaaactcgatgaccggagtgcgccaatggtgctcctcggctacgagcaaggctcgaaggcctaccggctctatgatccagtcagcgagcgcgtccatgtgtccagggacgtggtgtttgatgaagacgccgcctgggactggggaccagtgacgcccgatggtgctccccagctcgagccgttcaccgtcgaacaggtggtgacgaccaccatcgggacggcacctgcttcttcgcttactccgccctcgccaccatcgccggctccgtcagcccccacgacgccggcacctccgtcgcctccgtcgccggaggcggttgagtttgtcacgccgcctacccaggattccatcctggacgccgacacagatgacgacgtcgtgcctcgctaccgcctggtggataacctgctggggaatgcctcaccgcccggacacgctccgcgggtgctggaacagctcgagctccatgttgtgagcgccgacgaacctgcttcactggctgaggctgaggcggatccaaactggcgtggcgccatgcaagacgagcttaacgcgatcgtcgacaacgacacttggtcgctcactgacctaccccatggccactgtgcaattgggctaaaatgggtctacaagctgaaacgtgatgaacagggggcgatcgtgcgctacaaggcgtgcctcgtcgctaagcgcagctccgagcatggtgtgtacacacgcaccaggggaggaagacgactgacggtgggcgtctacgtcgatgacctcatcatcaccggcgaacacgacgacgagatccgcagcttcaagggagagatgatgaagctcttcaagatgagtgatttgggggcactcagatactacctcggcatcgaggttacccaggatagtgatgggatcacgctggggcaagccgcatatgccggcaagattcttgagaaggcaggactcaacgactgcaatccctgtcagactcccatggaggtacgtttgaaattgagaaagggttcaaattttccacttgtggatgctacactgtatcgcagcttggttgggagtctgcgctatctcgtcaacacgcgacccgacctggcattctctgttgggtatgtcagtcgcttcatggagtcacccagggaagatcatctcgctgccgttcggcgcatactgcgctatgtggcaggcactcgctgctggggaattcgatttggcccaggtgcacggtgcgctttgccaatgctggttggttactctgacagtgatctggctggcgatccagatgagcgaaagagcacgtccggccagattttcttcatcaatggcgggcctgtcacttggcagtcctccaagcagaaggtggtggcattgtcctcctgtgaggccgagtacatcgccgcagccgccgcaacatgtcaaggagtatggctcgcgcggctgttagcggaggtgctgggcgacgagatcaccgcaccgctgctgaaggtggacaaccagtccacaatatcattgataaaaaatccagtgcatcatgaccggagtaagcatatcgatgtcaaatatcattatatccgggagtgtgcagaaaagaaactgatcgaaatgatgttcgtgggaactgcggagcagctcggtgatatattcaccaaatctctgggcagaaccagggtggctggatctgggacccttctttctctttgtctccgggcagtggcatccacgctgggtgtgccattcgggttgagttcaagctcctcagattcaatggtgaactccgtgtttctgtggaggcgaccgacggggattaacggttcgtcaagcggtctgcatgctaaaggagacctaagacttacagaagaagacggagcaaactcactccacacggcggttcaaggttcagaaacccataaaagaacatggaattgcaatgcaagagtgaagaagaggttttatccatcgagtcctcaccattgtgaatttgtgatcatcgacaacagtaacagggtcttggcttggggactggggaagaaggcagcagccagcatgatgattcgtgagatctgcatggaagagctggtttag

SEQ ID NO: 14391 - DNA, 498 bp, Oryza sativa
  Clone ID: TFbOSC33100j.C1.o2.gm
atgtgccagatgccacatcatctctcttttctcccttcctctctctctcattggattggccgggccggtggattgacgccgccaccgcacaccgccgcggaggcggatgcggacgtcaccagctcgtcgcaccacggggagggcctcctcgatgaccatcggcggaatcaccctaaactcgtcggcggagctggagcgcggacgacgacgtcgacgacgacttccaggctgccgccgagccaccgacaagcgagcgagcgagacacggcggaagagcgcgagggggagacggcggtccgtgggaggaggacacgcattccggtggccgggctgctcgagcacttcaagctcatcggctgcttcgacgacggcagcgtggagttcatgaccgtcgctgcacgtggcatggcgccgagatcgtcaccgtcgggcgtcggctggtacagcggcaaggaccagagaaagctcctcctctactgctacttccgcaccggctaa

SEQ ID NO: 14392 - DNA, 3958 bp, Oryza sativa
  Clone ID: TFbOSC414410j.C1.o1.np
atggctgattttgccgatgcactgaggccggataaattcaccggtgtgcactttaagagatggcagatcatggtcactttgtggctgacagctatgaaatgcttctgggtgagtattggcaaacctgaaggagttcttactgctgaacagcaaaagcaattcgaggaagccactactctctttgtgggatgcattcttagcgttcttggcgatcgtctggtcgaggtgtatatgcatatgaccgacgctaagaagttgtgggatgcactgaatactaaattcggtgctactgatgctagcaatgatctgtatatcatggagcaattcatgactacaagatggctgacaaccgttctatagtcgaaaaggctcatgagatacaaacaatggctaaggaactcgaactccttaagtgtgtcttacccgacaaatttgtggccgggtgcattattgcgaaacttcctccatcttggagaagttttggtactgcactcaaacacaagagacaggaatactctgttgaggggttgatagcatctcttgatgttgaggagaaagctcaggaaaaagatgctgcgtataagggcgatggtgggcagtccaatgccaatgttgtgcacaaggcccagcacaagagcaaggggaaatacaaagctcagcagaccaccaacttcaagaagcagaagaagaacaacaacaatcctaatcaggatgagaggatttgatttgtgtgtggccaacctggtcatctagctaggaagtgtccacagcgcaaggggatgaaggcacctgcagggcaaacttctaagtctgctaatgtgaccattggcaacactggagatggaagggggtatggtaatttatctactgttttttcagttaatcagtctactaattggtgggttgatactggggccaatgtacatgtttgtgctgacatctcattgttttcttcttatcaggtcgcacggggttccaccgtcctaatggggaatgggtcacatgcttctgttcatggtgttggcacggtagatctaaagtttacttcgggaaagatcgtgcaactgaagaacgtgcagcatgtcccttctatcgacaggaatcttgttagtggctcccgtctgactagagacggatttaagttggtttttgagtctaataaagtagccgtgtctaaacatggatattttattggtaaaggttatgagtgcggaggcctgttccgttttttcctttctgatttctgcaataagtctgtgacccatatttgtggtagtgtggatgatgaggctaatgtctggcactcacgtttatgtcatattaattttggcttgatgtctcggctttccagcatgtgtttaattcctaagttttccattgtcaaaggttatacgcgccatagttgtgtgcaatcaaagcaacctcgcaagcctcacaaggctgctgaggagagaaacttggcacctctagaactcctacattcagatatttgtgaaatgaatggggtgttgacgaagggtggaaaacgatatttcatgacgttgattgatgatgctactagattttgctatgtgtacttgttgaaaacgaaagacgaggctgtagactattttaaaatttataaggcagaagttgaaaatcaacttgacagaaagataaaaagacttaggtctgatcgtggtggagagtttttctcaaacgagtttgacttattctgtgaggaatatgggattatacatgagaggacgcctccctattctcccgagtctaatgggattgccgaaaggaagaaccgcacactgactgacttggtgaatgccatgttggacaccgcgggactacctaaggcatggtggggggaggcattgttgacctcgaatcatgtgttaaacagagttctaacagaaataaggacaaaacaccatatgagatatggattgggagaaaaccatcactttcttacttgtgcacatgggggtgcttggcgaaagtcaatgtaccaataacgaagaaacacaaacttggacctaagactgtggactatatctttctgggatatgctcaccacagcattgcctatagatttttaatagttaaatccgaggtacctgacatgcatgttggtacaattatggagtctcgtgatgctaccttctttgagagctttttcccaatgaaggatacacatagtagttctagtcaaccttctgaaataattcccagttcaatcacaccaccagaacaaactgaatatacacatgaacatgtcactgaggaggatgacagtgaagctcctcgaaggagtaaaagacaaaggacggctaagttctttggtgatgatttcactgtgtacctcgcggacgacactcctaagtcaatttcagaagcatatgcatctcctgatgcagactactagaaggaggctgtccgtagtgaaatggattccattatcactaacggaacttgggaggtgacagagcgcccctatgggtgtaaacctgtggggtgcaagtgggtgttcaaaaagaagctgaggcctgacggtaccattgaaaagtacaaggcttggcttgttgctaagggctatactcagaaagaaggcgaagatttctttgacacttactcacctgttgccagattgaccacaattcgtgtgctactttccctagcagcctcacatggtcttctcgttcatcaaatgaacgttaagacagcttttcttaatggagagctggatgaggagatctatatggatcaacctgatgggtttgtagttgaaggtcaagaagacaaggtgtgcaaattgttgaagtctttgtatggtctgaaacaagctcctaagcaatggcatgagaaatttgatagaacattgacatctgcaggcttcgcagtcaatgaggcagataaatgtgtatactatcgccatggtggaggtgagggagttattctgtgcttatatgttgatgacatactgatatttaggacaaatcttgaggtgataaatgaggttaaatcattcttgtctcaaaaatttgataggaaggatttgggagtagctgatgttatcctaaacatcaagctaattagaggtgagaataagattacactcttgcagtcccattatgtggagaagatcttgaatcgctttggctacattgatagtaagccttctccaacgtcttatgatcctagcttgttgcttcgcaagaacaagagaattgctaggaatcaactggaatactcccaaatcattggctcgctgatgtacctggctagtgcaactaggcctgatatctcctttgctgtgagcaagttgagccggtttacctctaatccaggagatgatcactggcatgcgcttgagcgagtaatgcgctatctgaaaggtactatggaattggggcttcactattttgggtaccctgcggtactggaaggatatagtgattctaactggatctctgatgtggatgatatcaaagccactagtggatatgtcttcacactaggtggtggtgttgtttcgtggaggtcttgcaaacagaccattttgatgaggtcaaccatggaagcagagttgacggcactggatactgctactgttgaggcagaatggctgcgtgatctattaatggatctacctattgttgaaaaaccggtgccggctatctttatgaactgtgacaatcaaacgacatgtgaaaagacgattgaagtctgtcaagaagttgagaaactccggagttataacgttggattacatccaaacaactagaaacctggcagatcccttcacgaagggactatcacgaaatgtgatagacaatgcatcgaaggagatgggtttgagacccatagcattcttgaaagaactcacctttgtgagcttgactgttggtcgcagtctatgaagattttgagtgaatcttctaggaagcttactaaagacctaggagta

SEQ ID NO: 14393 - DNA, 8226 bp, Oryza sativa
  Clone ID: TFbOSC900086j.C1.o19.fg
atggcgctatggaatggcttgggtcaggtggccaacattgcgcagcttgccggggtagatgcatatgggctcatcaagatgatcgtggaggctgcgcagacagctaaaaggaaccgggagacctgccagaagctagcacggcatgtgaagatgatcggcgacctgctgcagcgactccaaagcacagagcttatgcagcatcaagaaacgaggaacccggtggagcagctggaggagacgctccgacacacctacatgctcatcttgtcctgtcaggacagcagctacctgcacagctgcttcatgggagggaagcaggctcaccagctgcgcgaggtgcagagtgatatcaccttctacctccagctcttccctcttgtcagcttcgttgacacgacccgtacctgggagcggcttctgagaagagctcaaccttcttgcactgaggatactgcagatgagttacaaaaagtacatcattcagatcatagaattaggaaccatgtacaggactatgcacacaaatacattaagctgattgagttacattggcaatttatattcagattcaacacagaaattctcaacgcgactgaatttggtgatcagagtgtaactcaatgtccagaagtttttgaggaaaaacgaagtgaacaagcatcaatcagaagcctgaacctggatcaactagttgttaatgatattggaaaaggagcagtgttgactttttcacagatattggctgctacaaacaatttttcagggagatccttaattggacaaggtggatttgggcctgtttacaagggaaaacttcccaatggacttgagattgctgtcaaaaggcatgatacttcttcacatcaaggtgaagaagagttcatggctgagattgacgtcataccaaaacttcgacgaaaaaatataattgagctgattgggttttgtgttcaaggcaaagaatatgaaacaaaaaggatattgctaaattggtctaagcgccttaaaataattgaaggaatctcagatggtcttctttacctacacaaccattctcccaagtgcattgtccatagggacataaaagcaagtaatatcctcttagattatgaaatgaatgctaagatttctgattttggtctggccataaaattagctccgaaagcaactacagaggtgcttgttcgtggcacatggggttatgccgatcctgaatatgttgctactggagtaatctcggagaaaaccgacgtttatagctttggcattgtactgcttgagataataagtggaaagttggaaacgtggcgcggtgggatgagagggcgaggcgagaggggcgacctggctggcgacgggccgaccaccgcggctgtcacctccggcggccgctccagtgccctcaccattgacttgccgcctctcctcccttctccggcaggtatctccaagctgcgcctcccttctccagcccgggctcttaacctctctcaagttcgaccaggtgaagctttccaaaacctcatccttcatctcttccactgccctgttacccctatcgccactacccttggcccgtcaaaaatcatcccaactcctatttggctttgcgctgctccctctaagccgctcaactcgctctatgtcaaaaatgctcttaatttctggttcagttcttcgttttcgtctttctctgtttcttctttgggttttggtttgtttctttctcatgttgcgaacaaagatgtggctacctcgttgtttcttgcgggttcgtctgttcttaagtctgctggtttgtccatccatttgaccaaagattcagctgcaaaggatattcaagaaaatgttacccggttcttggttcagtttgaaggcagttcgtccgttccctctctggtgggtgaaaaagttgttcccgcgcttcaaacagttaagccagcctttactgcaacgtcacgtcatattggatgctcccaacaatccagcaagacctctaccccctctgtgccgacaggccctgcattgaagtctgtttactgccctgtaacaaactccttcagagacgctctcctctcacagccaaaacctaaaccccccgctcgctcagccacttctcgccttcctagcaggggcagaaaaaacctcaccatgctcaaccgatgctttcgctgccttggttctgatcatcaggtcaaagattgccgggatcccttgatttgcgcatcctgccgtcgagcaggtcacaggcaagattcttgccggtcatctatggcttccaacatctcccctcgccgctcatcttcctccttccacccatccacagcaaactccacctcccgcttcactacccgctgggtcaggcgtgctctaaacactccagccccacctccgcctcgcttacctactgccccataccctcgatccaaccacagctccccccctccagataacctagccattgttccttatgttcctcctctgactcatgtggatgcgcagctggaagatgtgattgccatgttggagagcagtctttgttcctctccggtcagatctgttactgctggacctctggtccccatggaggttagtgagaatgcggtcacttcttctgttgcttctcctttaccggacgtaagaaatgccctagtctgtgtgcaagatagttcaatctcagtggctgccttagttccagttcttgcatgtgctgttaatgatctagagactgtctcaactgaagtggtacctgcgactgtttccttggtgtctgttatgcctacaagagctgctgcggttgctgaagttgctcatgctactgttgagtccgttgttgttccgtcctctgtcagcgaagatctctcgccagcggtcaaccttagcagtatgccacctcgtctcagatgcaagaataaaggtttcctcgcttggtacggcgcctgtccatcttcgaggcagccaagctcggtccccccacaggaacctagggatatcttcgtctgttcggaacagttgtctgccaacccaattctgtctccacctcaggatcctgatagcacgagatcgccacctccgacattgagtggcccctcagctgctgagcaaatcagaagagctctagcaggtctaagtccagaaggatctattcactctgcttcactctctccaggtcgggtgccagtcattacttccaatgacactactgctgcgcaggactttgcttttggggaaccagatccagttaacatatcaggagacagtgacgatgatattcttgatatctttatcccctttgttgacatgagagtaactgctcattacgccactgcttatgttacccctccatgtgaatgccctggcagagtaattcgaaaagcaatgcaggatgctcaccctcgttttcagttcactctcatctcagcttgtagaggtgcaatgactctaagatttattcacagtcaggacagagactttgcagttgatcaccaggagaatcttacagctgaaggccacttggttaggcttgaacggcctgaggacagtgcggctcgcttcattcaacacaacactatgctgtccgaactagactgtattgacttcccgccagagatgttgttccctaacaagataagaaatgcttttgaaaattacggcgagctgatggaagtagatgatcaatgcctctatggggacgaacaatcctctctgcgtcttgttgttctgcactatcctggcaagaggatgagccctagatttcggctgcgctacaatttggggattgtctgcactgtctatgtcagggttctaagaacatgggagctggccatgaacgtggatgaagatggaaattacattaagcattatgaacagtttctattccctcatcagttggatcctccccgttcaggaccaactgttggaccagaggcagagttggacaacttgaatcaggctccttcaaatcaaatctctaacaaccaaggacttcagaacaggggaagattgcttgcgattctgcctgcagctagcactgtcttcattgaggaaatctctgatacacctgaaatttttgtccctccgtcaatccattctgctccctccagtatccatgactgcctccaggacctcgtgccctcagatactgaaaatgaacatgagctttcagcccggaaacgcagaaggcagaagaaacggacaattgattcagatgtcaagaggcgatatagcgaaagactggcggccaaagaaggacatttgtacatttcgatggaatccaaagcagccagagcgaaaaaactaaaggaacaacttgccaaatgctcatccaaactcaatgacgcggtacacaagcacaatctgctcgaccttaacttcaagactactccgaaagcgttggaagatctggctattgcttgcagtttgaatgatcacgatattgcccagcttcgaaagctcttcttcagttctctagtgtcttctctcccttcgttatgttctctttcagtctatttactccatgaaactaaacttcaaaacatcccacctgaaaaagcaaaaactattctacctcctaacctcgctaattatgattttgtgggttcttatggctctagagggggcatgcttactgcctggaatgctgactttacaaaaacttctttcatctccagacacttctcgctgacaatctccttcacctcaaccttcacagacctgtccttttctttaaccaacatctatgggccagccgagcttgatcaaaaacaagacttccttcatgagcttttagaaatagatcccctaatccagggccctagacttctcataggagacttcaaccttactagatccccttccgacaagaactcccaaaacttttcaactggtcttgcagctgctttcaaccaaacaataaactccctaagcctgtttgaattaccacttccagacagactatacacctggtcgaacaaaagagaagttccagtcctggcaaggctagaccgagctttcttcaacaatgcttggaacaacaccctcccaaacacctccctctcttcttgcactagaaccacctctgaccatgttccacttcttctcactgcttctacttccattccaaaatcgaaaactttccgctttgagaatcatcttttgctggaccgagattttcttccttcagtcatgcacaggtggccacaacagctcaatatgaatgatccggctgcttgccttgctgccaagctaaaacagacaagatctatcatcaaagtttggatgaaagaacacaggaaacgtagttctctcaatgaagactgtaagttcacaattgatctcctcgactatattgaagaactcagacctttgaatgatggggaacgctgcctaagaaatcttgtacaggagaaattgtttcaggccatccaaagcaaggttgcatactggaaacaaaggggaaaggtcaagcggctaaagattggaattgacaattcggcattcttcaaggctcatgcatcaaaaaattacaggaattcaaggatcagatcaatcaagcacaatgggtcagaaattgcagatcacaatggaaaagctctgcttctgcactccttcttccaacattttctagggtccgactgtcagccgttgtgggacttcgatctgtcaacactatactcagaagatgaacgagactataatcttttggcttcgcaaggattgcaattttctacggaagagataataacatcaattaaaggcatgaactccaacagtgcaccgggaccggatggtttcggaccaagcttctacaattcagcttggaattctataaaggaggatattatcaagctggctgcgagtttctgctcaaattcagtccaactggaaagaattaacagagctcacattgttctaattccaaaacctggcaaggagaatacagtagatggctatcgaccaatctccctccaaaactgctcagtaaaaattctttcaaaggttttggcaaataggcttcaaaaagttctgacaagaatgattcatctggaccagacaggcttccttaaaggtagatgcatctctgaaaatttaatttatgccactgaactgatacaagcgtgccatgcaaggaaatgcaagaccctcattatcaagttagattttgctaaagctttcgattcagttctctggacgagcctgttccaaatcttggctgtccgggggtttccaaacaattggatttcttggatcaaaagcctacttcaaacatcaaagtcggcagtgcttcttaatggaattccaggaaaatggattaactgcaaaaaagggcttcgccagggagaccccttatctccttatttatttattctagtggcagatgtgctgcaacgactgctggagaaaaactttcagattcggcaccctatctatcaggacagaccatgtgcgaccattcagtacgccgatgacacgctggtgatatgccgagcagaggaggatgatgttcttgctcttagatcaaccttgctgcaattctccaaagccacaggattacaaatcaactttgccaaaagtacaatgatctcccttcatatcgaccgttcaaaggaatcgtcattgtcggaattgctacagtgcaagctggaatcgcttccaatgtcttacttgggcctacctctatccttgcataaactcaccaacaatgatctacaaccaattgtggtcaaagtggatagttttcttacaggctgggaggcatctctactttcacaggccgaacgcctaatcctagttaatgcagtgctaagcagtgttccagtttatgcaatgtccgcgttcaaactcccaccaaaggtaatagaagcaattgataaacggcgacgagcctttttttggaccggtgatgacacctgctccggagcaaagtgtttagtggcctgggatgaggtttgtaccgcaaaagaaaagggaggactaggaatcaaaagtttaaagactcaaaatgaagctcttcttctcaaaagacttttcaaccttttctcagataattcctcctggactaattggatttggaaagaatttgatggaagatcactattaaaatctctaccgttaggtcaacactggagtgtctttcagaaactgctgccagagcttttcaagataactacggtgcacattggggatggctcgagaacatccttttggcatgatcgctggactggcaatatgactcttgcagcacagtttgaatctctcttctcgcattcaactgacgacttagccactgttgagcaaattttatccttcggaatttacgatattctcacccctaggctttcatctgcagcgcaaaacgacctacaagaactgcaaaccattcttcagaatttttccttgacaaatgaatcggatactcggctcaacaatcgccttggcaatttaacaaccaagacaatctatgatttaaggtctccgcctggctttccttcaccaaattggaaattcatttgggactgcagaatgccattaaagatcaagctctttgcttggcttctagtcagagatcgactgtccacaaaattgaatctcttgaaaaagaaaatagtacagacagcaacctgtgacatatgcagcaccactgatgaaacagcagatcacctcagcttcaactgcccttttgctatcagtttctggcaagcacttcatatccaaccgatcatcaatgagactaagtacctgtcccaactaaaggcaccagcaactatcccaacaagacattttcagagtttcttcatgctctgcttttgggtcctgtggaaccacaggcatgatgttgtattccgaggaagaccaccttcaattgcttcatgcttgcaacgcggaatttcggaatcctccctatgggctgaaacttttacacctgatgatagatttgtaatagatgtttggaaagacatttcttcctcaattaatgcaatgacaattcaggtggggaacctctcccccccggcactgaagaacagaaaaaagttgcacaagcttattgatccatcattaggtgctaagaaacatgagcgagctcagattatgcaatgtcttagggtggcgatgttgtgcgttcgggatcgcgctgaacatcggcctaccatgtctgaagttgttactatgcttcctagcatcaagacaccgaaagacagaaaggcagttgtcaacgtgcgcttttga

SEQ ID NO: 14394 - DNA, 1413 bp, Oryza sativa
  Clone ID: TFbOSC15265j.C1.o3.fg
atggaatgccgaggatcaagaggatttggttcttcgatgaacatcaagtcaaaatccaaagtgggcattgatcaaagcaaaggagctgtttttgaaaatggctctactcgggacagagagtcccacctggaggttctgtccggaacttcctggcaccaaggtgaggttgaaaaatttcataagtgctgcccagaagttcctggcacttttacccggaagctcctggcaggtttccagttcaaacttgatgctcatctcatttggaacacactcgaggagagatatgacaagtccgagtgtgatgaggcaaagctcgctatagaagaaccacttgtggagtgctcaaattcatcgacaatttgtaaagagcctcaagtgattctatccaatgagcaagatagtcttgccacattcacctcctcaccaacacatgtctccattaaaggtaatgaaatggtagaagtatgtgggaaaaaatggccaagtgaagaatttacatctccaagatgctcatcttcacacttggatgaatattcttgcatcatggagaaatcatatttggagaaagaaaatctagagcttaaagctcaacttgtggagctcactagcaagcatgtggacctacaagaaaaatatgatgagcttttgtgctctcatggaaatcttgtggattcacatgccatgctagaagtaactcatgaggtgatcataataacggtaaaatcctatgtgcctcatgttcaagttgactttacatgtgctaactcttgttgctctcaagcaaatatttttctgcgcactacatgtgacttggattatgtagggaaaaaggataaatacatcgatcatggatttgtttgcaatgctcaaccttctcaagataaccgtgaaagcatgctgaagaagcttgagaagggatcaaccgtagcttgcaccaagttctatcaagaagataacaagtccaacaacaagagcaaggggcaagatcaaagcaagaacaaagcttccattacttgcttcaagtgcaagaaaatgggacatcatgtgagagattgcccttggaagaaacagaagaagttgagcaagaatgaggatcttgctcacagttcttcaaatccaccaaagagggacactttgcctcaagttgtccttgcaagattgatgatgaagccacacttccaagaaagacatcaagaatcaacagaaggaagtgctacggttgcattgagaaggggcatgaaattggattttgtccgcacaagaaggatgatcatagcaatcgatcaagcaagaggcaaaccggcaacaagcaagtcaagaagcaagataaaagcaaaactcaactttgctacaattgccgggcaaagggacatattggtaaaaattgtcccattggttattacttgtgtataa

SEQ ID NO: 14395 - DNA, 1263 bp, Oryza sativa
  Clone ID: TFbOSC402930j.C1.o2.np
atggcacctcaaccaacctgtcagacttgtgtccgcaactaccttggttctaaggaagacccagctttgtcagaaaatccaaatcaactagctgaacaagtcaccaaccaagttgccaagactgataatactgttcctggaccaaacaaggaacccaaggtgaatccagacaagagtaagaatgaggccgcagaaatacaaggaacacaatcagtagaaggcactgatacccataaagagaagaacaaagaattcttaaatgtgatgattacagggatgaaaaccccacttcgagctaataattgccccaaccttcagaactcaatcaataaatccgtatcgcgagaaaatagcatgattaaagaaggaagttgtcacaaaagaaagaccttgccatcagaagttgacatgcaagatgtcccacaatgtcagacaatgcaatcttgccaaaacttacccaagtcccccaccctcaaatcaaagaagatcagacacgttcccggattcatatgcttcatttgccacaaaattggccattacatgagacactgcccccaaaaaccctatatggatgcaccactacaagctaatatgagcacctcaaggatgcccttctatccccaaggaagcccaaattcgccaaatgttaatgcagtacgttcaaccttccctgatgacaaaagagcaaaagcatcctgcgacatgtgccaagacatccaagaaaagaaagagatgcaagaatacaagagacgcaaagtaatgtccctagagattcaagcaaaagaagatttgtgtcgaaaaacaaactcgccagcacaatactatcagaaagcatctcagcattcaactagttccggttctacgtctcgttcgactatgtcagaacctggtcagcaagccacaatgatcaacagtaatagccatgaaggaagcaactccgtaccatgccctacaccttcaaaaagacgtggttataaggcaggagtcgaatgtttcatctgccatgagatgggacactattcatggtgctgccctcagaaagtcaagtcaaaacgagtccaaccaacaacaagccttcccaacgtatctggaccaaaaagttcaaagtcaccaaacagtggttctgcctcgttgacctcaccgcccgtcggacaaggtcgtctgaaccatgtgcaagtagaaacaaacggaaaagttgtgaatctcgagcaagttgaaggagcaggagaagaacaggttccacaggcaagagcagagccacag

SEQ ID NO: 14396 - DNA, 7452 bp, Oryza sativa
  Clone ID: TFbOSC900058j.C1.o11.fg
atgggggatctggcgttgatgagctttctgtccgggaagcgggagcgacagcggcagctctgccaccgacaaattggacgaggccgtggctcaattacttcagtggctaaaactgaaagaaagggtctgcactaccaactaaaagaaaacgtttaccttccagaggacatcttgcggctgatccatgccatgatgccactgcgagatgctgctcgtgctgcttgcgcctcgcacatattcctgcagtcctggagatgtcgtcccaaccttatcttcactggggagacgttgggcttgattataaatggtactggaaaggatgacgctaaaagagacttcatcaatatagtacagcgcatactgctgaatcactcaggcattggcgtgaaaacactaaagcttgaactcctccattttagcgatctcgacttaggttgtctcgaagcctggcttcagattgctgttgcaccagggattgaggaactcaccctgatgtttccttgcgtaagatacaaattcccatgctcgctcttatttgaaagaggtggaaactcggttcgatatcttcacctcatggtctgcaccttccgtcctacaattggtcttggttgcttgataaaattgacgcagttgcatctgtctttcgtgtggattactggagatgagttagagctcctttccaaatgcgtcgctttggagtggctgaaactctcatattgccctgagataatttgcttgaaagtaccttgtatgctaaggcagcttggctcccttgaggtggctgaatgcagatatttgaaagtcatagagatctgtgctccaaatctttcaaatttttatcttactggttttctagtacggacttcatttgagaatccattgctagtgaagaaactacgaatcatgtgtttacgtcaaggcaactttgtttcttatgctcgtacgaagcttccatcccttgtgccaaatgttgaaacacttacagtagcatctaatgaagcgaccgggcaggcgattcccaccgaccgacggccactccggccccggcggccacccccctgcgccggtagccaccccggcgccgacgcccaccacccacgcctctcttgccccatcgcgcttcccctggagcctgctcgaccgccgctcgacgttgctggccagatgcggttggcgtctctgccgccgtcgtggccagcactccagccggcgcatcccacgctgctccgccaccacaaaccagtaatcccctctcaacccctctctggaccacccctttccccacgaagctccaccccacgccggaacccccagttctggctggagtcgccgccgccgccgccatccagatctgctgtgcctttctccgccgacgatgtctcccacgtctcggagtccccggatccaaggagttcgcccacgcctgctatgccacgctccttcgctgatgctgtcaggttggatttcaatcccgccaaaggagacggcctgcccgttttcaaatccccacacggccaaccaccgccgcgcccaaaattgaagtccgccattactatcccagcctggagcacctttcagcgtcgcgcctacagggctactcccggagaggaaatgggcgtgcgtcgcatccatggtacggcgagaccaggccgcttcaatggcgagtggaaggaagtcaagccacgccactggtggcgccgctcgccgcattcacccgagtcccagcggccagcttccaggcgacaagacgcacattcaaggcgctcgttggctcccgctgcatcggcatcgctgcgcctcttcagagagagaacggctggaaaatgcttcaactgccttgcgcgtgatcaccgcgcagcgcgctgcagggacccggttcgttgcttcagatgtttccgttcggggcacaaggcaaactcctgctcccggcgtgaaccgcgaccacgccaacctcgccagtctccacagaaagcgctgcgccgccaagcttctacaccacccccgccacagaacacgtcgcaccgccaggcttctacgccatccccgtctcttccccgggctacacgaccacgccaaccacgccagtctccgcagaacacgtcgtgccgccaagcctccacaccacctctgcagctacctcttccacccaagccgtcctgcaacacgcggatggctctactgggagacccggcgacccggccggatgaagaccactgcttcgttccgacaccgttcgccacggaggctgagcggaaagaatgggaaagctcggcggtggtgtcctgggcgatgcgggcaccggcttccacaacggcgcaagatgttgaggcggcttttcgggaggaattccgtcttcggcgaggggaggtcacggtgacgcgccaccacccggaagccttcctgatcaagttcgagcatagcagtcactgctatgaagctatgcgcaagggcttcgtcaagcgaaacggtattgagctccacttcatcaagtggcgcagcctgagtgcggccctcggcatcgcgctcatgtttcgccggctcatcgcgcgcacctgtggcctcgaggagatcgagaccaacctgatccacccggtcgacactcgcacggtggatgtgtgggcttggaccggcaatccgagctccatcccgaagcggatgtggctaacctttaccggctcgacgcggggagccaaaccagagcaaatcctggtgtccgacagaccgccggcacactggcaacatggcgccaaattctgcgtctacatccacctggaggagatccacgactacacgacggtggcggtagacctcgatggcaacgaggcatgcgcgccctccaagcggcgccttccggagtggcacctcggcgtggccgacggggacccggtaccaacgcgagccttcgagaacttcccgcaccacccgcctccaccacgcactcgtcaaggccgcgagccagagcgcatcgacgaccgcgacgaccgtcgccgaagagccaaagatgatcgtgaccggagccgtcccaggcggtcgtataatgacgaccacccggaccacgacagggaccaagcctggcgacggcgcgacgacgacgacgaccgcgacggcaggggcggccggggccgcgaggcatggcgaggacgagaaagccgcaaagtctcgggccttgatggccaacgcgtgcgcgagcgttcgccgcgtcggcgcgactgggcagaggacgaccgtcgcggtgaccggcgtcatcacgtgcaggctgctgtcgccctgcctgctacaatcccgcctctcaagctcgctccgaagcaggcaccaagggaaaacctccgtgagacgggggaaaggcttgtgaacagggtgaacaatttcgccgctgcggtggatgacgcttctcagcctggcggggaagaagcctggtccgaccgccggccaagtcgcgtccatgacgtcccgatccggcaggtgttcgaccggctcaagcactgcctcttccctgctggcatccactctacaccaagccactcgggccaagtgatgcctcatgacgagagggcgtcgatcggcgcgcgaggcaacactgcagccgccacggcggttgcgtcgaagacggtgacgccgccgcagctgattacagctgcgccaacgacggaacaagatgaacaccaagatgccgggaataagaacacgctgcaagtgctggagagcctcttctccaccccgccgcgcgccgttttgccacggccgacctcccctgcgctgacgacgacccaagcgaccccagcgccagcaccggcgccgccaggtggccacgggatggagcgtcgccgcagcgcaagactcgcggcaaagccgccaatgccaactatgcaacgctgcacgagggtgttattgaagcggcttggcatgctccatgacgacaagacgctcgacgaggtgctctccgactacatcgccatgttcaatggacctctaccgcaacacgtgatcgcagcgctcacgtccatcttcgacatcgacgccgatgcaatcatggaagccaatcacgtcgacaacacgctcctggaggttgtcggcgaaggcgtcgctgaccttgtcgaggagtgtactgcactaaacgagctaatcgcagagacatcttgcaacctcgtctgcatccaagaaaccaaactaagagcagttgatgaccagctagcccgtttcttaggagcctacaggctagacagttacgctttcaaaccgtccaggggcactaggggaggcatcctacttctgtggaacagcacggcgatctcggtgcacagcactcgcataggtcgttactcgttgacagcgaatataactgtcctacgctgcggaacaagcttcatgctcaccacggtctacggcccaacgcgtcacagagaaaaagactccttcctccgtcacataaggagtttaaagccgtccccgggaaacaaatggcttatcctaggagatttcaacttggtttatcgggcacgagataaaaacaacaacaacctaaatttaggccgaatgaatcgcttcagagctgcactcaaccgctgcgagctaaaggagatccacctccaaaacaggaaattcacgtggagcaatgaaagacgacgaccaaccctcatgagacttgataggttcttttgcaatgaggaatgggacctatctttcgaccgccacatcctacacgctctttcaacaggaccttccgatcactgcccgttgttgctcaccgacccatcctgcccacgtaagccgcggcctttcaaattcgagaatttctggataaagttacctggtttcaaggaggtcgtagagcaagcttgggggaaaccgtcgaatcacaccgagcctatgcaccggcttgcgtataaactacgggatatggccaaagaactaaaacggtgggcgagaaccacgtgctctcagactaagctgaaataccatatggccctagatgtcatcctacgactggatgtggcccaggaacaacgtaccctttcgccggaggaagggaacctaagagcagccctgaaaaggagagttttgggtttagcggtgattgaaagagcgagaaagagacaagcgtcacgaataacgaacataagagcaggcgacgcaaacaccaagtttttccacctcaaagtaaactccacaagaaggaagaatcatatacatcgcctccgcaaacaaaacgggtgggcagtgacgcacgaagaaaaaagccaagcgattttcgaccacttttccctcttcatggggaggccgcaagaaagacaactagatctaaactggcaatccctagggctagagacaacggatttaaattcgctcaatgaacctttcaccgtggatgaaatcaagagagcaatttgtcacatgccgacagacaaagcacctggccctgatggttttaccgggtgtttcttcaaagcatgctgggaaaccataaaaaacgacgtcacgacagctttcaacgccatctacaatcatcggtgcaatcatctaaacctcctcaactcggcaagcgtcgtcctcatcccaaaaaaagatggtgcagaacaagtctccgatttcaggccaataagccttatacacggatttgcaaaaatcttctcaaaattactggcccttcggctgcaacctctcatgcacaaacttgtttcaacaagccaaagcgctttcattcggggaaggagcatacatgataatttcctatatgtcagaactctgttcgcaacttctagctccaagatactcctaaacggaataccgggtaccaaaataattcatgggcaaggcctaagacaaggagaccccctatccccgctactcttcatcttagcaattgacccacttcaaagactacttagcaaagcgacagaactcaagctactaagcaagctacgaggaaagtctgtgacactatgtacttccctctacgcggatgacgcagcagtctttattaaaccaggaaaatccgaagtgcagaatttcactgctattctacatcgctttggcctcgcaaccggcctacgtgcaaatatagaaaaaacacaagtggtggccatcagatgtgaaaacgtggacttggatgaggtgcttcaaaacaccccggcaacaagagcttccctacctatgaaatatcttggacttcccctaacaacgggcagattgcgcaaggcagacctacagctgttgtttgacaaatcggccggaaaaatggcagcttggcgaggtagaaacttgggactcgccggacgaactacactagtcaaatcagtgctatcatcacagccggtctaccttcttattgcactaaaggtctccaaggaatcaatggagacgcttgacaagcaaagaaagagcttcctctgggcaggatcggaaaagctaacgagaggaaaatgtaaagtaaattggaaaagaacctgctcaccgactgtctatggtggtctgggcattctgaatttagaaaactttgctagagcgttgcggatcagatggctgtggcaagagtggaaagctccggagagaacctggatcggccgggacaacccatgtgacaacacagagaaaactctttttgcggcggcaacgacaataactgtgggagacggggaaacggctagcttctggaactcagcttggatgcaagggcggcggccgagggatgtgatgccacttgtatatgcaatatccaaaagaaagaatagaagcctcaaagaaggcgtcacagataacgtctgggtacaagacctaaatttctcttccccagatgcaataacagttgagctgctggaccaaatagtgactctgtggtcgataatccaaagcgtgcagctcagtccagacgtgacagatgaaatcacttggaagttcaccaatcatggggagtatacaacaagctccgcctataagatgcagtttctcggatccatcaatgcaaactatgacgcaatcatctggaaaccatgggcaccaaacaaatgtaaaattttcgcatggttggccatccaaaacagagtctggacggctggcaggctgactacacgtggatggccgaacaacactttctgcccgctctgtagacatacccgggaaacggtattccacctcctagtagactgcagatactctaggaggatttgggagaatctggcttgctggacgtcgcaagagcacatcaaaccaggcaattgggctcaacctgcgtcgctccaagactggtggactgcaatagcaacacacccagggacaccgagaaaaggaaatcgcacccttctgttgctagtgacatgggagatttggaaagagagaaatcaaagaattttccagcgcaacgaactctccatactatcgctctgcacaaagataaaggaggaggccaagacctggactctagccggcgcgaaaaggctatctgagataatcccttaa

SEQ ID NO: 14397 - DNA, 5157 bp, Oryza sativa
  Clone ID: TFbOSC400601j.C1.o78.fg
atggcccaaggtgctggcgacgctgtgcttccggcatcacacatcacggcggataggcaccttagcctcccccgcaagattatgccggagggggccgccctgagggcgggggagtcgcgaccgcgaccgcggtactcggatcgattcgtgcacctcctgtccttcgccatggtggggttggtccctccattctccaggttcttccacgaggttttggatttctatgagatccacgccttgcatctcgcacccaacgccgtgatgacgctggccatcttcgcgcatctgtgtgagatgttcgttagggtccggcagacgatgcgattgttccagttcttcttcgtcccgcagctgctgcaagcatggttggcggcttcggagctgggcgagcagtacgacgccgtgcgggaccgcctcaggggcctgcgaagccagggccttacgggggcgatggtctttggtgattacttccattgccgcatcgcacctctccaagagcggtcccgcgaagcgtggaagtatattggacccaacgatctcatgcgcactcatgtgggtgagcgttgggactggggcgaggaggatgcgaaaacgattccgacgtttccggagagtccgtttttgcaggagaagaatttaaagagttccaaggccagcaaggcaactcctggtttggaatggtatattcctggtttggagatagaactgtgcagccgggatggttgttcagaatggttgggcctatgcaacaggatgccgcgctacaagcctgagtatttgtttggtgttgagggatttgtccaggagttgcgtacgatgtcctttgccataggatttgggactgcccctttgtatgcccagattcctcatgatcgtgatgaagagaagtgccaagtcaaagtcaccttgaacagtaatagtgaagatatcctatcagtgatgttcgaagctggaggaggaaactacattcatgcatgtcaggaggtggcaaggatcgccataggagagctccgcgatcgctacagtgatcagttggccgacactgagtatcgctaccatcctcgccaaccccagggaagtgaccgtggcagctaccttgagactgaggggattgagaatgatgctaccacaaggcatttggttgagatgctgtgggctatggatgagacccgcgcggagactgtgttagcagctcaagatcgtgaagaccggaatcgtggtaagatttgcaagctagaggacaagatggtgctcactcgcagcaacgggaatggtcccaacatcaagaataacaacaacaatagagagaatcccacacttgcccaagtcctggctcaacaggcacagcttatgaacatgatgatgcagcaacttcagaaccagcagaaccagggaaataaccatgcacctccccagaacaagttggcagaatttctttgtgtgaggccgcccactttctctagcactactaatcctgttaaagctggtgattggctgcatgccatagagaagaagttagatttgcttcagtgcactgatcaggaaaaggtctcatttgcatcacaccaactgcatggccctgcctctgagtggtgggatcacttccgccttaacaggactactgctgaacctatcacttggcttgaattcaccgctgctttccggaagacgcatataccatcgggagtggtgtctctcaagaagaaggaattcaggtcgctcacccagggatctcgcacggtcaccgagtatctgcacgagttcaatcgtctggctcgttatgctccggaagatgtgcgcactgatgaagagcgccaggagaggttcttggaaggacttaataatgagctttcttacccactcatgactggggattatcatgatttccagaggttagtggataaggctattcgccaggaggacaagtacaaccgcatggagcagaagaaacgccggattgctcacttcaaggcacaacaggggaatagtcagaggccgcgtcttactttaggaccccagtccatgccacagggaggttcttcgtctgttgttcgttcgcagcgtgagttcttcaacaacaacgcgggcaacaacatccgcaatcaagctccacgccctgttgcagcttcgacacagcaacagcctgccaagagggagcaaggcagcaagcctggggtgtgcttcaactgtggagacccaggacattacgctgacaagtatccgaagccccgacgcgtgaaggttgtccctgcccagagcaactctaccgcaccagcatcaaaggctcgtgtcaatcatgttgctgctgcagaagctcaaggtgctccagatgtgattttgggtacgttccttgttaactcagttcctgcaacagtgcttttcgattccggtgcttcccattcatttttatctatgagttttgcgggaaatcatgggatggaagtagaggatcttagacgtcctttgatggttagtaccccgagtaatcaagcactctctttgcaacgtaacccctctgtcagaatagaaattcaaggagtaccatttcttgccaatcttattctgttagaagccaaagaccttgatgtcatcctagggatggactggttagccagatataaaggtgtgatagactgtgccaacagaaaagtaactctcaccaacaatgatggtcgagttgtaactgttcatgcattgtcttctgaatctttaaggtcaagtctgaaccaaatagctttggaagagattcccatagtacaggaatacccggacgtgttcccggacgatttacctggtatgccgcctaaaagagatattgaattcagaatagatctggtaccaagaacaactccgatccataagagaccttatagaatggcggccaatgaattagcagaagtcaagaggcaagtagatgatttgcttcagaaaggatacatcagaccaagttcatctccatggggagctccagttatttttgtggaaaaaaaagaccatacccagaggatgtgtgtggactatcgtgcactaaatgatgtgactatcaagaataagtacccgctgccaagaattgatgatttgtttgatcagcttaaaggtgccaccgttttttccaagatagatcttcgatcagggtatcaccagttgaggattaaagaagaagatatacctaagacggcttttaccactaggtatgggttgtttaaatgtactgttatgtcttttggacttaccaatgcccccgctttcttcatgaacttgatgaataaggtgtttatggaatacctagacaagttcgtggtggtctttattgatgacattcttatctactcccgaacaaaagaagagcatgaagaacatcttcgccttgcactagagaagctacgagaacatcaactgtatgccaagtttagcaagtgtgaattttggttgtctgaagtgaagtttcttggtcacgtcatctcagccggaggagttgccattgatcctagtaatgtggaatccgtaaccaactggaaacaaccaaagacagtttcagagattcgcagtttcctgggtcttgcaggttattaccggaggtttatagagaaattctccaagattgctaagcccatgacacggctgcttcagaaagatgtgaagtacaagtggtcagaagaatgtgagcagagttttcaagagttgaaaagtcgcttaatatcagctcctattttgattttacctgatccaaagaagggtttccaagtgtattgtgatgcatccaaacttgggttaggttgtgttctgatgcaagatgggaaggtggttgcctatgcatctcgtcagttacgcccgcatgagaagaactaccctactcatgatcttgagttagctgtagtggttcatgcgttgaagatttggcgtcattatcttttcggtactcgtacagaggtgaacactgatcacaagagtttaaagtatatttttactcagccagatctgaacatgagacaacagagatggttggaattaattaaggattatgacatgggaattcattatcacccgggaaaggctaatgttgtagcagatgctcttagcaggaaaggctattgcaatgctacggaaggacgacagttgccattggagttatgcaaggaatttgaaagattaaatttgggaattgtcagtagaggtttcgttgcagccctagaagcaaagcccactctaattgatcaagttagagaagctcaaattaacgaccctgatattcaagaaattaagaagaatatgagaagaggaaaagctatcggtttcttggaagatgagcaaggaactgtatggttgggtgagagaatttgcgtcccagacaacaaagatttaaaagatgcaattctaaaggaagcccatgatactttatactccattcaccctggtagtactaagatgtaccaggatctcaaggaaagattttggtgggcaagtatgaagcgtgagatagcggaatacgtagcacctttgaagattcctgaatggaagtgggaggaaatcggtatggatttcatcactggtctacctagaacgtcatcaggccatgactctatttgggtgatagtcgacagacttaccaaagtggctcatttcgtcccagtaaagacaacatattccgaaagtcgtttggcggaattgtatatggcaaggattgtgtgtttgcatggtgttcctaagaagatcgtatccgatcggggaagtcagtttacttcaaagttttggaagaaacttcaagaagagatgggttctaagctgaactttagtactgcttatcatccgcagacagacggacaaaccgaaagggtaaatcagattttggaagacatgttgagagcttgtgctttagacttcggtggaagttgggataagaatctaccttatgcggaattctcatacaacaacagttatcaagctagtcttcagatggctccttacgaagcactgtatggtcggaagtgccgcagtccgcttttgtgggatcaaacgggagaacgtcaggttttcgggactgatatcctaagggaagcagaagagaaggtaaagatcattcaagaaagattgcgtgaggctcagtctcgccataagagttatgccgacaatcgtcgcagagatttgagttttgaataa

SEQ ID NO: 14398 - DNA, 1907 bp, Oryza sativa
  Clone ID: TFbOSC900179j.C1.o14.np
aaggtgcgctgtagtggattgtgttgtgcgaggggtactgtcacagctcctttccgagctcctggtttggaatggtatattcctggtttggagttagaactgtgcagccgggatggttgttcggaatggttgggcctatgcaacaggatgccgcgctacaagcctgagtacttgtttggtgttgagggatttgtccaggagttgcgtacgatgtcctatgtcataggatttgggactgcccctttttatgcctagattactcatgatcgtcacgaagagaagtgccgagtcaaagtcaccttgaacagtaatagtgaagatatcccctcagtgatgttcgaagctggaggaagaaactacatccatgcgtgtcaggaagtggcaaggatcgccataggagagctccgcgatcgctacagtgatcagttggccgacactgagtatcgctaccatcctcgccaaccccagggaagtgactgtggcagttaccttgagactgaggggattgagaatgatgctaccacaaggcatttggttgagatgctgtgggctatggatgaaacccgtgcggagactgtgttagcagctcaagatcgtgaagaccggaatcgtggtaagatttgcaagctagaggacaaggtggatcgtttggagaaggaactagccgcgttgaagggagaagcaccaccgcagaaggccaggattcgtcttaccgcaaggaagagagctctatttgtccctcgctaccaattggcgccaaagatggtgctcactcgcagcaacgggaatggccccaacaacaacaataacaacaacaatggagagaatcccacacttgcccaagtcctggctcaacaggcacagcttatgaacatgatgatgcagcaactccagaaccagcagaaccagggaaataaccatgcacctccccagaacaagttagcagaatttcttcgtgtgaggccgcccactttctctagcaccactaatcctgttgaagctggtgattggctgcatggatttgcttcagtgcactgatcaggagaaggtctcatttgcatcacaccaactgcatggccctgcctctgaatggtgggatcactttcgccttaacagaactactgccgagcctatcacttggcttgaattcaccgctgctttccggaagacgcatataccatcgggagtggtgtctctcaagaagaaggaattcaggtcgctcacccagggatctcgctctgtcaccgagtatctgcacgagttcaatcgtttggctcgttatgctccggaagatgtgcgcactgatgaagagcgccaggagaggttcttggaaggacttaatgatgagctttcgtacccactcatgactggggattatcatgatttccagaagttagtggataaggctattcgtcaggaggacaagtacaatcgcatggagcagaagaaacgccggattgctcacttcaaggcacaacaggggaatagtcagaggccgcgtcttactttaggaccccagtccatgccacagggaggttcttcgtctgttgttcgtccgcagcgtcagttcttcaacaacaatgctggcaacaacatccgcaattaagctccacgccctgttgcagctccaacacagcaacagcctgccaagaaggagcaaggcatcaagcccggggtgtgcttcaactgtggagacccaggacattatgctgacaagtatccgaagccccaacgcgtgaaggttgtccctgtccagagcaactctaccgcacaagcatcaactctccataggcggcggccgtgctcacgtcggcagctcagagggtggcatgttagtgcaaaggaattgctaaaatagagaggagaggctgactagtgggtcccatacctgtttctcccctccgttg

SEQ ID NO: 14399 - DNA, 4134 bp, Oryza sativa
  Clone ID: TFbOSC26838j.C1.o2.fg
atgagggcacaagtgagtacaaggatgccaagcttcacttcctcaagatccaatatgagacattctccatgttgcctcatgagtgtgaatgacatgtatgggaggctcaatgtcattgtggatgatctcaaggggcttggggcaaactacaccgatcttgaggttgcccaaaagatgcttagggctctaccggagaagtatgagacccttgtcaccatgctcatcaactccgacatgtcaaggatgacaccggcaagcctcttggggaagatcaacaccaatgacatgtacaagttgaagaagaaggagatggaggaaacctcaccttccaagaagtgcattgctcgccaagccgaagttgaagacaagggcaatggcaaggtgaatgaagccaatgagaacttggaggaagagattgcccttcttgctagaaggttcaatgatctcttgggaaggagaaaggagagaggaaggggctccaactccaataggagaagaaatagaagacccaacaagactctctccaacttgaggtgctttgagtgtggtgagaagggacactttgctttaaagtgcccttccaaggatgatgatggagacaagtcatccaagaagaagagtggaggctacaagctcatgaaaaagctcaagaactccgcctcatccgggtccgaggaagaagatggtgatgatacaagctccaagaagaagaagatggccgttgttgccatcaaggaggctccatcactcttcgctccactttgtctcatggcaaagggctcttctaaggtaacatctcttagtgatagtgagagtgatgatgattgtgatgatgtttcctatgatgagcttgtgagtatgtttgaggagctctatgcttatagtgagaaggagattgtcaagttcaaggccctaaagaaggatcatgcttctttggaggtcttgtatgaggagctaaagacttctcatgagagactcaccatttctcatgagaagcttaaggaagctcaagacaacctcatttccactactcaacatggagctctcattgatgttggcatatcttgtgatttgcttggtgatagtgctacttgccatattgctcatgttgcatcatctagcatttctacctcttgtgatgatcttgtggatatgtctagctctagctctacctcttgtgtttctatttgtgatgcctcacttgttgttgagaacaatgagcttaaagagcaagtggctaagctcaacaagagcttggagaggtgcttcaaggataagaacactcttgacaagattttgagtgagcaacggtgcatccttaacaaggagggacttggattcattccaaagaagggtaagaaaccttctcactgtgccactcgttttgtcaagagcaatggaaggctcatgatggtagcattgttgctagatatgtgggttcccctatactcggtggtgaactaccgcaccggtgggagccattgggtgtttgatagtggatgcactcaacacatgaccggtgatagggctatgttcaccacatttgaagtaggagggaataaacaagagaaagtgacatttggagacaatagcaaaggaaaggtaattgggttaggtaaaattgctatctccaatgatttgtcaattgataatgtctctcttgttaaatctctaaatttcaatttgctttcggttgctcgaatttgtgatcttggcttgtcatgtgctttcttaccgcaagaagttattgtttctagccttcttgacaagtcttgtgtgttcaaaggttttagatatggaaatctttatttggttgatttcaattctagtgaagcaaatttgaaaacttgtttagttgcaaaaacttctttgggttggctttggcatagaaggctagcccatgttggtatgaatcaattgagcaaactttcaaaacgtgatctagttgtggacttaaaagatgtgaagtttgagaaagataagctttgtagtgcttgtcaagccggcaagcaagttgcatgttctcatcctactcagagtatcatgtccacatctagaccattggagctcttgcatatggatttgtttggcccaacaacctataagagcattggtggtaatagtcattgtcttgtgattgttgatgattattctcgctatacttgggtgttctttttgcatgataagtctattgttgccgagcttttcaaaaagtttgcaaaaagggcccaaaatgaatttagttgcactcttgtgaaaattagaagtgacaatggttccgagtttaagaataccaatatcgaggactattgtgatgatcttggttatgcctcaaatagcaaggcataccaggtctacaacaagaataaaggtattgtggaagaaaccgccgatgttcaatttgacgagactaatggctcccaagaggggcacgagaatttggatgatgtaggtgatgaaggcttgatgagagctatgaagaacatgtcaattggagatgtcaagcctattgaagtggaagacaagccatccacctccactcaagataagtcatctacttccgctacgccaagtcaagctcaagttgaagtggaggaggagaaggcacaagatccacctattccaccaagaatacacaccgctctttccaaggatcacccaattgaccaagtgttgggtgacattagtaagggtgttcaaactcgatctcgtgtcgcttcgatttgtgaacattactcgtttgtttcttgtcttgagccaaaacatgtagatgaagctctttgtgatcttgattggatgaatgctatgcatgaagagctcaacaactttgcaagaaacaaggtttggactttggttgaaagacctagagaccacaatgtcatagggacaaagtgggtctttaggaacaaacaagatgagaacgggttggtggtaagaaacaaggcaaggttggtggcacaaggtttcacacaagttgaaggtttggactttggtgaaacttttgcccccgtagcaagacttaaggctattctcatccttcttgcatttgcatcatgttttgacataaaactatttcaaatggatgtgaaaagtgcttttctaaatgatttcaaaattggaaaagttgacaccactcttttcacaaaaatcattggtgatgatttctttgtgtgccaaatttatgttgatgacatcatattcggttctactaatgaagtattttgcaaggaatttggtgatatgatgtctagggaatttgatatgtccatgattggagagttgagcttcttccttggacttcaaatcaagcaactccaggatgggacgttcgtgagccaaaccaagtacattaaggatctactcaagaggtttggcttggaggatgcgaaacccatcaagacacatatggcaaccaacgggcatctcgaccttgatgagggaggtaaaccagtagatttaaagctttatcgttctatgattgttagcttgctttaccttaccgcatctaggccagatatcatgtttagtgtttgcatgtgtgcacggtttcaagccgctcctaaggagtgtcacttagtggccgtgaaaaggattctaagatatttaaagcattcctctactattggcttgtggtacccaaaaggtgctaaatttaagcttgttggctattccgattcggattatgccggttgcaaagtggatagaaagagcacatcctgtagtttccaaatgcttggtagatcccttgtgtcatggtcatccaagaaacaaaactccgtagccctctctaccgccgaggcggaatatgtttcggcgggtagttgttgtgcccagttgctttggatgaaacaaatcttgttggattatggcatatccttcaccaaaaccccactcctatgtgacaatgatagtgccataaagatagccaataacccggtccaacattctagaaccaagcatattgacatacgccatcacttcctaagagaccatgttgccaagtgtgacatagtcattagccacataagaaccaaggatcaactagctgacatctttaccaagcctcttgatgaaacccgcttttgcaagttgaggaatgagttaattgtcatagacttctctaatgtggcttga

SEQ ID NO: 14400 - DNA, 4140 bp, Oryza sativa
  Clone ID: TFbOSC31509j.C1.o2.fg
atggcaagccgacgtcgggcaacaaccagcaatgacgaaactcagacacccgacttaaccactctggccggagttatggccacccaaactcaacttctgcaagctatcgcgaacaaccaaggcaaccgcggagggtcaagctttggagagtttatgaggaccaagccacccacattcgccacagctgaagaacctatggatgctgaagattggttaaggatcattgagaagaagctaactcttgttcgagtacgtgaggccaataaagtgatctttgcggcaaaccaattggaaggaccagccggagactggtgggacacgtacaaagaagcccgagaagaagatgctggagaaccaaactgggaggaatttaccacagccttccgtgacaacttcgtgcctgccgcggtgatgcggatgaagaagaatgagttcaggagactacggaaagggaataccacagtacaagagtacctgaaccgtttcactcagctagcgcgctacgcgactagagatcttgccgacgaggaggaaaagatcgacaaattcattgaaggcttgaatgacgagttacgcgggcccatgattggacaagatcacgatagtttccagagtttaatcaataaggtcgttaggctggagaacgaccggaaggtcgtggagcacaatcgtaaaaggaggcttgccatgaaccgctcgcctcagaccgcaccccagcgtcctaaagggacaacctcctcggcatggagaccaacagtggtgacaaccagtcgacctgccgcctccagcaatttccacaggtcggttaccattcagaaccgagctcctgcaccgaatcaggccgccactggatcagtaaggacaggaagctgtttcaactgtggagagtacgagcatttcgccaataaatgtcctcatccaaacaagacacccattcgcaccggagctaatgcaacggctattcacgggactgctacccctgctgctggacgaggtctattcaggactccgcagactaacaggaccgctaccggatttggacgcgggcaagtgaaccacgttcgagctgaagaggcccaggaagaccaaggcgtactgatgggtatgttttcactcaactccactccagttaaagttctcttcgattcaggagcatcgcattcatttatatctttgaaagcaagtcaacaacacaatttaaccagagttaaactaagacaaccaatgttagtacattcacctggggttgagatagcagtggatacagcttgcattgacgtacccatccgccttagggatgtggtatttctctacaatcttatggtgctaataccccaaactcttgatgtcattttgggtatggattggttagcaaagcatagaggaataattgactgtagacatagagaagttaccctgaccacaccctggggatcggatatgagagcaaccatggatcaagatcctaggctaaccgaacgtgccggaggtatatttaccatgctacccctaaagggaatgcccgtagtgcagcgatttcctgatgtgttcccagaagatttacctggaatgccaccagatcgtgacatagagttcattattgacctgatacccggaactgcctccatatccaagagaccatatcagatgccggtcaatgagttagaagaacttaaaaagcaaatcagggagttgcaagagaagggatttgtacgccccagttcatcaccttggggagccccagtgttatttgttaaaaagaaagacggtagcatgagaatgtgtgtagactaccgatcactgaacgaagtaactattaaaaacaagtatccactaccacggattgatgatctttttgatcaactcaacggagctaaggtgttctctaagattgaccttcggtcaggataccaccaattgaaaattagaaccggggacatacccaaaaccgcgttctcaacatgctatggattatatgagttcaccgtaatgtcgtttggtttaaccaacgctccggcatactttatgaatcttatgaacaaagtgttcatggactacttggacaaatttgtggtggtattcatcgatgatattctaatctactctaaagatgaggaagaacatgcggaacacttgcgattggtactcgagaaacttcggaagcataagttatatgcaaaattcagcaagtgtgagttctggttaaaagaagtcgcttttctaggccacgtaatctcggccggtggagtagcagtggatcctgctaaagtagaggctgtcacggaatggaaagcacccaaatctgtgactgaaattcggagttttctaggcttggctggatactaccgacggttcattgaagggttctctaagatagcccgaccaatgacacaactactcaagaaggaaaagaagtttgtgtggtcagaacagtgtcaggaaagctttgagcagctcaaagaaaagctgacctcggcacctattttagttcttcccgacatcaggaaagactttgttatatattgtgatgcttcaaggcaaggactaggaggaagacattatctaattggaaaccattgcgatatctacactgaccacaagagtctaaagtatatcttcacccagtcagatctcaacttgaggcaaaggcgatggttagaattaatcaaggactatgatttagaggttcactatcacccaggcaaagcaaacgtggtggccgaagctctgagtcgtaagagccattgcaatcatctgagaatggaagggatggtccctgagcttagggaggaaatagctcagctgaacctacatatagtacctcgtggacggataaacaccctggacattcaacctcttttgagaacccaaatagaagaagcccagaaggacaacgaggaagtccgagaggtgaaggaacgcttagctgcaggacgtgcaaaggaattttcaaccgacgaaaaagatgttctatggtataaaaagagaatttacgtacccgaacagggtggactgaggggattaattttaaaggaagctcacgaatcggcatattcattgcaccccggaagtacgaagatgtaccaagatctgaaggaaggatactggtggcccaacatgaagagagatgtggtggaatacgtagcactctgtgacgtgtgccaaaaagtgaaggctgagcatcagcgaccggcaggcttgctgcaaccccttaggattcccgaatggaaatgggatgagatagtatgtcttcatggtgtacctaagaaaattatatctgatcggggcacacagtttacctcacatttctgggagaaagtccatgaagccctaggaagttacctcgcagttagcacagcttatcatccccagacagatggccagacggagagaaccaaccaggtcctggaggacatgctgagggcttgtgctctggattttagcaaggactgggagagatgtttgccctacgccgaattctcctacaacaacagctttcaagcaagcctaaaaatgtcaaccaatgaggcattgtttggtcgacaatgtcgtaccccgctaatgtggtccgagactggagaacgggcggtatttggacctgacattattcaagaagccgaagaaaaggttcgcttgatccgtgaccgtctaaaagtagcacaatcacgacaaaagagttacgccgacacccgaagaagaaacctggaatttaaggagggagattacgtttatctaaaggtttctccgatgagggaaacaaaaaggtttaaggtcaaaggaaaactggcaccaagatatgtgggaccattccagatcatcgccaagcgaggagaagttgcatatcagttacagttaccagagaatatcgcggatgtgcacccagtcttccatgtgtctcagctaaagaaatgtttacgagtgccggaagagcaagctccgctggaagagattcacattagcaatgatctcacatatccagaacacccgatccggatattggatgaagccgaaaagaggactaggagcaaagtgtggcgtatgtacaaggtacaatggagcaatcacactgaggatgaagccacatgggaaagcgaagaattcttgaggacggagtacccgcatatattcgaaaactggtaa

SEQ ID NO: 14401 - DNA, 4293 bp, Oryza sativa
  Clone ID: TFbOSC400100j.C1.o2.fg
atggcaagccgacgtcgggcaacaaccagcaatgacgaaactcagacacccgacttaaccactctggccggagttatggccacccaaactcaacttctgcaagctatcgcgaacaaccaaggcaaccgcggagggtcaagctttggagagtttatgaggaccaagccacccacattcgccacagctgaagaacctatggatgctgaagattggttaaggatcattgagaagaagctaactcttgttcgagtacgtgaggccaataaagtgatctttgcggcaaaccaattggaaggaccagccggagactggtgggacacgtacaaagaagcccgagaagaagatgctggagaaccaaactgggaggaatttaccacagccttccgtgacaacttcgtgcctgccgcggtgatgcggatgaagaagaatgagttcaggagactacggaaagggaataccacagtacaagagtacctgaaccgtttcactcagctagcgcgctacgcgactagagatcttgccgacgaggaggaaaagatcgacaaattcattgaaggcttgaatgacgagttacgcgggcccatgattggacaagatcacgatagtttccagagtttaatcaataaggtcgttaggctggagaacgaccggaaggtcgtggagcacaatcgtaaaaggaggcttgccatgaaccgctcgcctcagaccgcaccccagcgtcctaaagggacaacctcctcggcatggagaccaacagtggtgacaaccagtcgacctgccgcctccagcaatttccacaggtcggttaccattcagaaccgagctcctgcaccgaatcaggccgccactggatcagtaaggacaggaagctgtttcaactgtggagagtacgagcatttcgccaataaatgtcctcatccaaacaagacacccattcgcaccggagctaatgcaacggctattcacgggactgctacccctgctgctggacgaggtctattcaggactccgcagactaacaggaccgctaccggatttggacgcgggcaagtgaaccacgttcgagctgaagaggcccaggaagaccaaggcgtactgatgggtatgttttcactcaactccactccagttaaagttctcttcgattcaggagcatcgcattcatttatatctttgaaagcaagtcaacaacacaatttaaccagagttaaactaagacaaccaatgttagtacattcacctggggttgagatagcagtggatacagcttgcattgacgtacccatccgccttagggatgtggtatttctctacaatcttatggtgctaataccccaaactcttgatgtcattttgggtatggattggttagcaaagcatagaggaataattgactgtagacatagagaagttaccctgaccacaccctggggatcggatatgagagcaaccatggatcaagatcctaggctaaccgaacgtgccggaggtatatttaccatgctacccctaaagggaatgcccgtagtgcagcgatttcctgatgtgttcccagaagatttacctggaatgccaccagatcgtgacatagagttcattattgacctgatacccggaactgcctccatatccaagagaccatatcagatgccggtcaatgagttagaagaacttaaaaagcaaatcagggagttgcaagagaagggatttgtacgccccagttcatcaccttggggagccccagtgttatttgttaaaaagaaagacggtagcatgagaatgtgtgtagactaccgatcactgaacgaagtaactattaaaaacaagtatccactaccacggattgatgatctttttgatcaactcaacggagctaaggtgttctctaagattgaccttcggtcaggataccaccaattgaaaattagaaccggggacatacccaaaaccgcgttctcaacatgctatggattatatgagttcaccgtaatgtcgtttggtttaaccaacgctccggcatactttatgaatcttatgaacaaagtgttcatggactacttggacaaatttgtggtggtattcatcgatgatattctaatctactctaaagatgaggaagaacatgcggaacacttgcgattggtactcgagaaacttcggaagcataagttatatgcaaaattcagcaagtgtgagttctggttaaaagaagtcgcttttctaggccacgtaatctcggccggtggagtagcagtggatcctgctaaagtagaggctgtcacggaatggaaagcacccaaatctgtgactgaaattcggagttttctaggcttggctggatactaccgacggttcattgaagggttctctaagatagcccgaccaatgacacaactactcaagaaggaaaagaagtttgtgtggtcagaacagtgtcaggaaagctttgagcagctcaaagaaaagctgacctcggcacctattttagttcttcccgacatcaggaaagactttgttatatattgtgatgcttcaaggcaaggactaggaggaagacattatctaattggaaaccattgcgatatctacactgaccacaagagtctaaagtatatcttcacccagtcagatctcaacttgaggcaaaggcgatggttagaattaatcaaggactatgatttagaggttcactatcacccaggcaaagcaaacgtggtggccgaagctctgagtcgtaagagccattgcaatcatctgagaatggaagggatggtccctgagcttagggaggaaatagctcagctgaacctacatatagtacctcgtggacggataaacaccctggacattcaacctcttttgagaacccaaatagaagaagcccagaaggacaacgaggaagtccgagaggtgaaggaacgcttagctgcaggacgtgcaaaggaattttcaaccgacgaaaaagatgttctatggtataaaaagagaatttacgtacccgaacagggtggactgaggggattaattttaaaggaagctcacgaatcggcatattcattgcaccccggaagtacgaagatgtaccaagatctgaaggaaggatactggtggcccaacatgaagagagatgtggtggaatacgtagcactctgtgacgtgtgccaaaaagtgaaggctgagcatcagcgaccggcaggcttgctgcaaccccttaggattcccgaatggaaatgggatgagataggtatggattttattgttggattgcccaaaaccgcaacaggatatgattctatttgggtgatcgtggatcgactcaccaagacggcgagattcattcccgttaagacaaattatagcagtgctaagctagccgagttatacatgaccaggatagtatgtcttcatggtgtacctaagaaaattatatctgatcggggcacacagtttacctcacatttctgggagaaagtccatgaagccctaggaagttacctcgcagttagcacagcttatcatccccagacagatggccagacggagagaaccaaccaggtcctggaggacatgctgagggcttgtgctctggattttagcaaggactgggagagatgtttgccctacgccgaattctcctacaacaacagctttcaagcaagcctaaaaatgtcaaccaatgaggcattgtttggtcgacaatgtcgtaccccgctaatgtggtccgagactggagaacgggcggtatttggacctgacattattcaagaagccgaagaaaaggttcgcttgatccgtgaccgtctaaaagtagcacaatcacgacaaaagagttacgccgacacccgaagaagaaacctggaatttaaggagggagattacgtttatctaaaggtttctccgatgagggaaacaaaaaggtttaaggtcaaaggaaaactggcaccaagatatgtgggaccattccagatcatcgccaagcgaggagaagttgcatatcagttacagttaccagagaatatcgcggatgtgcacccagtcttccatgtgtctcagctaaagaaatgtttacgagtgccggaagagcaagctccgctggaagagattcacattagcaatgatctcacatatccagaacacccgatccggatattggatgaagccgaaaagaggactaggagcaaagtgtggcgtatgtacaaggtacaatggagcaatcacactgaggatgaagccacatgggaaagcgaagaattcttgaggacggagtacccgcatatattcgaaaactggtaa

SEQ ID NO: 14402 - DNA, 4605 bp, Oryza sativa
  Clone ID: TFbOSC9141j.C1.o1.fg
atgtcggcgcacgggaacgtgtcgtggggctgtgtcttgtgggtacagttgtacacctctgatcagagtaaaactattcgaatagccgtgcccgcggttatgggcggtcgaccagattcacaatgggtagtactcagtcttgctctcttttcccctactccagagctaaagttcttctcagctggagctgtctcagaaaggtttgctgcttgtgggttagccggcggtcgatatcatgtgttagtgatggtgaagacaaggaatgatccccgtgactccaacggcgccagtggcagcgaagagcagatcaatggagcacataccagtggtgcatctagcaacattccatctccaccgcccgagaacccaatggtcattcagatgatgacaatgatgatgcaacagatgcagcaacattaccatgagatgttgcagcaggcgcagcagaaccagcagtctggtcctccaccattacatttgtccaagctgttagacttcctctatatcaagccacttactttctcaagcaccaccaacctaatggaggccaacgactggctccatgctattgagaagaaactgaaccttctgcaatgcaacgaccaagagaaggttgcttttgctacacaccagttgcaaggaaggcacagattcccgaggggatcatggcacaaaagaagagagttccgtgcactgcaacaaggaaccagaacagttacagaatacctgcatgagttcaaccgccttgtgcgctacgctcctgaggacgtgcgcaccgatgccaagaggcaggagaagtttttgtttggtctggatgatgaattgaccaaccagctgatctcaggagtttacgaggacttcaagaagcttgtggacaaggctatccatcaggaagagcaacgcaacaaaatggaccgtaaaagaaaggcagctcagttcaggactcctcaggggaacagtcagaagcctcgcttcatgacgggacagctgggtgagccttccaccctgatcgtccgtcagcaccgtccctaccactcgggtaacttcaacaacgactacaacggtggcagtcacaacagtagtgagcagcaccaccacaactcaactccacccccattaatggcaccagctgagtcagaactaccagctatgtcagcccagtcagaacagctcaagaaggagtctgcaggaaagccaggaccctgcttcaactatggcaagcacggccactttgctagcaagtgtccgaagctaaagcgtgctggacccaagttcgtccaggcccgcatcaatcatgcgtctgcagaggaggcacaagcagcaccagaggtcgtgctgggcacgtttctagtgaactcatatccggcaacagttctttttgattcgggtgcaacgcattctttcatttccaagaagtttgctgggacacatggattgtcggtagtggaacttaaaataccaatgcgggttcatacccctggaaatgacatgaacaccgcacactactgcccctcgatgactatagagatcaaaaggtcaccgtttctatccaaccttatccttcttgaatccaaagacctagatgtcattctcggaatggattggttgaccagacacaagggagtgatcgactgcgcgagtcgcaccatcaccctaaccaacgacaaaggggagaagatcaccttccgttctccagtgtcgcagaagtccgtagcaagtctgaatcaggctgctattaaggaacagacagaaatagtggagaaaagtcctaaggagttagaggatatccctatagtacaagagtatcctgaggtgtttcctgaagacctcactacaatgccaccgaagagagaaatcgagttctggattgatttggcaccgggaactgctccgatctacaagaggccttataggatggcagctaacgagctagcagaagtcaaagagcaagttgatgaacagctgcggaaaggatacatccgactgagtacttcaccttggggtgccccgattatctttgtggagaagaaagataagaccaagaggatgtgtgtcaattatcgcgcactcaatgaggtcattatcaagaacaaatatcctttgccaaggattgatgacctgtttgaccagttaaagggtgccaaagtgttttctaagatagacctacgatcaggctatcaccagttgagaattcgggaagaggatattcccaagacagccttcactactcggtatgggttgtttgagtgcacagtcatgtcttttggactcaccaatgcaccagctttcttcatgaacttgatgaacaaagtgtttatggagtttttggacaagtttgtcgtggtgttcattgacgacatacttatctattcaaagtctgaagaggaacatgagcagcacctccgtctggtactcgagaaattgaaggagcaccagttatatgcaaagttcagtaagtgtaacttctggttgtcggaagtcaagtttctgggtcacgtcattactgctcaaggtgtggcagtggatccgtcgaatgtggagtcagttactaagtggaccccaccaaagacaatttttcagatccggagttttcttggacttgcgggttattaccgtcggttcatcgaaaatttctctaagattgccagacccatgactcagttgctgaagaaagatgaaaattttaagtggtcagttgagtgcaaccaaagttttgaagaacttaagaagaagttagtatctgcaccagttctaattctgccggatcagatgaaagacttccaggtctactgtgatgcatctcgccaagggctaggatgtgttttgatgcaagaaggcagagtggtcgcatatgcttcgcggcagttgcgtccacacgagaccaattatcctactcatgatcttgagttagtagcagtggttcacgctttgaaaatgtggcggcactatcttattggcaactgctgtgaagtctacactgatcacaagagtctgaagtatatcttcactcagcctgacttgaacctccgacaacgaagatggctggaattaattatagattatgacatgagcattcactaccatccgggcaaagccaatgtggtggcagatgcattaagcaggaagagctactgcaatgctttgggcaccgaaggcatgtgtaaggaattgcagcaggagcttgaacatctcaacttgggaatcgtagaacacgggtttgtggccgctctagaggcgcggcctacgcttatggatcaagtcagagcagctcaaataaatgatcctgaaatagctgaactgaaaaagaatatgagggtcagaaaagcccgggatttcctggaagatgaacatggcacaatctggctgggagaaagattgtgcgtatgcgtacctgatgacaaagagctgaaagatctgatactcaccgaggctcatcagactcagtactccattcatccgggcagtaccaatatgtaccaagatctcaaggaaaaattttggtgggccagcatgaggagggaaatagctgaattcgtcgcactctgcgatgtttgtcagcgggtcaaggcagaacaccagaggcccgcaggtttgcttcaacctcttcagattccggaatggaaatgggaggaaattgggatggatttcttcactggtttacccagaacatcatcgggacatgactcaatctgggtagctgtggaccgtctcacaaaggtcgctcatttcattcgagtgcataccacatatacggacaaaagattagcagagctttacctctcaaggatcatgtgtttgcatggggtacccaagaagatcgtatcggatcgagggagtcagttcacttcaaagttctggcagagactacaagaagaattgggaacccgtttgaatttcagcacagcttatcacccgcaaactgatggtcagaccaagcgagtcaaccaaatattggaggatatgctgcgagcctgtgcactcgattttggcggagcttgggataaaagcctgccttatgctgaattctcttacaacaatagctaccaggccagtttgcaaatggcaccgtttgaagcattggaaagattgaggatcgctcagtctcggcagaagagttacaccgataaccgccgaagggagctcacttttgaagcaggggattatgtgtaccttcgtgttactccgctccggggagtacaccgtttccagacgaagggcaagttggcaccacgctttgtgggaccatacaaaatcttggaacgaagaggagaagtcgcgtatcagctagaactcccgtccaacatggctggtatccatgatgtgttcgatgtgtctcagttaaagaagtgcttaagagtaccagaagaacaagccaattcggagcacatcgacattcaagaagatctgacttatgtggagaagccagtccgcatccttgagaccagtgaaagaagaaccagaaacaaggttaccaggttctgcagggttcaatggagccaccactccgaggaagaagcaatatgggaaagggaagatgagttgaaggccgcccatccgcacctcttcgccagctcttccgaatctcggggtcgagattccatttaa

SEQ ID NO: 14403 - DNA, 4246 bp, Oryza sativa
  Clone ID: TFbOSC30406j.C1.o2.np
cttggtgttgaccggcggcggcgacggcacggtgtggcaggaacggtggtctgcaaagggaaaaggagggggtgctggatctacttatagaggaggacagggaggcgggcgacagctcgtcgtgcagcggattgttaaggaagatggctccgtctactatccaatactcagacgctcaaattactccgattgggcggtgttgatgcgagtcaatctccaggctcaaggtctgtgggatgctgtcgacaccggcgatgtcccgtatcaggaagattgccaggcgctttcagccatcttgcgagcggtgccggctgagatggtccggccgcttgccgagaaggacagcgccaaagacgcctgggatgcgctcaaatccatgcgagtaggcgcagatcgtgttaaggagtcccgagcacagaagctgcgccaaacttttgagtccatgcgattcaagaatggcgaacacctggaggatttcagccttcgtctccagtccttggagatgatctgtctgaagagaaggttgtttgaaaattgcttcgcgtcgttccccggaggtatcgccaaatggctctatcgattgaaaccttgattgatctcactttgctttctattgaggatctgactggccggcttctcaccgtcgacgatcaccccgactctgatggcgaggacgcgggtcaggtgctcttcagcgaaaaggaggcccctgctcactcaaacaaggaagctgggcagaactcagccggggggagggcgtccagctcacggcaaccacaccgcagcaggcgcgagcgcgacggcaacggctccgacggcaagtcaggttcgtcccaagcggcaaaccgcaatgtgtccaaggacaaatgccggtactgtggcaaacttggtcactgggccaaggactgttgcaaggcgaagcgagaccgcgagaaactggctcaggcaaaccttctcatcaccgagcctgctcaagccgcggacgaaggggagccgacactgctgatggcgcaagtgtgcgagcttgcccctgctaccgatcctgtcattactgacggggaggtgacactgaaggaggaacgtgctcacgtttctcttcaggatgaaggaaagcccgttgatctagactggatccttgacacgggcgcttcaaatcacatgacgggctaccgtgatgtgttctccgagcttcacaccaccgtgcgcggcactgtcaagtttggtgatgcgtcgagagtctggattgaaggacgaggcatggtgctgttcgcttgcaagaatggtgaccactgcgcgctcactagcgtctactacatccccaagcttcggagcaacatggtcagccttggctagcttgatgaggcgcattgcaagacggtgatcgaggatggtgttctcactttgcatgatccacagcgacagctgctgtgtagggtgcgccaaggagttgggcgcctctacgttctccacgtcgagctggcgcaaccggtttcccttctcgcaaaggggaaggatcaagcctgggtctggcacgctagatacgggcacctcaacttcgacgctctccgctcactggcgagccgcggcatggtgcgcggcattcccactctggagcgggttaccaaggtctgcgacggctgcctaataagcaagcagcgacgagcgccgttcccaacggcggcattgcatcgcgccactatccatcttgatctggtgcacggggacatctgtggacccatcacatcgtcgacacatggcagtaaaaaatacttcctacttctgattgatgatctaactcgctacatgtggttgtttctgttaacatcaaaaagcgaggctcccgctaccatcaagcggttcaaggcaggagtggaggtggagaccggctgcaagctgcgcgttctccacactgatcgaggaggggaattcacctctgtcgagttcgggctatactgcacgaacgaaggcgtcgccaggcagctaacgacgccatactctccacagcaaaacagcgtcatcgagcaccgcaaccaaacggttgtggccatggccagatgcatgatgaaggccaagaacatgccgggggagttctagggcgaggcggtcaccactgccgtctacatcctcaaccgggcgccgacaaagagcgtccgcgacaagacaccgttcgagtcatggcacggtcaaacacctgttgtgcactactttcacacatttggctgcgtcgtctacgtcaaggaggtgaaaccacacatcaagaacttgatgatcggagcaaggtgatggtctttctcggctacgagccgggttcaaaggcatatcgtatatacgacccggtggccaagcgcatcgtcgtgagccgtgacgccgtgttcgatgaggcggcatcatggccatgggcgtcacccggggaggaggacgggggaacgtctcctcaggaaaccttcaccgtgcgctacgaggtagtggcggtggacgtgccgtcccgccactccgactccatgtcgtcgccggctcacatgggaacaccagtgccatcaatctctgcgtcaccgggtgtcctagcggtggagtttgtgtcgctgcctgcggaaacacctgatgtcgacgacgacagcacagggccacgtcgtttttggatggtggccaaaatccttgacactacctcgccaattgagctcgactccgacgagcttcatgtggctgctgccgaggaaccaagcaaccacgctgaggcggcacaggacgcactctggatgcgagcgatgcaggagtaactcaagtccatcgaggagaacaacacgtggactctcgctgatctccctgctgacaagcgtcccattggcctgaaatgggtgttcaagctcaagaaggacgagacgggcgcaattgtcaagcacaaggcccgcctggtcgctaagggttacgttcagcggcaggggattgatttcgacgaagtattcgcccctgtcgccagaatggaatccgtgcggctgctactcgccattgcagctcaccttgggtcgtctgtgcatcacatgaatgtgaagtcagccttcctgaacggagagctagaggaggaggtgtacgtcgcccagccactaggcttcatcgacgacaagcacccacatcaagtcctgcgcctaaacagagcactttatggtctgcgtcaagctcctcgtgcctggaacgcgaagctggatgttagtcttcatgaactcgggttcacacggggcatcacagaacatgctgtgtacacgcgcgggaccgggaacgcgcggctaattatcggcatatacgtcgacgatctcatcatcaccggcgctcactctaaaacaattcagagtttcaaggaggagatgcactccctattccggatgagtgatcttggattactcagctactacctcggcatcgaggttcatcaaggcaacgatgggatcacaataaaccaatccacttatgcgcagaagcttttgaagatgggtggcctggcggcttcagcttccgttccaatggaacccagattgaaactgacgaagaacagcgatcgaccaagtgttgattcaaccttttatcgcggcttagtggggagtttgcggtacctggtgcattcacggccagacattgctttcgcggtgggttacgtcagccgattcatggagtcaccgcgcaatgatcatctcacggcggtgaagcacattctgcgctatgttgcaggtactatgaactatggttgcaaatttgtaaattcaggagaagagggaatccatttgctaggattttctgacagtgatttggggggagatgcgcacgatcggaagagtacctgtggtgctctcttcttcctcggctcaagcccgattgtatggcagtcccagaagcagaaagtggtcgctctttcctccagtaaagctgaatatatcgccgccactggagcagcgtgtctcggcatatggctggctcgattgctagctgaggtgctgggaagtgatccagggaaggctctcctcaaggtcgacaacaagtcggcgatctccctgtgcaagaatccggttttccatgaccggagtaaacacatcgatacaaggtaccactttatcaggcaatgcattgaggagaaaaagttgaggtggagttcgttccttcggacgaataggttgccgacattctcacgaagccactcggacgaatcaagtttcaagagtttcgcagtcaggcgggcatggatcaagctcatcaggaa

SEQ ID NO: 14404 - DNA, 1113 bp, Oryza sativa
  Clone ID: TFbOSC419957j.C1.o9.fg
atgaaggcgcaggcagctgcaacaatacgcttgagtctctcggattctgtcatgtaccaggtcatggacgaaaaatcaccgaaggaaatttgggacaagttggcaaacctgtatatgtccaagtcgctaacgagtaaattgtatctcaaacaacagctgtatggtttgcagatgcaagaggagtcagatcttaggatgcacgtggacgtcttcaatcagttgattgtggatctaagtaagttagatgtgaaactggatgatgaagacaaggccataattcttctgtgctcgcttccaccgtcttatgaacatgtggtgactaccctgacgtacggcaaggatactgtcaaaactgaggagataatttcgtcgttgcttgcacgagacttgagaagatcaaagaaaaacgaggcaatggaggcttctcaggctgagagtttgctggtcaaggcaaagcatgatcatgaagcgggggtgtcgaagagcaaggagcatgatcatgtttgctataagtgtcatgagtttggacatataaggaggaattgcccattactgaagaagaggagaagtgcgagtgcaagtttagtagcccatagtgatgattcagagagcagcagtcatgagattctcacagtgtctaacgagaagtctggagaagcgtggatgttggactcagctagttcctatcatgtgacatcgaagcgggagtggttctcttcatacaaatctggtgattttggtgctgtttacttaggtgatgacacgagttatcgtgttgttggagtgggcgatgtcaaattcaagatgtatgatggaaatgaggtgctactttcatatgtgagacacgtgctgggactaaggaagagtttgatttcgcttggaagcctacatgagacgggttggttgtatcaggtggattctgataggaagaccatgaatatcatgaaggatggcaagactgttatgactggtgagaggacaagctcatgtttgtacaagttacaagggagtgctgttgcaggtggagtcatggaaaatggttatgctggtgttgctgtgcacgatcctgaaggcggtgagcctggcgtaggctcgtcgggcgactcggcgtga

SEQ ID NO: 14405 - DNA, 4851 bp, Oryza sativa
  Clone ID: TFbOSC900379j.C1.o17.fg
atgtcgggtcaaacggggaatggcaaggatggtgataagggagctacgtttccttatgactatccctccacatctacatcttatgtgagcacctatagcggcaaagctccgtacttcaatgatacggactatgccacttggaaacataagatgaagatgcatttgaaatctattaaccctttgatttggagaatagtcgaaaaaggctatgttttgcagaatcccgaggaacccaccaaagaggacgacgagaacgagcacaagaacgctcaagccgctaatgcaattcttagcgccttgagtggaagtgagttcaaccgtgtggacggcattgagagtgccaaagtgatttgggacacgcttcggaatttgcatgaaggcacggatagtgttcgcgagtccaaggtggagattctcaaggggcaatttgagcggtttgtgatgttggatggtgagagtccaagcgacatgtatgatcgattgagcaagatcgttaatgagatcaagggacttggctccaaggacatgaccgatgaggttgtggtcaagaagatggttcgggcaatcactccaaggaactctaccttggtgaccatcattcgtgagcgtccggactacaaaactctcacacctcatgacttgctcgggcgtatccttgcccatgacatgctcgagcaagagtccaaggaggtcatccaatacatcaaccaaacctcaatcacaagcatcaagaaggaagacttggcattgaaggcgaaggaagaagaagaagagagtcgcaagagcaagagcaaggcggagatcgatgatgaagagatggctctcttcgtgaagaagttcggcaagttcatgaagcaaagcggcttcttcaagggaagttcgtccaagtattcctccaacaagtcaagtggaagacactccgcaagggtgtgctatgtgtgcaaagagcccaggcacttcattgcggattgcccccacatcaaggattgcctccacttcaaggaagacaagaagcttgagaagaaggagaagcacaagcatagcaagcatgatcgctatggccaagctcaccttgggatgatcttcggctccgactccgagtcaagctcaagtgatgaagaaggagttgccacgttcgccgtcaagccttcatcaccaccgagattcttcaactactcaagtgatgaggacgctcccatttgcctcatggcaaaggagtctaaggtaccctctcccctcaactcatttaatgttgatcttgttagtgatgaggaggaagatgttgaggatgaggttatggatgacgagttgttcaaatccataaccaaggaatctataccacacttgagtgagttgcttgggagacttgaggaccaatatgcaactcttgagaggcaagaggctttgctcattcgtgagaaaaagcgatctcatgaactcaagagtgagcttgctaaggagagagagaaaaatgaggctttggtacggctctacaagcaaaccaaagagtctcatgctaatcttgaggtggcgaacgctcaacttcaagagagagtggatggcttggacaaagcatacctctctcttgaagaaaagttcgaaaccttaaagaatagtgtctctctccctatgctttgcaaaagcaaaatgagaagcttatgtgactctttcacaatggcactacttaagtgccatatgggtagtaaggccctaaaggagtacctaggctatcaaagggacaacttcaaccatgagggtcttgggtatgttcctccaccaaaaggaaaggtggacaagagtgtgatgatcaagaggccccaaggtcttagcaattttattaaggccaaaagtatccttcctaatgattatgcttcacattgttcttttgatgcatcttatgttcttaggaagaatgctagtggtcgtgttgttgctaagtatgtaggcccgaggggcaaaaatgtttccattaagagagttctttgggtgcctaaggcacttgtcactaacatgagaggacccaagcaagaatctctctccggtggaagaagttgggtgattgatagtggatgcacaaatcacatgaccggagaagaatcaatgttttgctcccttgatctaaatggcacttcgcaagagaacatagtctttggggacaatggaaagggaaaagtaatgggattggatagggtgtgtagcgcgtgtcaagccggaaaacaaattggagctcatcacccggtcaagaacgtaatgacaactacaagaccgttggaacttctacacatggacctcttcgggccaattgcttatctaagcattggaggtaacaaatatggtctcgttattgttgatgacttttcacgcttcacgtgggtgttcttcttgcatgacaagagtgagacacaagcaatcttcaagaagtttgcaaaaagagcccaaaatgagttcgacctcaagatcaagaacattcgaagcgacaacggcaaggagttcaagaacatgtgcatcgagagtttccttgatgaagaaggcatcaagcacgagttctcggctccatattcacctcaacaaaatggagtagccgagaggaagaataggactctcatcgagatggcgaggaccatgttggatgagtacaagacatcggactgtttttgggccgaagccgtcaacaccgcatgccacgccattaaccgcctctatcttcaccgccttcttaagaagactcccgatgagcttcttaccggtaacaaaccaaatgtctcttactttcgtgttttcggtagtaagtgcgacattcttaataagaaggctaggtcctcaaagtttgctcctaaagttgatgaggggttcttgcttgggtatgggtcaaatgaatgcgcataccgcgttttcaacaaaacctccaatattgttgagatcgcgcgtgatgtgacatttgacgaaactaatggctctcaagtagagcaagttgactcacatgtgttaggtgaagaggaggaccctagcgaagcaatcaaaagattggctcttggagacgtgcgtcctagggagccacaacaaggggcctcttcctcaacacaagtggagccacctacatcaacccaagccgacaatccctccacttcaagcttggatcaaggtgaagaaggcgagcaagtgccaccctctccgataaatctagctcacccaagaatccaccaaagtatccaacgagatcaccccaccgacaacatcttaggagacatcaacaagggagtatccactcgttctcgtattgcaaatttttgtgagcattactcgtttgtgtcttctattgaacctctaagggtggaagaagctcttaatgatccagattgggtgatggcgatgcaagaggagttgaacaatttcacccagaatgaagtgtggactttggtggagcgacctcggcaaaatgtgattggcacaaagtggatctttcgcaataagcaagatgaggccggggtcgtaataaggaacaaggcgaggttagtggcgcaagggttcacccaaatcgaaggattagattttggtgaaacttttgcgccggtagctagacttgagtcaattcgcatattgcttgcttttgctactaacctcaattttaagctatatcaaatggatgttaaaagcgccttcctcaacgggcccatcaacgagttggtatacgtggagcaaccaccgggcttcgaggatccgaagtatcccaaccacgtgtacaagctccacaaggcactctacgggcttaagcaagcccctagagcttggtatgagtgttttcacaattttcttgtgaaaaacggctttgagatcgggaaagccgattcaactctttttactaaaagacatgataatgatatttttgtgtgccaaatatatgtcgatgacattatatttggttctactaacaagtcttttagtgaagagtttagtaggatgatgaccaaatgttttgagatgtccatgatgggtgaattaaagtttttcctcggccttcaaatcaagcaactcaaggaaggaaccttcatttgccaaacaaagtatttgaaggacatgctcaagaagtttggaatggagaatgcgaagccaatccacactcccatgccatcaaatggccacctcgacctcaacgagcaaggtaaagacgtcgaccaaaaggtataccgttccatcattggctcactcctttacctttgtgcatctaggcccgatattatgcttagtgtgtgcatgtgtgcaagatttcaagccgctccgaaggagtgtcaccttgtggccgtgaagagaattcttagatatttagtgcacacatctaatcttggtctttggtatcctaagggagcgaggtttgatctcatttgttatgctgatgcggattatgccgggtgcaaagtggataggaaaagcacatcgggtacttgccaattcttgggtaggtcccttgtttcttggtcttccaagaagcaaaactccgtcgccctatccaccgccgaagcggaatacatttcggcggggagttgttgtgctcaacttctttggatgaagcaaaccttgagagactatggcctcaatgtgtccaaaatcctactcctatgcgacaatgagagcgccattaagatagccaataatcccgtacaacattcccgaaccaaacatatagatattcgccaccatttcttgagagaccattccacaagaggcgacatagacatccaacatgtgagaaccgacaaacaattggcggatatcttcaccaagcctctagatgaagctaggttttgtgagttgagaagtgaactaaatatcttggattctcggaatgtggcttga

SEQ ID NO: 14406 - DNA, 2216 bp, Oryza sativa
  Clone ID: TFbOSC23942j.C1.o1.np
tcccgcgatcatcatgattattatcttgttttttgggattaaaatatgctaatttatgaccaaatttccaacattccaaaaatttgataggtcttttttggtagttggttttgtggcattactaaaaccacatgctttcgatggtccaaattataaaagatggaaagcatgtgcactattgtggttgatggctatgcaatgcttctttgcttcacggggcaagatgtccgaacaacctgtctcacctgagaaggaggctaagtttgaggtgacggattgcctgttccgtgtagcattaatcaatgtactagctgacaacatagtggacatgtatatgcacatgccttcagggaaggacatgtgggatgcacttgaggccaagttcggagtctccgatgctggcagtgagttgtatgtaatggagcagttctatgactacaacatggtcgatgactgatctgtagtggaacaagctcatgagattcagatgctggcaaaggaacttgagaacaacaaatgtgtgttgtcggataagttggtggcaggtggcattattgccaaattgccacattcgtggtcggactttgccacttctctgaaacacaagaggcaagagttcagtgttactgatttcattggctctttgggtgttggagagaaggcgagggcaaaagacaaccgcggctaaaaggtcgagggaggttctagcgccaatttggtgcagaagaagaacccccatgcatctcacaacaacaagaaagtcaaacctgatgtcaaacccaagacaacaatcaattctaagaagaaaggcaaggaaaaagtgaaaggcgactactttgtgtgcggtaagcttgggcattgggccaaggattgtcctgatcgcaaggacaaaaattctgcaaacatggttgttagcaatggcagaggaacaatggggtacggtaatttttacctacaattctctctatttttcactcacctaattggcgggttgataatggtgctaatagtcatttgtgtgctgacattttcctgttttcttcttatcagatcgccggaggttcttccttgttgatggggaacagatcgcttgcagctattcatggtgttggtatggtagttctgaagtttacttcgggaaagaccttgcagctgaagaacgtgcagcatgtcccctcaataaagagaaatctagttagcggctctcatcatgtagagatggttttatacttgtgtttaaatccaatagatgtgtcgtatctaaatatggaacttttattggttaaggttatgatagcggaggcttgttccgcttttctttagatgataggtgtaatatagttgtgaaccatgtaagcaatgatgatgagtccaatgtgtggcaatagccactttgccatgtgaattttggttgtatgacacgcttagctaacatgagtttaatctcgaaattcactttagccaagggttctaagtgtcatacttgtgttcaatcgaaacaacctcgcaagcctcacaagcatcagaggcgagaaatttagcacctttagaacttgttcattccgatatgtgtgaaatgaacgtcgtgttgactaaaggaggaaagaaatacttcatgacacttatagatgattgcactagattttgttgtgtacttattgaaaacaaatgatgaagcattgcattactttatgatctgtaaggctgaggtagaaaccaacttgaaaggaaaatcaaacagttggggtctgatcagggtggagagtatttttctaccgagtttacttcattttgcgaagagtttggaatttttcatgagaggatgcctctctattcaccccagtcaaatggggtagccgaaagaaagaaccgcactctaactgagttggtgaatgccatgttagacactgcgggactttccaaggaatggtggggtgaggcaatattgactgcttgtcatgtcctgaatagaatttctactaaaaaaagaagtaacatcattcgaggaatgggaaaagaagaagttaaatctctcatacttgcgcacatagggatgtttggctaaggtcaatgtgcctatagtcaaaaagcgcaaacttagactaaaaaccgtagattgtgtgtttcttggttatgttatccacggcgtgggatatagattcttaatagcaaattctagagtatcacagcagccagcgtagagttttctttcgtca

SEQ ID NO: 14407 - DNA, 816 bp, Oryza sativa
  Clone ID: TFbOSC419129j.C1.o1.fg
atgtccatcgtcgagcactccgcgtcgcgatcgatgagggaaggcggcgtgtcgctgccatacccgatgctcacctccaccaactactccacctgggcgatcaagatggaggccaacatggaggcgcaaggcatttgggatgccatcgagtccgcggctgatgatgtcgtggagaagaagaaggacaagatggcgttggcatgtctttttggggccgtccctgatgaggtgctgcagcagatcgccaacaagaagacggcgaaagaggcttgggagagcctaaagacaagatttcttggtgttgatcgagtgaagaaggcgcgggtgcaaactttgaagagtgaattcaaggcactatgcatgaagaaaaccgagaccatcgatgagtttgcaggcaaaatcagtggcctagcaaacgcaatgagtggtcttggtgcaaccatgacggacgatgagctcgtcaagaagctacttgactcagtgcctgaaaagtttttgcacataattgcagcgatagagcaattctgcgatttggacaccatgccatttgaggaggctattggccgcctcaaagctttcgaggagaggatacggaagcacagtgacaattatggggagcagcttcttctcaccacacgcaacactgatgatggtgctggtcgagcccgcagcaagaggtttgataaatccaaggtgatgtgctatcactgccaagagctcggtcattttgcgtttgagtgtccagcaaaaaagaagaacaaggagatagcgcttcttgccacagcatcaagtgatgatgaaccaactctcttgtga

SEQ ID NO: 14408 - DNA, 963 bp, Oryza sativa
  Clone ID: TFbOSC900350j.C1.o20.fg
atggagcaaacaacgttcatgaagaccaagctcaactgcatgtggagtgctgcgagaagtagccgaattgcaagcaagacaagaggagagattcccaacaattggtatcagagccaatttatgcccaagatcctgcgcttcaacaagatgtccatcgtcgagcactccgcgtcgcgatcgatgagggaaggcggcgtgtcgctgccatacccgatgctcacctccaccaactactccacctgggcgatcaagatggaggccaacatggaggcgcaaggcatttgggatgccatcgagtccgcggctgacgatgtcgtggagaagaagaaggacaagatggcgttggcatgtctttttggggccgtccccgatgaggtgctgcagcagatcgccaacaagaaaacggcgaaagaggcttgggagagcctaaagacaagatttcttggtgttgatcgagtgaagaaggcgcgggtgcaaactttgaagagtgaattcaaggcactatgcatgaagaaaaccgagaccatcgatgagtttgcaggcaaaatcagtggcctagcaaacgcaatgagtggtcttggtgcaaccatgacggacgatgagctcgtcaagaagctacttgactcagtgcctgaaaagtttttgcacataattgcagcgatagagcaattctgcgatttggacaccatgccatttgaggaggctattggccgcctcaaagctttcgaggagaggatacggaagcacagtgacaatgatggggagcagcttcttctcaccacacgcaacactgatgatggtgctggtcgagcccgcggcaagaggtttgataaatccaaggtgatgtgctatcactgccaagagctcggtcattttgcgtttgagtgtccagcgaaaaagaagaacaaggagatagcgcttcttgccacagcatcaagtgatgatgaaccaactctcttgtga

SEQ ID NO: 14409 - DNA, 1497 bp, Oryza sativa
  Clone ID: TFbOSC402013j.C1.o4.fg
atggacatctctaggacaaatgaaggctacacgagctgtggcccggtagtcgagatgtcatggtacagggctggtgtcctgctgctaggggctcaatcctgcctacctgtcccggaggttccggccgtaggtggggttgggtcggtactcttgtttatggctaggatgggttgggaactatgtcacgtcttccgtccgtataccgtggtgctaaaatgtggaatggttggcctgggttggcttgggacgagctgggacccagggtcgggttgccagttcggtctgaatcatcgtaggccttgggttaaggcaggccttaagtgcctttgtaataatatgtttaacagagaaaaaggaaagaatgtcagcgggtatgcctcaagtaactccagttttcaactcaatccaccactggcctcaagagagttaaccagggcacacccttggtccattccaagtatgcggcttagttcacagctaccattggttggaagtcaagaccaaaataagtatgtgtttgatcgagcatttgccacccaggccaatgagcttcccatgccagaagagcatgtccccttttgtcatgattgtagagaacaaggacactatgccctgaattgtccatgggtatatgctaaagaagccccttcctttggtttagcagggcagacatcgctaagccagcctcctcgcaccaagtcaagcttgcagcctagtgtgcaaagcagagagcccaatgaagagaatccattgaatcccgggaaatgctttctttctagcctttcgtaccacgtggggtcacacactaagcaagccaaaggcaagaagagtaagaatcagaagagaaaagcgccgatgcgaactgaagaagaagtacgtaagatgactattaccagcaccgaatggcctccagcagggataactattcctagacgtcaaagaggaaataccttccgaggtgcacgacagttgacccagcacctcctaagccatggtggcagagtatatgatagtgaagggtcagatcaagtctcctcggattatgaagatgagtctccccgacatctcggtgaggaagagatggaatcaaaagcatgcaaccgttgtggagaaattggacacattgctagcatgtgtctcacactctgccctcattgtggggaagaccatccaccaggtgaatgtcccacccgcaaggtcacatgttttctgtgcgaagcaccaaccattctctgcaccgacagcctcagcaaagaattgtcatcgatggaagaagttgtgtctctccccgacctactccaggccgagcaaagggcaatcaatctcaggagggcgataccaagcagaagaccgttctctgcttcgaatagcaatcagaaggaagcttctcctgtgaatgatagcaatatgcagtcctatcacatcatcacagaaccaatcaaggatgcagtcactagaacaatgccagctatacctctccagaatcagaatgagtag

SEQ ID NO: 14410 - DNA, 1248 bp, Oryza sativa
  Clone ID: TFbOSC402037j.C1.o4.fg
atgtcatggcacagggccggtgtcctgctgctagggggctcaatcctgcctgcctgtcccgggggttccggccgtaggtggggttggatgtttaacagagaaaaaggaaagaatgtcagcgggtatgcctcaagtaactccagttttcaactcaatccaccactggcctcaagagagttaaccagggcacacccttggtccattccaagtatgcggcttagttcacagctaccattggttggaagtcaagaccaaaataagtatgtgtttgatcgagcatttgccacccaggccaatgagcttcccatgccagaagagcatgtccccttttgtcatgattgtagagaacaaggacactatgccctgaattgtccatgggtatatgctaaagaagccccttcctttggtttagcagggcagacatcgctaagccagcctcctcgcaccaagtcaagcttgcagcctagtgtgcaaagcagagagcccaatgaagagaatccattgaatcccgggaattgctttctttctagcctttcgtaccacgtggggtcacacactaagcaagccaaaggcaagaagagtaagaatcagaagagaaaagcgccgatgcgaactgaagaagaagtacgtaagatgactattaccagcaccgaatggcctccagcagggataactattcctagacgtcaaagaggaaataccttccgaggtgcacgacagttgacccagcacctcctaagccatggtggcagagtatatgatagtgaagggtcagatcaagtctcctcggattatgaagatgagtctccccgacatctcggtgaggaagagatggaatcaaaagcatgcaaccgttgtggagaaattggacacattgctagcatgtgtctcacactctgccctcattgtggggaagaccatccaccaggtgaatgtcccacccgcaaggtcacatgttttctgtgcgaagcaccaaccattctctgcaccgacagcctcagcaaagaattgtcatcgatggaagaagttgtgtctctccccgacctactccaggccgagcaaagggcaatcaatctcaggagggcgataccaagcagaagaccgttctctgcttcgaatagcaatcagaaggaagcttctcctgtgaatgatagcaatatgcagtcctatcacatcatcacagaaccaatcaaggatgcagtcactagaacaatgccagctatacctctccagaatcagaatgagtag

SEQ ID NO: 14411 - DNA, 942 bp, Oryza sativa
  Clone ID: TFbOSC858j.C1.o1.fg
atgccagaagagcatgtccccttttgtcatgattgtagagaacaaggacactatgccctgaattgtccatgggtatatgctaaagaagccccttcctttggtttagcagggcagacatcgctaagccagcctcctcgcaccaagtcaagcttgcagcctagtgtgcaaagcagagagcccaatgaagagaatccattgaatcccgggaattgctttcttcctagcctttcgtaccacgtggggtcacacactaagcaagccaaaggcaagaagagtaagaatcagaagagaaaagcgccgatgcgaactgaagaagaagtacgtaagatgactattaccagcaccgaatggcctccagcagggataactattcctagacgtcaaagaggaaataccttccgaggtgcacgacagttgacccagcacctcctaagccatggtggcagagtatatgatagtgaagggtcagatcaagtctcctcggattatgaagatgagtctccccgacatctcggtgaggaagagatggaatcaaaagcatgcaaccgttgtggagaaattggacacattgctagcatgtgtctcacactctgccctcattgtgaggaagaccatccaccaggtgaatgtcccacccgcaaggtcacatgttttctgtgcgaagcaccaaccattctctgcaccgatagcctcagcaaagaattgtcatcgatggaagaagctgtgtctctccccgacctactccaggccgagcaaagggcaatcaatctcaggagggcgataccaagcagaagaccgttctctgcttcaaatagcaatcagaaggaagcttctcctgtgaatgatagcaatatgcagtcctatcacatcatcacagaaccaatcaaggatgcagtcactagaacaatgccagctatacctctccagaatcagaatgagtag

SEQ ID NO: 14412 - DNA, 4572 bp, Oryza sativa
  Clone ID: TFbOSC900038j.C1.o7.np
gtgaagacaaggaatggttcacgtgactctagcaatgtcagtggcagcgaagagcagattagtggagcacgtgccaacagtgcatctgacaacagtccatctccaccgcccgagaacccaacgatcgctcaggtgttggacaatcagactcagatgatgtcaatgatgatgcaacagatgcaacaacagtaccatcaggtgttgcagcaggtgcagcagcaagcacaacagcagcagcagaacctgcagtttggtcttccacctcctcaatccaaactgttagaatttctccatgtcaaactgcccactttctcaagtaccaccaacccaatcgagaccaacgactggcttcatgctattgagaagaagctgaaccttttgcaatgcaacgaccaagagaaggttgcttttgctacacactagctgcaaggtcccgcttctgtttggtgggacaactacgtggggacccgtccagctaggacagaggttacctgggcagagttttgtcagagtttcaataaagcacaggttcccgagggaattgtggcaccaaagaagagagagttccgttccttgcaacaaggaaccagaacagttatagagtatttgcatgagttcaatcgcctcgcgcgctacgctcctgaggacgtgcgcactgatgccgagaggcaggagaagtttttgtcgggtcttgatgatgaattgaccaaccagttgatctcccgagattatgaggactttcagaagttggtagacaaagctatccgtcaggaggagcagggtaacaaaatgaaccgaaaaaggaaggcatcttagttcagaacttcccaggggaacagtcagaagcctcgcttcacgatgggacatcagggtggaccttccaccatgattatccggcaccatcgtccttaccacccggacaatttcaacagcatcaacaacagtggcagtcacagaaatagtgagcagcacagcctcaaccctactccaagtccactaatgattccagctcagtcagttcagtcagctcagcaagaacagcccaaaaagtttggagaaaagcccgaactctgcttcaattgtaacgagcctagacacatggtacgtatgtgcccgaagccaagacgtgccagactcaagttcgttcaggcccgtgtcaatcatgcatctgcagaggaggcgcagtcagcaccagaggttatattgggcacattccccgtcaactcgacaccggcagtaatattgtttgattctggtgcaactcattccttcatttccaagcgttttgctggtgcgcatgggttatctttagtgaagcttaagataccaatgcgagttcatactcctggaggtggcatgaccacaactcactactgcccatcaatgacagttgaaattcaagggttgatttttccagccaacctcattcttcttgagtccaaggaccttgatgtcattcttggaatggattggttgacacggtacagaggagtgattgattgtgctagccgcaccatcaagttaaccaatgcgaaaggagaagtggtaaccttccagtctccagtgccgcagaagccagggatcagtttaaaccaggctgctggtgaagaacaagaggtagcagtggagaaaaccactaagaagttggaggatattcctatagtcagagagtatccagaggtttttccggatgatctgacaacaatgccaccaaaaagggatatcgagttccggattgacttggtacctagaactgcaccgatccacaagaggccttacagaatgagagccaacgagttggcggaagtcaagaaccaagttgatgaacagttacagaagggatacattcgcccgagcacgtcgccttggggtgctctagttatctttgtggaaaagaaagataaaaccaaaaggatgtgcgtcgactaccgcgcactcaatgaggtcactattaagaacaagtatccgttgccaagaattgatgatctgtttgatcagttgaaaggagctactgtgttctctaagatagacctacgatcaggctatcaccagttgaggatccgcgaagaggatattccaaagacagcattcatcgctcggtaagggttgttcgaatgcacagttatgtctttcggactcactaatgcacctgctttcttcatgaatttgatgaacaaggtgtttatggaatttctagacaagtttgtcgtggttttcatcgatgacatacttatctactccaagtccgaggaagagcatgagcagcatctccgactagtacttgaaaagttaaaagagcaccagctatatgccaagttcagcaagtgtgacttttggcttaaggaagttcagtttctcggtcacatcgtgaatgctcaaggagtagctgtggatccagcaaatgtggagtcagttaccaaatggaccccaccaaggacagtcactcaggttcagagtttcttatgacttgcgggctattaccgccgtttcattgagaacttctctaaaattgctaagccaatgacacagctattgaagaaggaagaaaaatttatctggtctgctgaatgcaataggagttttgaagaactcaaacgacggttggtgtctgcaccagtcttaatcctgcctgatcagacgaaagttttacaggtctattgtgatgcatctcgtcaggggctaggatgtgtgttgatgcaggatggcaaagtggtttcttatgcttcatggcagttgcgtcctcatgaaggcaactacccgacgcatgatctggaattggccgcagttgttcatgctttaaagatttggtggcactatctcatcggtaaccgttgtgaggtatatacagatcacaaaagtctaaagtacatcttcactcaacctgatttgaatctcagacagcgaagatggttagagctaatcaacgattatgatatgggaatacattatcatcccggcaaggctaatgtggttgcagatgccttgagcaggaagagctactgcaatgttgcatgggtagagcaactatgttgtgaggttcaatgtgatttggaacatctgaaccttggtatagttgagcacggattcgtggctgccctagaggcacaacccacactggtggagcaggttcgcatagctcaagcaagtgaccctaaaatagcagagctcaaaaagaacatgagagttggaaaagcccgaggttttgttgaggatgaacaaggaacaatctggatgggggaaagattgtgtgtacctgaaaacaaggagttaaaggacttgataatgacagaagctcatcaaactcagtattccattcatcctggcagtaccaagatgtaccaagacctcaaagaaaaattctggtgggtcaacatgagaagggaaatagctgaattcgtcgcactctgtgacgtttgccagcgagtaaaggcagaacaccaaaggccagcaggtttgctacagccacttcagattccagaatggaagtgggaagaaatcggaatggatttcattacgggtttgcccaggacgtcatcggggcatgattctatttgggtagttgttgatcgactcactaaagtggctcactgcattccggtgcatactacctactcagggaagaggttagcagaactttatctgacaagaatcatgtgtttacatggggtacctaagaagatagtgtctgatcgagggagccaattcacttcaaagttctagcagaaattacaagaggaattgggaacccttctgaacttcagcactgcttaccatccacaaacagatggctagaccgagcgagtcaatcaattactagaggatatgttgagagcctgtacgcttgactttggtggagcatgggacaaaagcttgccgtatgctgaattctcttacaataacagttaccaagctagtctgcagatggcaccgtttgaagcactgtatggatggaggtgtcgtactctgctcttctgggatcagacaggggaacgccagttgtttggtacataagttttaaatgaggcagaagagaaagtcagagctgtcagggaaagattgagaatcgcacaatgtcgacaaaaaagctatgtagacaaccgccgaagagagctcattttcgaaacagaggattatgtgtatctccgtgtcactccgctcaggggagtacatcacttccaaaccaaaggaaagttggcaccacgctttgtgggaccatacaggatcttggaacgtagaggtgaagttgcttaccagcttgagcttccctccaacatgcttggcatccacaatgtgttccacgtctctcagttgaagaaatgtttgagagttcctgaggaacaggcaagtccggatcaaatcgaaatccaaaaagacttgacgtatgtggagaagccgactcgtatcctcgaaactagcgagagaaggaccagaaacaaagtaatcagattctgcaaggttcagtggagtcatcactcagaagaagaggccacctaggaaagagaaaatgagttaaagaccgcccatccgcacctcttcaccaattcttccgaatctcggggtcgagattccgtt

SEQ ID NO: 14413 - DNA, 2442 bp, Oryza sativa
  Clone ID: TFbOSC400433j.C1.o8.gm
atggaccttgcactccaggaattagctcgtcgaatattttgtggagtccagatcgcatttcaagagtggcctgaatcgagatttgggtccctgccgcatgcctcggcggtcgatagggcctctgtgccatgtgccatctcctgctccccatctctgccccttccacgctggctgtcctcgcctcctcctgatgttttcgtccgtccggacctttgcactgcccacctgcttctccccgaccccattctgtgcgcaaggtgcctccgaagctccgtccgcttgagaacctgcacgggtaggcgggcgatcaagtttttgggtagcgcttcaagcgcgactgctctcgttcttcgcggctactgctgctacatcggcgccttcaccaagatgtcaacggagattggagacaagaagatgaacgacatcaacggaggcaatactgcctcaaaatctagcggtgggacgttctcgggtgtgctcgccgacaatattgtggacgtgtatatgcacatgccttcagggaaggacatgtgggatgctcttaaggccaagttcggggctcatgagattcagatgttggcaaaggaacttgagaacaacaactgtgagttgccggacaagtttgtggcaggtgtcattattgccaaattgccaccttcttggacggactttggtacttctctaaaacacaagaggcaagagttcagtgttactgatcttattggctctttgggtgttgaggagaaggcgagggcaaaggacaaccggggcaaaaagatcgagggaggttctagcgccaatttggtgcagaagaagaaccctcacgcatcccacaacaacaacaagaaagtcaaacctgacgtcaaacccaaggctacaaccaattttaagaagaaaggcaagggaaaggcaaaaggaggttgctttgtgtgtggcaagtctgggtattgggccaaggattgtcctgagcgcaaggacaagaagtctggaaacatggttattagtgagggcggaggaacatcgaggtatggatgcaaatgggttttcaaggaaaagcttaggcctgatggtacaattgaaaagtacaaggcaaggcttgtggccaagggttatacccaaaaagaaggcgaggactttttcgacacttattcatcggttgctcgcttgaccacgattcgagtactacttgctctggcagcctctcatggtctactcgtccatcagatggatgttaagacagctttcctcaatggagagttggatgaggagatctatatggatcaaccagatgggtatgtactagaaggtcagaagggaatggtgtgcaagctgttgaagtccttgtatggtctcaaacaagcgcctaagcaatggcatgagaagtttgacaatacacttacatctgctggctttgttgtgaacgaagctgataaatgtgtatactatcgctatggtgggggagagggagtgatcttgtgtttatatgttgatgacatattgatctttgagaccagcctcaatgtgattgaggaggtcaaggactttctgtccaaaagctttgaaatgaaggattttgactgcaaggcagctcctactccttatgatcccagtgtgctattaaggaaaaaccgaagaatagcaagggatcaattgagatactctaagatcattggttcattgatgtacttagctagtgcaacgaggcctgacatctcatttgctgtgaacaagttgggccggtttgtttcaaatccgggagatgatcattggcatgctcttgaaagagtaatgcgctatctaaaagggataatgagctatgaaattcactacgtcgggtacccaaaagtgctggagggctatagtgagtcaaactggatatttgatgctgatgagataaaggccacaagtgggtatgtgttcacacttggagggggcgctgtttcctggaagtcttgcaagcagaccatcttaacgaggtcaacaatggaagcagaactcacagctttagatactgccacagttaaggccgaatggcttcgtgagctcctgatggacttgccggtggttgaaaaaccagtaccagcaatcctgatgaattgtgataatcaaacagtgattattaaagtgaacagttcgaaggacaacatgaagtcatccaggcatgttaaaagaagactgaagtgcctccgaagctccgtccgcttgagaacctgcacgggtaggcgggcgatcaagtttttgggtagcgcttcaagcgcgactgctctcgttcttcgcggctactgctgctacatcggcgccttcaccaagatgtcaacggagattggagacaagaagatgaacgacatcaacggaggcaatactgcctcaaaatccagcgggatggggggtgccaggcccaccccggcacccccgggtggcttcgccactggaggtggatga

SEQ ID NO: 14414 - DNA, 3012 bp, Oryza sativa
  Clone ID: TFbOSC15301j.C1.o1.fg
atggctggttttgccgatgcactgaggccggataaatttaccggtatgcactttaagagatggcagatcagggtcactctgtggctgacagctatgaaatgcttctgggtaagtactggcaagcctatgggcgttcttaatgctgatcagcagaaagaattcgatgaggccactactctctttgtgggatgcattcttagcgtgcttggcgatcgtcttgtcgagaacaagagcaaggggaaatacaaagctcagcagaccaccaacttcaagaagaagaagaacaataacaatcctaatcaggatgagaggacttgctttgtgtgtggtcaacctggctatctggcaagaaagtgtccacaacacaaggggatgaaggcacctgcagggcagacctctaagtctgccaatgtgaccattggcaacactggagatggaagcgggtatggggccaatatacatgtttgtgctgacatctcattgttttcttcttatcaggccgcacggggttccaccgtcctaatggggaatgggtcacatgattctatcgacaggaatcttgttagtggctcccgtctgactagagacggatttaagttggtttttgagtctaataaagtagtcgtgtctaaacatggatattttattggtaaaggttatgagtgcggaggcctgttctgcttttccctttttgatttctgcaataagtctgtgaaccatatttctggcagtgtggatgatgaggctaatggtggaaaacgatatttcatgacgttgattgatgatgctactagattttgctatgtgtacttgttgaaaacgaaagacgaggctctagactattttaaaatttataaggcagaagttgaaaatcaacttgacagaaagataaaaagactttggtctgatcgtggtggagagtttttctcaaacgagtttgacttattctgtaaggaacatggcattatacatgagaggacgcctccctattctcccgagtctaatgggattgctgaaaggaagaaccgcacactgaccgacttggtgaatgccatgttggacactgcgggactacctaaggcatggtggggggaggcattgttgacctcgaatcatgtgttaaacagagttcctaacagaaataaggacaaaacaccatatgagatatggattgggagaaaaccatcactttcttacttgcgcacatggggttgcttggcgaaaatcaatgtaccaataacgaagaagcgcaaacttggacctaagactatggactgtgtctttctgggatatgctcaccacagcattgcctatagatttttaatagttaaatctgaggtacctgacatgcatgttggtacaattatggagtctcgtgatgctatcttctttgagagctttttcccaatgaaggatacacatagtagttctagccaaccctctgaaataattcccagttcaatcacaccaccagaacaaactgaatatacacatgaatatgtcactaaggatgatgacagtgaagctcctcgaaggagcaaaagacaaaggatggctaagtcttttggtgatgatttcactgtgtacctcgtggatgacactcctaagtcaatttcagaagcatacgcatctcctgatgcagactactggaaggaggctgtccgtagtgaaatggattccattatcgctaacgggacttgggaggtgacagagcgaccctatgggtgtaaacctgtggggtgcaagtgggtgttcaagaagaagctcaggcctgacgcctcacatggtcttctcgttcatcaaatggacgttaagacaacttttcttaatggagagctggatgaggacatctatatgaatcaacctgatgggtttgtagttgaaggtcaagaaggcaaagtgtgcaaattgttgaagtctttgtatggtctgaaacaagctcctaagcaatggcatgagaaatttgacaaaacattgacatctgcaggctttgcagtcaatgaggtagataaatgtgtgtactatcaccatggtgggggtgagggagttattccgtgcttgtatgttgatgacatactgatatttgggacaaaccttgaggtgataaatgaggttaaatcattcttgtctcaaaattttgatatgaaggatttgggagtagctgatgttatcttaaacatgaagctaattagaagtgagaatgggattacactcttgcagtcccattatgtggagaagatcttgaatcgctttggctacattgataataagccttctccaacaccttatgatcctagtttgttgcttcgcaagaacaagagaattgctaggaatcaactgcaatactcccaaatcattggctcattgatgtacctggctagtgcaactaggcctgatatctcctttgctatgagcaagttgagccggtttacctctaatccaggagatgatcactggcgtgcgcttgagcgagtaatgcgctatctgaaaggtactatggaattggggtttcactattctgggtatcctacggtactggagggatatagtgattctaactggatctctgatatggatgagatcaaagccactagtggatatgtcttcacactgggtggtggtgctgtttcctggaggtcttgcaatcagactattttgacgaggtcaaccatggaagcagaactgacggcactggatactgctactgttgaggcagaatggctgcgtgatctattaatggatctgcctattgttgaaaaaccggtgccggctatccttatgaactgtgacaatcaaacggtaattctcaaagtgaatagttccaaggataatatgaaatcatctagacatgtgaaaagacaagtgaagtctgtcaggaaattgagaaactccggagttataacgttggattacatccaaacagctagaaacctggcagatcccttcacgaagggactatcacgaaatgtgatagataatgcatcgaaggagatgggtttgagacccatgtga

SEQ ID NO: 14415 - DNA, 2991 bp, Oryza sativa
  Clone ID: TFbOSC379j.C1.o2.fg
atggctcccgccaatcctcgccaccgcctcatcgccccgatccacgccgccgccgccgccggaggaggaggaggaggcgcgggcgccacctctccctcgggcctacccagcctcgtcgggatcgcgcacctgctggtgtcgctggggatcgtgctggcctccgacaagttcctgaagcaggcgttcgcggcggcgtccatcaagttccccagcgccctcttcggcatgttctgcgtcttctccgtcctcgtcgtcctcgacgccttcgcgcccgcgctcgccaaggggttcatggacttcttcgagccggccaccctcttcatccagaggtggctgcccctcttctacgtcccttccctggtcgtcctgccgctcgccgtcagggacgtcccggctgcttccggcctcaagatcttcctcatcatttttggtggctggtttgcttcactcatggtggccggatacacagcactcaccgtgaggaagattgtccagacacagcttataccagctgagccgatgagcaagccgtctccgttcgcgacgctggaattctgggcctggggtgctgtctttgtcgcatcgtttgctgttgcgtatgttaaccccacagcgcttggcaccacggcaagaacatgtcttcctttcctcctcgcttcaactgtactgggatacatggttggttctgggataccatctggtgtcaagaaagtgcttcacccaatcatttgttgtgcactctctgcagatttggcagcaatagcatatgggtatctctcccggtctggagttgatgcagtgctaggtgattacctcacaaaggcgccatctaatcctggagctggtgacgtcctgatgggatttcttggttcagtcatcatatcgtttgcattctcaatgttcaagcagagaaagcttgtgaagaggcatgcagcggaaattttcacatcaattgccatcgcatcaacattctcgttatactcaactgccatcctaggacgggtgatagggctagagccttcactgaccatatcaatattaccgaggtgcataaccgtggcgttggctctgagcatcgtgtctttctttgaaggtgtaaattcttcgctaaccgctgcggtcgtcgtcctcaccgggctgatcggcgcaaattttgtgcaagcagccatggacaagcttggcctcaacgaccccatcgcgcgaggaatagggacggcttccagtgctcatggactgggaacagcagcgctgtcggccaaggagcctgaagcgctgcccttctgcgccatcgcttacggcctgacggggatcttcgaaaacatgaatacacctagaagggaaaatgctaaagctatcttcacgaaatctaagacaaactatgaagtccaagggaagagccaagcgcgcacggcgaggacgagtgcggggacgggcggtcggcaggaggctgcaccgcgtcagcaagaagcctttggctgggaagaagcctctgctgctaaggtggattcagacgaggatgacgcggcggaagagtgcgacgatggtgcggtggtgctcggcggcgttgagcgagaggtagcaggcgaggaggtcctgcaggtcctccagccaccagacgccattggtgcacagcatcttgatcatgctgtccaccagcttgatgaggacatcctctactattacccactggcaaagacgcaaaagtcgagcgctaaccttagtgtgcctaagaactgtttgagtccaggcaaccttaatttgttgggcctcggccaaccccacctaggccggattgttatcattttggtggagatgcggggtattcttgaatacaaagaatacaataccgtgaatagattattccaatttgcttgcaaagctgaaagagaagtgcagggacgcaacaagcataggagttcttttgcaggtgctacttccacacgacaatcaacaccacgtcaatttactacggccgttcgtccacctacctccacgccatcccatgctcaagaaacaagcaaaaatgcttcagttcagactccagccaagagtgcaacttcggtagcttccactggacgtacccgtgatattacatgtcataggtgccatggcattggacacattgcccgcgactatccaaatcagcgagctctatttgtgaatgatgatggtgagtatacttctactagtgattgtgatgatgaatatgctttagttgccactgaccatgtaggaggacaagataacgatgacatcgaggaagtccatttgcatccagagtcgctagatcagtatcctagcctaattgtcaagctagcacttagtgctaaagagaagtgtgaagagcaaaaccaacgccacaatttattccaaagcaaagttcttgtgaaaggccataccgtcaaagtgattattgatagcgggagttgcaacaatttagcaagtgaagagatggtcaagaagcttggcttgactacccatccacatccacatccgtatcatattcagtggtttaatacatgtggtaagatgaaggaatatgagggtgcttttcatgatgagatacctccaaggatgacccctggacgacagagtgaacacgatcaagaagatgggattgagtcgaggacgactccaattcaagaaggggaggatgatgaggacatcacttcgtcggaaacgcacataacttcacacgttccaatgataattccaagtccaagtccatttcggcctccggagacagcactgacttcaaacggacctagcgccttcttgccaactccgatttgggtgatcttggactttgtggaaagctatctcgctacctttcaaacgcattcggtctcatgtccaaattcatctcgagtcaacgggaatcaccaaaacaagacagtgatgttgctcaaaccgaacttgggtcttgggccttgtaatagactaggcccatctcggaagtgtctccctccacctccacgaattagcacttaa

SEQ ID NO: 14416 - DNA, 3066 bp, Oryza sativa
  Clone ID: TFbOSC400758j.C1.o37.fg
atgccgacgcaacccctcctcctcctcctcctcctcccgccaagcggcggcaatctccatggctcccgccaatcctcgccaccgcctcatcgccccgatccacgccgccgccgccgccggaggaggaggaggaggcgcgggcgccacctctccctcgggcctacccagcgtgagtcgtcaatcagtcaaaatgcacgcagcctcgtcgcgatttcgcatgacctgccgatcgaactgacatgcttcctgaagcaggcgttcgcggcggcgtccatcaagttccccagcgccctcttcggcatgttctgcgtcttctccgtcctcgtcgtcctcgacgccttcgcgcccgcgctcgccaaggggttcatggacttcttcgagccggccaccctcttcatccagaggtggctgcccctcttctacgtcccttccctggtcgtcctgccgctcgccgtcagggacgtcccggctgcttccggcctcaagatcttcctcatcatttttggtggctggtttgcttcactcatggtggccggatacacagcactcaccgtgaggaagattgtccagacacagcttataccagctgagccgatgagcaagccgtctccgttcgcgacgctggaattctgggcctggggtgctgtctttgtcgcatcgtttgctgttgcgtatgttaaccccacagcgcttggcaccacggcaagaacatgtcttcctttcctcctcgcttcaactgtactgggatacatggttggttctgggataccatctggtgtcaagaaagtgcttcacccaatcatttgttgtgcactctctgcagatttggcagcaatagcatatgggtatctctcccggtctggagttgatgcagtgctaggtgattacctcacaaaggcgccatctaatcctggagctggtgacgtcctgatgggatttcttggttcagtcatcatatcgtttgcattctcaatgttcaagcagagaaagcttgtgaagaggcatgcagcggaaattttcacatcaattgccatcgcatcaacattctcgttatactcaactgccatcctaggacgggtgatagggctagagccttcactgaccatatcaatattaccgaggtgcataaccgtggcgttggctctgagcatcgtgtctttctttgaaggtgtaaattcttcgctaaccgctgcggtcgtcgtcctcaccgggctgatcggcgcaaattttgtgcaagcagccatggacaagcttggcctcaacgaccccatcgcgcgaggaatagggacggcttccagtgctcatggactgggaacagcagcgctgtcggccaaggagcctgaagcgctgcccttctgcgccatcgcttacggcctgacggggatcttcgaaaacatgaatacacctagaagggaaaatgctaaagctatcttcacgaaatctaagacaaactatgaagtccaagggaagagccaagcgcgcacggcgaggacgagtgcggggacgggcggtcggcaggaggctgcaccgcgtcagcaagaagcctttggctgggaagaagcctctgctgctaaggtggattcagacgaggatgacgcggcggaagagtgcgacgatggtgcggtggtgctcggcggcgttgagcgagaggtagcaggcgaggaggtcctgcaggtcctccagccaccagacgccattggtgcacagcatcttgatcatgctgtccaccagcttgatgaggacatcctctactattacccactggcaaagacgcaaaagtcgagcgctaaccttagtgtgcctaagaactgtttgagtccaggcaaccttaatttgttgggcctcggccaaccccacctaggccggattgttatcattttggtggagatgcggggtattcttgaatacaaagaatacaataccgtgaatagattattccaatttgcttgcaaagctgaaagagaagtgcagggacgcaacaagcataggagttcttttgcaggtgctacttccacacgacaatcaacaccacgtcaatttactacggccgttcgtccacctacctccacgccatcccatgctcaagaaacaagcaaaaatgcttcagttcagactccagccaagagtgcaacttcggtagcttccactggacgtacccgtgatattacatgtcataggtgccatggcattggacacattgcccgcgactatccaaatcagcgagctctatttgtgaatgatgatggtgagtatacttctactagtgattgtgatgatgaatatgctttagttgccactgaccatgtaggaggacaagataacgatgacatcgaggaagtccatttgcatccagagtcgctagatcagtatcctagcctaattgtcaagctagcacttagtgctaaagagaagtgtgaagagcaaaaccaacgccacaatttattccaaagcaaagttcttgtgaaaggccataccgtcaaagtgattattgatagcgggagttgcaacaatttagcaagtgaagagatggtcaagaagcttggcttgactacccatccacatccacatccgtatcatattcagtggtttaatacatgtggtaagatgaaggaatatgagggtgcttttcatgatgagatacctccaaggatgacccctggacgacagagtgaacacgatcaagaagatgggattgagtcgaggacgactccaattcaagaaggggaggatgatgaggacatcacttcgtcggaaacgcacataacttcacacgttccaatgataattccaagtccaagtccatttcggcctccggagacagcactgacttcaaacggacctagcgccttcttgccaactccgatttgggtgatcttggactttgtggaaagctatctcgctacctttcaaacgcattcggtctcatgtccaaattcatctcgagtcaacgggaatcaccaaaacaagacagtgatgttgctcaaaccgaacttgggtcttgggccttgtaatagactaggcccatctcggaagtgtctccctccacctccacgaattagcacttaa

SEQ ID NO: 14417 - DNA, 3918 bp, Oryza sativa
  Clone ID: TFbOSC422113j.C1.o1.np
atggctggttttgccgatgcactgaggccggataaatttaccggtgtgcactttaagagatggcagatcagggtcactctgtggctgacagctatgaaatgcttctgggtgagtactgacaagcctatgggcgttcttaatgctgaccagcagaaagaattcgatgaggccactactctctttgtgggatgcattcttagcgtgcttggcgatcgtctggtcgaggtgtatatgcatatgaccgacgctaaggagttgtgagatgcactgaatactaaattcggtgctactgatgctagcaatgatctgtatatcatggagcagtttcatgactacaagatggctgacaaccgttctgtagtcgaacaggctcatgagatacaaaccacggctaaggaactcgaactccttaagtgtgtcttacccgacaaatttgtggctgggtgcactattgcgaaactaactccatcttggagaggtttcggtactgcactcaaacacaagagacaggaatactccgttgaggggttgatagcgtctcttgatgttgaggagaaagctcgggaaaaagatgccgcgtctaagggcgatggtgggcagtccactgccaatgttgtgcacaaggcccagaacaagagcaaggggaaatacaaagctcagcagaccaccaacttcaagaagaagaacaataacaacaatcctaatcaggatgagaggacttgctttgtgtgtggtcaacctggctatctggccaggaagtgtccacaacgcaaggggatgaaggcacctgcagggcagacctctaagtctgctaatgtgaccattggcaacactggagatggaagcgggtatggtaatttacctactgttttttcagttaaccagtctactaattggtgggttgatacaggggccaatgcacatgtttgtgctgacatctcattgttttcttcttaggtcgcacggggttccaccgtcctaatggggaataggtcacatgcttttgttcatggtgttggcacggtagatctgaagtttacttcgggaaagatcgtgcagctgaagaatgtgcagcatgtcccttctatcgacaggaatcttgttagtggctcccgtctgactagagacagatttaagttggtttttgagtctataaagtagtcgtgtctaaacatggatattttattggcaaaggttatgagtgcggaggcctgttctgcttttccctttctgatttctgcaataagtctatgaaccatatttgtggcagtgtggatgatgaggctaatgtatggcactcacgtttatgtcatattaattttggcttgatgtctcggctttccagcatgtgtttaattcctaagttttccattgtcaaaggttctaagtgccatagttgtgtgcaatcaaagcaacctcgcaagcctcacaaggctgctgaggagagaaacttggcacctctagaactcctacattcagatctctgtgaaatgaatagggtgttgacgaagggtgaaaaacgatatttcatgacgttgattgatgatgctactagattttgctatgtgtacttgttgaaaacgaaagacgaggctctagactattttaaaatttataaggcagaagttgaaaatcaacttgacagaaagaaaaaaaagacttaggtctgatcgtgatgtagagtttttctgaaacgagtttgacttattctgtgaggaacatgacattatacatgagaggacgcctccctattctcccgagtctaatgggtttgctgaaagcgagaaccgcacactgaccgacttggtgaatgccatgttggacaccgcgggactacctaaggcatggtggggggaggcattgttgacctcgaatcatgtgttaaacagagttcctaacagaaataaggacaaaacaccatataagatatggattgggagaaaaccatcactttcttacttgcgcacatgggggtgcttggcgaaagtcaatgcatcaataacgaagaagcgcaaacttggacctaagactgtggactgtgtctttctaggatatgctcaccacagcattgcctatagatttttaatagttaaatctgaggtacctgacatgcatcttggtacaattatggagtctcgttatgctaccttctttgagagctttttcccaatgaaggatacacatagtagttctagccaaccctctgaaataattcccagttcaatcacactaccagaacaaactgaacatacacatgaacatgttactgaggaggatgatagtgaagctcctcgaaggagtaaaagacaaaggacggctaagtcttttggtgatgatttcactgtgtacctcgtggatgacactcctaagtcaattttagaagcataagcatctcctgatgcagactactggaagtaggctgtccgtagtgaaatggattccattatcgctaatgggacttgggaggtgacagagcgaccctatgggtgtaaacctatggggtgcaagtgggtgttcaagaagaagctcaggcctgacggtactattgaaaagtacaaggctcggcttgttgctaagggctatactcagaaagaaggtgaagatttctttgacacttactcacctgttgctagattgaccacagttcgtatgctactttccctagcagcctcacatggtcttctcgttcatcaaatggacgttaagacagcttttcttaatggagagctggatgaggagatctatatggatcaacctgatgggtttgtagttgaaggtcaagaaggcaaagtgtgtaaattgttgaagtctttgtatggtctgacacaagctcctaagcaatggcatgagaaatttgacaaaacattgacatctgcaggcttcgcagtcaatgaggcagataaatgtgtgtactatcgccatggtgggggtgagggagttattctatgattgtacgttgatgacatactgatatttgggacaaaccttgaggtgataaatgaggttaaatcattcttgtctcaaaattttgatataaaggatttgggagtagctgatgttatcttaaacattaagctaattagaggtgagaatgggattacactcttacagtcccattatgtggagaagatctttaatcgctttggctacattgatagtaagccttctccaacaccttatgatcctagcttgttgcttcgcaagaacaagagaattgctaggaatcaactggaatactcccaaatcattggctcgctgatgtacctggctagtgcaactaggcctgatatctcctttgctgtgagcaagttgagccagtttacctctaatccgggagatgatcactggcgtgcggttgagcgagtaatgcgctatctgaaaggtactatggaattggggcttcactattctgggtatcctgcggtactggagggatatagtgattctaactggatctctgatgtggatgagatcaaagccactagtggatatgtcttcacactaggtggtggtgctgtttcgtggaggtcttgcaaacagactattttgacgaggtcaaccatggaagcagaactgacggcattggatactgctactgttgaggcagaatggctgtgtgatctattaatggatctgcctattgttgaaaaaccgacatgtgaaaagacgattgaagtctgtcaggaaattgagaaactccggagttataacgttggattacatccaaacaactagaaacctagcagatcccttcacgaagggactatcacgaaatgtgatagataatgtatcgaaggagatgggtttgagacccatagcattcttgaaagaactcacctttgtaagcttgactgttggtcgcagtctatgaagattttgagtgaatcttctaggaagcttactaaagacctaggagta

SEQ ID NO: 14418 - DNA, 4167 bp, Oryza sativa
  Clone ID: TFbOSC101253j.C1.o7.fg
atgggttgcattaaagatattccgaccctaaaaggagataactacgcagaatggaaaagaaaactcgaccttgcttttatcttgggagaggtggactgggtattgactaccccatgtcctatagaacctgctgaccttgtcagaggtgaaaatgagtcagatgctgactggcaaaagagacagagggacaatgctcctctcgtcatgtcgtatgacattgaacaaaagaaatggtccttagccaacaagaaatgtttggctgtggtaaagaatacgattgagcctaccatattgggctcgatcccagagtgtgacgctgtctcagagtaccttgaaagaataaagagtcagtttactggctcttcaaagacttatgctacacagctgatcaagcagcttgtgacagaaaggtaccatggaggtggtgttagagaccacatacttagaatgagcaacatggcttccaaattgaagccaatggatttgggcataacagatgactttctggtccatctggttatggcctcattgccaaagcagtttgacaattttattgtcaactacaacataagtccagagaaatggaactttgagaagctcattgctaattgtgtgcaagaggaggagagaatcaaagaatcaaatggtggttcaataaactatgttaaagataagaaaaagaaccacaagtctcccacctcaaaaggtaaacagtctcagcatctgcctcaacaacaacagttcgctgttgagaaagatcaatgtctccactgcaagaagacaggacactacaagaaagattgtcctgactttttgaaaatgatcatggcaaagaaaggtgagaacattattacatttgtaaatgaatctcattatgttggttactctagatccacatggtggattgattctggagcaactattcatgcttgtaattgtttaaaggcattccgttcgacgaggactacgcaaagaagagaaagcaccattagagttgccaatggagttgaagaaaaagttgaagctgttggagatcttcctctagagctcgcgaatggcttcatacttttacttcgagatgtcttttatgttccttctttgcaaaggaacttaataagtgtatcaaagttggattttgatggatatgattgccgctttggaagtggcaaatgtgaactatggcataataatgcatgtattggtcttgctgtgttgcgagacgagctttatttgttatctctttctgagaatgtgaatgttgtgtcctcgttgacaaaagaaaacaagaaaagaaagcgaactcccgatgtctcatcgaaattatggcactgtcgtttgggccatatttcgagggggagaattgagagactagttaagaatgaaattcttcctccattggagttctcagacttagaacaatgcatagaatgcattaaaggaaaatttgtaaagagcatcaaaaagggtgcaaaacgaagcgcgggaattttagagatcattcatacagatatttgtggtccatttcctgtgaaaagtgtggatggctatgactcgttcataacattcacagatgattactcccgctatggttatatttatccaattaaagagcgatcagaagcactggataaatttaagatattcaaagctgaagttgaaaatcagcatgatataaagattaaagtagtaagatctgaccgtgggggggagtactatggtcgacatacgccttatgggcaagtccctggaccttttgcaaggttcttgctagagaatggaatagtagcccagtattcaacaccgggcgaacctcaacagaatggggtagctgaaaggcgcaaccgtacccttatggatatggtgcgcagcatgatgagctactccacactaccactcggtttatggatggaggcgttaaaaaccgccattcatattctcaacagagttccaagcaaatcggtgcccaaaacaccgtatgagctatggacagggagagtaccctcgctaactcacctccgtgtgtgggggagtcctgcagaggccaaagtatttaacccaaatattgggaagttggaccccaaaacagtcagttgccattttattggctatcctgaaagatcaaaaggctatcgtttctactgtccaaacagttatacaaagtttgtagaaacgagacacgccgtcttcttggaagacgaaatgattagggggagctcggtagttcgagaaattgatcttgaggagaggcgggtgtctgtacccgctccgtcgactcaggaacctttcttctctctacctgctgatgttgtgcctgcaatgcctgtcattgaggtaccagcacctgttgttacccctcctgtggcaacaatgaatgagagtgaggaacctgttatacaggattcaacagaaatggttgccacaccagaggaggagctacaacagcctcaaatagataatgtgccagtacaggagactcatcaagagcctcaggtacaggatgtgccaaatgtgcaggcccctagaaggtctgaaagagtcagaagatcggctatccgtgatgactataaagtttataatatagaagagtcgcatatggaggatgatcccacctcatatgaagaggccatgagaagcgctcgctcatctgaatggttggaagccatgaaagatgaaatgaaatcaatgaaactaaacgatgtttgggatttagaagaaattcctaaaggagccaaaacagtaggctgtaaatgggtctacaaaaccaaatatgactccagagggaatatagaaaagtttaaagcgcgacttgtggcaaaaggcttcacgcaacgagaagggattgattacaatgagacattttctccagtctcttgtaaagattccttcaggattataatggcactagtggcacattatgatttggaattacatcagatggatgtaaaaacggcatttctaaatggagatttggaggaaaaagtatacatggcgcaaccgaaaggttttgtcatgaaaggaaacgaaaatatgggatgtcgtctaaagagatccatttatggattaaagcaagcttcgagacagtggtacttgaagtttgatgggacaataaagaaatttgggtttcaagagaatgtcgaggacaactgtatttattcaaagtttaagaatgggagatttattttcctaattctgtatgtggatgacattctactggctagtagtgatgtcagtctactgcaggaaacaaagaaattcttgtcctcaaactttgacatgaaagacctcggtgaggcttcatatgttttgggcatagagattcaccgagatagaacaaagtatgcattgggactttctcaaaagacatatatagaaaaggtgttgaagaaattcaacatgtacagatgcagtgctacacctgctcctataatgaaaggcgaaaagtatggggcatcgcaatgtcccagaaatcagtatgagctcaatgaaatgaaaacaaagccatatgcgtcagctgtaggaagcctacagtacgcgcaagtgtgcacacgacctgacttggcatttgttaccgggttacttggcagatttcagagtaatccaggcctagagcactggaaattggtaaagaaagtcttgcgttatttgcaaggaacaaaaggcctcatgctgtcttacagaagatcagaatcactccagatagtggggtactcagattctgactttgcaaaagataatacaaagtcaacatcgggatacgtgtttaccctggcaggaggagctatttcatggaaaagctcaaaacagactatcactgcagggtctactatgtatgccgagtttatagcatgctatgaggcaacggggcaggtgaactggctaaagaagttcatacccggtttaaaggtggttgacagtattgagaaaccactaaagttatactgcgacaacgaacccgcagtaatgtacgctcacaacaatcagtcaagtggtgctgccaaacacattgacataaagtactatgttgtgaaggacaaagtccgggatcaaacaatcagtctcgagcacattaaaacagaaaggatgctcgcggatccgctcacgaaaggcctaccacccaacgtgttcaaggaacatgtagccggcatgggtttaagggaagccttatga

SEQ ID NO: 14419 - DNA, 492 bp, Oryza sativa
  Clone ID: TFbOSC101253j.C1.o8.gm
atggtgaagggccatggtttggttgcgttgcaaatccatccattcactcccttgcgccgtcatggtcttcatcgccaccaccacagcggcactggcaccggcgtcatggcgcggccgccgcccgcgtcacactcaacgccatcggagagacgctttgccacagctgaatcaactggaagtgttctaggcccctccccggcagccaccggctcgtcgtcggcaccccgacccagcctcccgcgccaagcccgccgcccccaggagggcggttcggggatttcaccaggcgaaatcgatgtgagggcagagctcggccaggaacgatgcccacagtgcacgcgccttgctttttcggcgccgcgcgcttcctcgcttcgacgaagtttcgcgctccttagcttagggacaagtcgccaagtgaggtcccaggcgcatgctccacgtagaccaaaagctgagctggcgcgacgaggttacgcgccaactcagtga

SEQ ID NO: 14420 - DNA, 2084 bp, Oryza sativa
  Clone ID: TFbOSC11286j.C1.o1.fg
gtggctactccttgatgggttgcattaaagatattctgaccctaaaaggagataactacgcagaatggaaaagaaaactcgaccttgcttttatcttgggagatgtggactgggtgttgactaccccatgtcctatagaacctgctgaacttattagaggtgaaaatgagtcagatgctgattggcaaaagagacagagggacaatgctcctctcgtcatgtcgtatgacattgaacaaaagaaatggtccttagccaacaagaaatgtttggctgtggtaaagaatacgattgagccaaccatattgggctcaatcccagagtgtgacgctgtctcagagtaccttgaaagaataaagagccagtttactggctcttcaaagacttatgctacacagctgatcaagcagcttgtgacagaaaggtaccatggaggtggtgttagagaccacatacttagaatgagcaacatggcttccaagttgaagccaatggatttgggcataacagatgactttctggtccatctggttatggcctcattgccaaagcaatttgacaattttattgtcaactacaacataagtccagagaaatggaactttgagaagctcattgccaattgtgtgcaagaggaggagagaatcaaagagtcaaatggttgttcaattaactatgttaaagataacaaaaaaaagaaccacaagtcgtctcccacctcaaaagctaaacagtctcagcatctgcctcagcaacaacagttcgctgttgagaaagatcagtgtctccactgcaagaagacaggacattacaagaaagactgtcctgacttcttgaaaatgatcatggcaaggaaagacgagctttatttgttatctctttctgagaatgtgaatgttgtgtcctcgttgacaaaagaaaacaagaaaagaaagcgaactcccgatgtctcatcgaaattatggcactgtcgtttgggccatatttcgagggggagaattgagagactagttaagaatgaaattcttcctccattggagttctcagacttagaacaatgcatagaatgcattaaaggaaaatttgtaaagagcatcaaaaagggtgcaaaacgaagcacaggaattttagagatcattcatacagatatttgtggttcatttcctgtgaaaagtgtggatggctatgactcgttcataacattcacagatcattacttccgctatggttatatttatccaattaaagagcgatcagaagcattggataaatttaagatattcaaagctgaagttgaaaatcaacatgatataaagattaaagtagtaagatctaaccgtgggggggagtactatgtcgacatacaccttatgggcaagtccatggaccttttgcaaggcgaacctcaacagaatggggtagctgaaaggcgcaaccgtacccttatggatatggtgcgcagcatgatgagctactccacactaccactgggtttatggatggaggcgttaaaaaccgccattcatattctcaatagagttccaagcaaatcgatgcccaaaacaccgtatgagctatggacaggaagagtaccctccctagctcacctccgtgtgtgggggagtcctgcagaggccaaagtatttaacccaaatattgggaagttggatcccaaaacagtcagctgccattttattggctatcctgaaagatcaaaaggctatcgtttctactgtccaaacagttatacaaagtttgtagaaacgagacatgccgtcttcttggaagacgaaatgattagggggagctcggtagttcgagaaattgatcttgaggagaggcgggtgtctgtacccgctccgtcgactcaggaacctttcttctctctacctgctgatgttgtgcctgcaatacctgtcattgatgtaccagcacctgttgttacctctcctgtggcaacaatgaatgaaaatgaggaacctgttatacaggattcaacagaaatggttgccacaccagaggaggagctgcaacagcctcaaatagataatgtgccagtacaggagactcaacaagagcctcag

SEQ ID NO: 14421 - DNA, 4188 bp, Oryza sativa
  Clone ID: TFbOSC14708j.C1.o1.fg
atggcgacgccgtccacgcggtcgcgtggctactccttgatgggttgcattaaagatattccgaccctaaaaggagataactacgcagaatggaaaagaaaactcgaccttgcttttatcttgggagaggtggactgggtattgactaccccatgtcctatagaacctgctgaccttgtcagaggtgaaaatgagtcagatgctgactggcaaaagagacagagggacaatgctcctctcgtcatgtcgtatgacattgaacaaaagaaatggtccttagccaacaagaaatgtttggctgtggtaaagaatacgattgagcctaccatattgggctcgatcccagagtgtgacgctgtctcagagtaccttgaaagaataaagagtcagtttactggctcttcaaagacttatgctacacagctgatcaagcagcttgtgacagaaaggtacaatggaggtggtgttagagaccacatacttagaatgagcaacatggcttccaagttgaagccaatggatttgggcataacagatgactttctggtccatctggttatggcctcattgccaaagcagtttgacaattttattgtcaactacaacataagtccagagaaatggaactttgagaagctcattgctaattgtgtgcaagaggaggagagaatcaaagaatcaaatggtggttcaataaactatgttaaagataagaaaaagaaccacaagtctcccacctcaaaaggtaaacagtctcagcatctgcctcagcaacaacagttcgctgttgagaaagatcaatgtctccactgcaagaagacaggacactacaagaaagattgtcctgactttttgaaaatgatcatggcaaagaaaggtgagaacattattacatttgtaaatgaatctcattatgttggttactctagatccacatggtggattgattctggagcaactattcatgcttgtaattgtttaaaggcattccgttcgacgaggactacgcaaagaagagaaagcaccattagagttgccaatggagttgaagaaaaagttgaagctgttggagatcttcctctagagctcgcgaatggcttcatacttttacttcgagatgtcttttatgttccttctttgcaaaggaacttaataagtgtatcaaagttggattttgatggatatgattgccgctttggaagtggcaaatgtgaactatggcataataatgcatgtattggtcttgctgtgttgcgagacgagctttatttgttatctctttctgagaatgtgaatgttgtgtcctcgttgacaaaagaaaacaagaaaagaaagcgaactcccgatgtctcatcgaaattatggcactgtcgtttgggccatatttcgagggggagaattgagagactagttaagaatgaaattcttcctccattggaatgcatagaatgcattaaaggaaaatttgtaaagagcatcaaaaagggtgcaaaacgaagcgcaggaattttagagatcattcatacagatatttgtggtccatttcctgtgaaaagtgtggatggctatgactcgttcataacattcacagatgattactcccgctatggttatatttatccaattaaagagcgatcagaagcactggataaatttaagatattcaaagctgaagttgaaaatcagcatgatataaagattaaagtagtaagatctgaccgtgggggggagtactatggtcgacatacgccttatgggcaagtccctggaccttttgcaaggttcttgctagagaatggaatagtagcccagtattcaacaccgggcgaacctcaacagaatggggtagctgaaaggcgcaaccgtacgcttatggatatggtgcgcagcatgatgagctactccacactaccactcggtttatggatggaggcgttaaaaaccgccattcatattctcaacagagttccaagcaaatcggtgcccaaaacaccgtatgagctatggacagggagagtaccctcgctaactcacctccgtgtgtgggggagtcctgcagaggccaaagtatttaacccaaatattgggaagttggaccccaaaacagtcagttgccattttattggctatcctgaaagatcaaaaggctatcgtttctactgtccaaacagttatacaaagtttgtagaaacgagacacgacgtcttcttggaagacgaaatgattagggggagctcggtagttcgagaaattgatcttgaggagaggcgggtgtctgtacccgctccgtcgactcaggaacctttcttctctctacctgctgatgttgtgcctgcaatgcctgtcattgaggtaccagcacctgttgttacccctcctgtggcaacaatgaatgagagtgaggaacctgttatacaggattcaacagaaatggttgccacgccagaggaggagctacaacagcctcaaatagataatgtgccagtacaggagactcatcaagagcctcaggtacaggatgtgccaaatgtgcaggcccctagaaggtctgaaagagtcagaagatcggctatccgtgatgactataaagtttataatatagaagagtcgcatatggaggatgatcccacctcatatgaagaggccatgagaagcgctcgctcatctgaatggttggaagccatgaaagatgaaatgaaatcaatgaaactaaacgatgtttgggatttagaagaaattcctaaaggagccaaaacagtaggctgtaaatgggtctacaaaaccaaatatgactccagagggaatatagaaaagtttaaagcgcgacttgtggcaaaaggcttcacgcaacgagaagggattgattacaatgagacattttctccagtctcttgtaaagattccttcaggattataatggcactagtggcacattatgatttggaattacatcagatggatgtaaaaacggcatttctaaatggagatttggaggaaaaagtatacatggcgcaaccgaaaggttttgtcatgaaaggaaacgaaaatatgggatgtcgtctaaagagatccatttatggattaaagcaagcttcgagacagtggtacttgaagtttgatgggacaataaagaaatttgggtttcaagagaatgtcgaggacaactgtatttatccaaagtttaagaatgggagatttattttcctaattctgtatgtggatgacattctactggctagtagtgatgtcagtctactgcagaaaacaaagaaattcttgtcctcaacttttgacatgaaagacctcggtgaggcttcatatgttttgggcatagagattcaccgagatagaacaaagtatgcattggaactttctcaaaagacatatatagaaaaggtgttgaagaaattcaacatgtacagatgcagtgctacacctgctcctataatgaaaggcgaaaagtatggggcatcgcaatgtcccagaaatcagtatgagctcaatgaaatgaaaacaaagccatatgcgtcagctgtaggaagcctacagtacgcgcaagtgtgcacacgacctgacttggcatttgttaccgggttacttggcagatttcagagtaatccaggcctagagcactggaaattggtaaagaaagtcttgcgttatttgcaaggaacaaaaggcctcatgctgtcttacagaagatcagaatcactccagatagtggggtactcagattctgactttgcaaaagataatacaaagtcaacatcgggatacgtgtttaccctggcaggaggagctatttcatggaaaagctcaaaacagactatcactgcagggtctactatgtatgccgagtttatagcatgctatgaggcaacggggcaggtgaactggctaaagaagttcatacccggtttaaaggtggttgacagtattgagaaaccactaaagttatactgcgacaacgaacccgcagtaatgtacactcacaacaatcagtcaagtggtgctgccaaacacattgacataaagtactatgttgtgaaggacaaagtccgggatcaaacaatcagtctcgagcacattaaaacagaaaggatgctcgcggatccgctcacgaaaggcctaccacccaacgtgttcaaggaacatgtagccggcatgggtttaagggaagccttatga

SEQ ID NO: 14422 - DNA, 4188 bp, Oryza sativa
  Clone ID: TFbOSC14723j.C1.o1.fg
atggcgacgccgtccacgcggtcgcgtggctactccttgatgggttgcattaaagatattccgaccctaaaaggagataactacgcagaatggaaaagaaaactcgaccttgcttttatcttgggagaggtggactgggtattgactaccccatgtcctatagaacctgctgaccttgtcagaggtgaaaatgagtcagatgctgactggcaaaagagacagagggacaatgctcctctcgtcatgtcgtatgacattgaacaaaagaaatggtccttagccaacaagaaatgtttggctgtggtaaagaatacgattgagcctaccatattgggctcgatcccagagtgtgacgctgtctcagagtaccttgaaagaataaagagtcagtttactggctcttcaaagacttatgctacacagctgatcaagcagcttgtgacagaaaggtacaatggaggtggtgttagagaccacatacttagaatgagcaacatggcttccaagttgaagccaatggatttgggcataacagatgactttctggtccatctggttatggcctcattgccaaagcagtttgacaattttattgtcaactacaacataagtccagagaaatggaactttgagaagctcattgctaattgtgtgcaagaggaggagagaatcaaagaatcaaatggtggttcaataaactatgttaaagataagaaaaagaaccacaagtctcccacctcaaaaggtaaacagtctcagcatctgcctcagcaacaacagttcgctgttgagaaagatcaatgtctccactgcaagaagacaggacactacaagaaagattgtcctgactttttgaaaatgatcatggcaaagaaaggtgagaacattattacatttgtaaatgaatctcattatgttggttactctagatccacatggtggattgattctggagcaactattcatgcttgtaattgtttaaaggcattccgttcgacgaggactacgcaaagaagagaaagcaccattagagttgccaatggagttgaagaaaaagttgaagctgttggagatcttcctctagagctcgcgaatggcttcatacttttacttcgagatgtcttttatgttccttctttgcaaaggaacttaataagtgtatcaaagttggattttgatggatatgattgccgctttggaagtggcaaatgtgaactatggcataataatgcatgtattggtcttgctgtgttgcgagacgagctttatttgttatctctttctgagaatgtgaatgttgtgtcctcgttgacaaaagaaaacaagaaaagaaagcgaactcccgatgtctcatcgaaattatggcactgtcgtttgggccatatttcgagggggagaattgagagactagttaagaatgaaattcttcctccattggaatgcatagaatgcattaaaggaaaatttgtaaagagcatcaaaaagggtgcaaaacgaagcgcaggaattttagagatcattcatacagatatttgtggtccatttcctgtgaaaagtgtggatggctatgactcgttcataacattcacagatgattactcccgctatggttatatttatccaattaaagagcgatcagaagcactggataaatttaagatattcaaagctgaagttgaaaatcagcatgatataaagattaaagtagtaagatctgaccgtgggggggagtactatggtcgacatacgccttatgggcaagtccctggaccttttgcaaggttcttgctagagaatggaatagtagcccagtattcaacaccgggcgaacctcaacagaatggggtagctgaaaggcgcaaccgtacgcttatggatatggtgcgcagcatgatgagctactccacactaccactcggtttatggatggaggcgttaaaaaccgccattcatattctcaacagagttccaagcaaatcggtgcccaaaacaccgtatgagctatggacagggagagtaccctcgctaactcacctccgtgtgtgggggagtcctgcagaggccaaagtatttaacccaaatattgggaagttggaccccaaaacagtcagttgccattttattggctatcctgaaagatcaaaaggctatcgtttctactgtccaaacagttatacaaagtttgtagaaacgagacacgacgtcttcttggaagacgaaatgattagggggagctcggtagttcgagaaattgatcttgaggagaggcgggtgtctgtacccgctccgtcgactcaggaacctttcttctctctacctgctgatgttgtgcctgcaatgcctgtcattgaggtaccagcacctgttgttacccctcctgtggcaacaatgaatgagagtgaggaacctgttatacaggattcaacagaaatggttgccacgccagaggaggagctacaacagcctcaaatagataatgtgccagtacaggagactcatcaagagcctcaggtacaggatgtgccaaatgtgcaggcccctagaaggtctgaaagagtcagaagatcggctatccgtgatgactataaagtttataatatagaagagtcgcatatggaggatgatcccacctcatatgaagaggccatgagaagcgctcgctcatctgaatggttggaagccatgaaagatgaaatgaaatcaatgaaactaaacgatgtttgggatttagaagaaattcctaaaggagccaaaacagtaggctgtaaatgggtctacaaaaccaaatatgactccagagggaatatagaaaagtttaaagcgcgacttgtggcaaaaggcttcacgcaacgagaagggattgattacaatgagacattttctccagtctcttgtaaagattccttcaggattataatggcactagtggcacattatgatttggaattacatcagatggatgtaaaaacggcatttctaaatggagatttggaggaaaaagtatacatggcgcaaccgaaaggttttgtcatgaaaggaaacgaaaatatgggatgtcgtctaaagagatccatttatggattaaagcaagcttcgagacagtggtacttgaagtttgatgggacaataaagaaatttgggtttcaagagaatgtcgaggacaactgtatttattcaaagtttaagaatgggagatttattttcctaattctgtatgtggatgacattctactggctagtagtgatgtcagtctactgcaggaaacaaagaaattcttgtcctcaaactttgacatgaaagacctcggtgaggcttcatatgttttgggcatagagattcaccgagatagaacaaagtatgcattgggactttctcaaaagacatatatagaaaaggtgttgaagaaattcaacatgtacagatgcagtgctacacctgctcctataatgaaaggcgaaaagtatggggcatcgcaatgtcccagaaatcagtatgagctcaatgaaatgaaaacaaagccatatgcgtcagctgtaggaagcctacagtacgcgcaagtgtgcacacgacctgacttggcatttgttaccgggttacttggcagatttcagagtaatccaggcctagagcactggaaattggtaaagaaagtcttgcgttatttgcaaggaacaaaaggcctcatgctgtcttacagaagatcagaatcactccagatagtggggtactcagattctgactttgcaaaagataatacaaagtcaacatcgggatacgtgtttaccctggcaggaggagctatttcatggaaaagctcaaaacagactatcactgcagggtctactatgtatgccgagtttatagcatgctatgaggcaacggggcaggtgaactggctaaagaagttcatacccggtttaaaggtggttgacagtattgagaaaccactaaagttatactgcgacaacgaacccgcagtaatgtacactcacaacaatcagtcaagtggtgctgccaaacacattgacataaagtactatgttgtgaaggacaaagtccgggatcaaacaatcagtctcgagcacattaaaacagaaaggatgctcgcggatccgctcacgaaaggcctaccacccaacgtgttcaaggaacatgtagccggcatgggtttaagggaagccttatga

SEQ ID NO: 14423 - DNA, 259 bp, Oryza sativa
  Clone ID: TFbOSC15718j.C1.o5.np
tgtcacgaccggaaataacccaacgggcgttccttacgtgcgtgcattaatccttgtcccaggaggcaaggcccagcacacacaaagacaaacgacaaacagcggaagactagggcgacgaccacaggcacttgacggcaggcacgagctagacaccaaagccttcatcctccaggaactcctcttctgggtttgggaaaaattgagcaagactgagtacaaccaccgtactcaacaagacacacccacaagtgcagaa

SEQ ID NO: 14424 - DNA, 2310 bp, Oryza sativa
  Clone ID: TFbOSC18458j.C1.o2.hg
atgtcgtatgacattgaacaaaagaaatggtccttagccaacaagaaatgtttggctgtggtaaagaatacgattgagcctaccatattgggctcgatcccagagtgtgacgctgtctcagagtaccttgaaagaataaagagtcagtttactggctcttcaaagacttatgctacacagctgatcaagcagcttgtgacagaaaggtaccatggaggtggtgttagagaccacatacttagaatgagcaacatggcttccaagttgaagccaatggatttgggcataacagatgactttctggtccatctggttatggcctcattgccaaagcagtttgacaattttattgtcaactacaacataagtccagagaaatggaactttgagaagctcattgctaattgtgtgcaagaggaggagagaatcaaagaatcaaatggtggttcaataaactatgttaaagataagaaaaagaaccacaagtctcccacctcaaaaggtaaacagtctcagcatctgcctcaacaacaacagttcgctgttgagaaagatcaatgtctccactgcaagaagacaggacactacaagaaagattgtcctgactttttgaaaatgatcatggcaaagaaaggtgagaacattattacatttgtaaatgaatctcattatgttggttactctagatccacatggtggattgattctggagcaactattcatgcttgtaattgtttaaaggcattccgttcgacgaggactacgcaaagaagagaaaacaccattagagttgccaatggagttgaagaaaaagttgaagctgttggagatcttcctctagagctcgcgaatggcttcatacttttacttcgagatgtcttttatgttccttctttgcaaaggaacttaataagtgtatcaaagttggattttgatggatatgattgccgctttggaagtggcaaatgtgaactatggcataataatgcatgtattggtcttgctgtgttgcgagacgagctttatttgttatctctttctgagaatgtgaatgttgtgtcctcgttgacaaaagaaaacaagaaaagaaagcgaactcccgatgtctcatcgaaattatggcactgtcgtttgggccatatttcgagggggagagttgagagactagttaagaatgaaattcttcctccattggagttctcagacttagaacaatgcatagaatgcattaaaggaaaatttgtaaagagcatcaaaaagggtgcaaaacgaagcgcaggaattttagagatcattcatacagatatttgtggtccattttctgtgaaaagtgtggatggctatgactcgttcataacattcacagatgattactcccgctatggttatatttatccaattaaagagcgatcagaagcattggataaatttaagatattcaaagctgaagttgaaaatcagcatgatataaagattaaagtagtaagatctgaccgtgggggggagtactatggtcgacatacgccttatgggcaagtccctggaccttttgcaaggttcttgctagagaatggaatagtagcccagtattcaacaccgggcgaacctcaacagaatggggtagctgaaaggcgcaaccgtacccttatggatatggtgcgcagcatgatgagctactccacactaccactcggtttatggatggaggcgttaaaaaccgccattcatattctcaacagagttccaagcaaatcggtgcccaaaacaccgtatgagctatggacagggagagtaccctcgctaactcacctccgtgtgtgggggagtcctgcagaggccaaagtatttaacccaaatattgggaagttggaccccaaaacagtcagctgccattttattggctatcctgaaagatcaaaacgctatcgtttctactgtccaaacagttatacaaagtttgtagaaacgagacacgccgtcttcttggaagacgaaatgattagggggagctcggtagttcgagaaattgatcttgaggagaggcgggtgtctgtacccgctccgtcgactcaggaacctttcttctctctacctgctgatgttgtgcctgcaatgcctgtcattgaggtaccagcacctgttgttacccctcctgtggcaacaatgaatgagagtgaggaacctgttatacaggattcaacagaaatggttgtcacaccagaggaggagctacaacagcctcaaatagataatgtgccagtacaggagactcatcaagagcctcaggtacaggatgtgccaaatgtgcag

SEQ ID NO: 14425 - DNA, 4173 bp, Oryza sativa
  Clone ID: TFbOSC26474j.C1.o5.fg
atggcgacgccgtccacgcggtcgcgtggctactccttgatgggttgcattaaagatattccgaccctaaaaggagataactacgcagaatggaaaagaaaactcgaccttgcttttatcttgggagaggtggactgggtattgactaccccatgtcctatagaacctgctgaacttgtcagaggtgaaaatgagtcagatgctgactggcaaaagagacagagggacaatgctcctctcgtcatgtcgtatgacattgaacaaaagaaatggttcttagccaacaagaaatgtttggctgtggtaaagaatacgattgagcctaccatattgggctcgatcccagagtgtgacgctgtctcagagtaccttgaaagaataaagagtcagtttactgactcttcaaagacttatgctacacagctgatcaagcagcttgtgacagaaaggtaccatggaggtggtgttagagaccacatacttagaatgagcaacatggcttccaagttgaagccaatggatttgggcataacagatgactttctggtccatctggttatggcctcattgccaaagcagtttgacaattttattgtcaactacaacataagtccagagaaatggaactttgagaagctcattgctaattgtgtgcaagaggaggagagaatcaaagaatcaaatggtggttcaataaactatgttaaagataagaaaaagaaccacaagtctcccacctcaaaaggtaaacagtctcagcatctgcctcagcaacaacagttcgctgttgagaaagatcaatgtctccactgcaagaagacaggacactacaagaaagattgtcctgactttttgaaaatgatcatggcaaagaaaggtgagaacattattacatttgtaaatgaatctcattatgttggttactctagatccacatggtggattgattctggagcaactattcatgcttgtaattgtttaaaggcattccgttcgacgaggactacgcaaagaagagaaagcaccattagagttgccaatggagttgaaaaagttgaagctgttggagatcttcctctagagctcgcgaatggcttcatacttttacttcgagatgtcttttatgttccttctttgcaaagaaacttaataagtgtatcaaagttggattttgatggatatgattgccgctttggaagtggcaaatgtgaactatggcataataatgcatgtattggtcttgccgtgttgcgagacgagctttatttgttatctctttctgagaatgtgaatgttgtgtcctcattgacaaaagaaaacaagaaaagaaagcgaactcccgatgtctcatcgaaattatggcactatcgtttgggccatatttcgagggggagaattgagagactagttaagaatgaaattcttcctccattggagttctcagacttagaacaatgcatagaatgcattaaaggaaaatttgtaaagagcatcaaaaagggtgcaaaacgaagcgcaggaattttagagatcattcatacagatatttgtggtccatttcctgtaaaaagcgtggatggctatgactcgttcataacattcacagatgattactcccgctatggttatatttatccaattaaagagcgatcagaagcaatggataaatttaagatattcaaagctgaagttgaaaatcagcttgatataaagattaaagtagtaagatctgaccgtgggggagagtactatggtcgacatacgccttatgggcaagtccctggaccttttgcaaggttcttgctagagaatggaatagtagcccagtattcaacaccgggcgaacctcaacagaatggggtagctgaaaggcgcaaccgtacgcttatggatatggtgcgcagcatgatgagctactccacactaccactcggtttatggatggaggcgttaaaaaccgccattcatattctcaacagagttccaagcaaatcggtgcccaaaacaccgtatgagctatggacagggagagtaccctcgctaactcacctccgtgtgtgggggagtcctgcagaggccaaagtatttaacccaaatattgggaagttggaccccaaaacagtcagctgccattttattggctatcctgaaagatcaaaaggctatcgtttctactgtccaaacagttatacaaagtttgtagaaacgagacacgccgtcttcttggaagacgaaatgattagggggagctcggtagttcgagaaattgatcttgaggagaggcgggtgtctgtacccgctccgtcgactcaggaacctttcttctctctacctgctgatgttgtgcctgcaatgcctgtcattgaggtaccaatgaatgagagtgaagaacctgttatacaggattcaacagaaatggttgccacaccagaggaggagctgcaacagcctcaaatagataatgtgccagtacaggagactcatcaagagcctcaggtacaggatgtgccaaatgtgcaggcccctagaaggtctgaaagagtcagaagatcggctatccgtgatgactataaagtttataatatagaagagtcgcatatggaggatgatcccacctcatatgaagaggccatgagaagcgctcgctcatctgaatggttggaagccatgaaagatgaaatgaaatcaatgaaactaaacgatgtttgggatttagaagaaattcctaaaggagccaaaacagtaggctgtaaatgggtctacaaaaccaaatatgactccagagggaatatagaaaagtttaaagcgcgacttgtggcaaaaggcttcacgcaacgagaagggattgattacaatgagacattttctccagtctcttgtaaagattccttcaggattataatggcactagtggcacattatgatttggaattacatcagatggatgtaaaaacggcatttctaaatggagatttggaggaaaaagtatacatggcgcaaccgaaaggttttgtcatgaaaggaaacgaaaatatgggatgtcgtctaaagagatccatttatggattaaagcaagcttcgagacagtggtacttgaagtttgatgggacaataaagaaatttgggtttaaagagaatgtcgaggacaactgtatttattcaaagtttaagaatgggagatttattttcctaattctgtatgtggatgacattctactggctagtagtgatgtcagtctactgcaggaaacaaagaaattcttgtcctcaaactttgacatgaaagacctcggtgaggcttcatatgttttgggcatagagattcaccgagatagaacaaagtatgcattgggactttctcaaaagacatatatagaaaaggtgttgaagaaattcaacatgtacagatgcagtgctacacctgctcctataatgaaaggcgaaaagtatggggcatcgcaatgtcccagaaatcagtatgagctcaatgaaatgaaaacaaagccatatgcgtcagctgtaggaagcctacagtacgcgcaagtctgcacacgacctgacttggcattcgttaccgggttacttggcagatttcagagtaatccaggcctagagcactggaaattggtaaagaaagtcttgcgttatttgcagggaacaaaaggcctcatgctatcttacagaagatcagaatcactccagatagtggggtactcagattctgactttgcaaaagataatacaaagtcaacatcgggatacgtgtttaccctggcaggaggagctatttcatggaaaagctcaaaacagactatcactgcagggtctactatgtatgccgagtttatagcatgctatgaggcaacggggcaggtgaactggctaaagaagttcatacccggtttaaaggtggttgacagtattgagaaaccactaaagttatactgcgacaacgaacccgcagtaatgtacgctcacaacaatcagtcaagtggtgctgccaaacacattgacataaagtactatgttgtgaaggacaaagtccgggatcaaacaatcagtctcgagcacattaaaacagaaaggatgctcgcggatgcgctcacgaaaggcctaccacccaacgtgttcaaggaacatgtagccggcatgggtttaagggaagccttatga

SEQ ID NO: 14426 - DNA, 3594 bp, Oryza sativa
  Clone ID: TFbOSC34338j.C1.o3.fg
gtggattgtgtgttgactaccccatgtcctatagaacctgctgaacttgtcagaggtgaaaatgagtcagatgctgactggcaaaagagacagagggacaatgctcctctcgtcatgtcgtatgacattgaacaaaagaaatggtccttagccaacaagaaatgtttggctgtggtaaagaatacgattgagcctaccatattgggctcaatcccagagtgtgacgctgtctcagagtaccttgaaaaaataaagagtcagtttactggctcttcaaagacgtatgctacacagctgatcaagcagcttgtgacagaaaggtaccatggaggtggtgttagagatcacatacttagaatgagcaacatggcttccaagttgaagccaatggatttaggcataacagatgactttctggaggagagaatcaaaggatcaaatggtggttcaataaactatgttaaagataagaaaaagaaccacaagtctcccgcctcaaaagctaaacaatctcagcatctgcctcagcaacaacagttcgctgttgagaaagatcagtgtctccattgcaagaagacaggacactacaagaaagattgtcctgattttttgaaaatgatcatggcaaggaaaggtgagaacattattacatttgtaaatgaatcttattatgttggttactctagatccacatggtggattgattctggagcaactattcatgcttgtaattgtttaaaggcattccgttcgacgaggactacgcaaagaagagaaagctccattagagtcgccaatggagttgaagaaaaagttgaagctgttggagatcttcctctagagctcgcgaatggcttcatgcttttacttcgagatgtcttttatgttccttctttgcaaagaaacttaataagtgtatcaaagttggattttgatggatatgattgccgctttggaagtggcaaatgtgaactatggcataataatgcatgtattggtcttgctgtgttgcgagacgagttttatttgttatctctttctgagaatgtgaatgttgtgtcctcgttgacaaaagaaaacaagaaaagaaagcgaactcccgatgtctcatcgaaattatggcaccgtcgtttgggccatatttcgagggggagaattgagagactagttaagaatgaaattcttcctccattggagttctcagacttagaacaatgcatagaatgcattaaaggaaaatttgtaaagagcatcaaaaagggtgcaaaacgaagcgcaagaattttagagatcattcatacagatatttgtggtccatttcctgtgaaaagtgtggatggctatgactcgttcataacattcacagatgattactcccgctattgttatatttatccaattaaagagcgatcagaagcattggataaatttaagatattcaaagctgaagttgaaaatcagcatgatataaagattaaagtagtaagatctgaccgtgggggggagtactatggtcgacatacaccttatgggcaagtccctggaccttttgcaaggttcttgttagagaatggaatagtagcccagtattcaacaccgggcgaacctcaacagaatggggtagctaaaaggcgtaaccgtacccttatggatatggtgcgcagcatgatgagctactccacactaccactgggtttatggatggaggcgttaaaaaccaccattcatattctcaacagaattccaagcaaatcggtgcccaaaacaccgtatgagctatggacaggaagagtaccctcgctagctcacctccgtgtgtgggggagttctgcagaggccaaagtatttaacccaaatattgggaagttggatcccaagacagtcggctgccattttattggctatcctgaaagatcaaaaggctatcgtttctactgtccaaacagttatacaaagtttgtagaaatgagacatgccgtcttcttggaagacgaaatgattagggggagctcggattcaacagaaatggttgccacaccagaggaggagctgcaacagccacaaatagataatgtgccagtacaggagactcaacaagagcctcaggtacaggatgtgccaaatatgcaggctcctagaaggtctgaaagagtcagaagatcggctatccgtgatgactataaaatttataatatagaagagtcgcatatggaggatgatcccacctcatatgaagaggccatgagaagcgctcgctcatctgaatggttggaagccatgaaagatgaaatgaaatcaatgaaactaaacaatgtttgggatttagaagaaattcctaaaagagccaaaacagatttaatggcactagtggcacattatgatttggaattacatcagatggatgtaaaaacggcatttctaaatggagatttggaggaaatagtatacatggtgcaaccgaaaggttttgtcatgaaaggaaacgaaaatatgggatgccgtttaaagagatccatttatggattaaagcaagcttcgagacagtggtacttgaagtttgatgggacaataaagaaatttgggtttcaagagaatgtcgaggacaactgtatttattcaaagtttaagaatgggagatttattttcctaattctgtatgtggatgacattctactggctagtagtgatgtcagtctactgcaggaaacaaagaaattcttgtcctcaaactttgacatgaaagacctcggtgaagcttcatatgttttgggcatagagattcaccgagatagaacaaagtatgcattgggactttctcaaaagacatatatagaaaaggtgttgaagaaattcaacatgtacagatgcagtgctacacctgctcctatagtgaaaggcgaaaagtatggggcatcgcaatgtcccagaaatcagtatgagctcaatgaaatgaaaacaaagccatatgcgtcagctgtaggaagcctacagtatgcgcaagtgtgcacacgacctgacttggcatttgttaccgggttacttggcagatttcaaagtaatccaggcctagagcactggaaattggtaaagaaagtcttgcgttatttgcaaggaacaaaaggcctcatgctgtcttacagaagatcagaatcactccagatagtggggtattcagattctgactttgcaaaagataatacaaagtcaacatcgggatacgtgtttaccctggcaggaggagctatttcatggaaaagctcaaaacagactatcactgcagggtctactatgtatgctgagtttatagcatgctatgaggcaacggggcaggtgattgacagtattgagaaaccactgaagttatactgcgacaacgaacccgcagtaatgtacgctcacaacaatcagtcaagtggtgctgccaaacacattgacataaagtactatgttgtgaaggacaaagtccgggatcaaacaatcagtctcgagcacattaaaacagaaaggatgctcgcggatccgctcacaaaaggcctaccacccaacgtgttcaaggaacatgtagccggcatgggtttaagggaagccttatga

SEQ ID NO: 14427 - DNA, 3447 bp, Oryza sativa
  Clone ID: TFbOSC400203j.C1.o35.fg
atggaaaaaaaactcgaccttgcttttatcttgggagaggtggactgggtgttgactaccccatgtcctatagaacctgctgaacttgtcagaggtgaaaatgagtcagatgctgactggcaaaagagacagagggacaatgctcctctcgtcatgtcgtatgacattgaacaaaagaaatggtccttagccaacaagaaatgtttggctgtggtaaagaatacgattgagcctaccatattgggctcgatcccagagtgtgacgttgtctcagagtaccgtgaaagaataaagagtcagtttactggctcttcaaagacttatgctacacagctaatcaagcagcttgtgacagaaaggtaccatggaggtggtgttagagaccacatacttagaatgagcaacatggcttccaagttgaagccaatggatttgggcataacagatgactttctggtccatctggttatggcctcattgccaaagcagtttgacaattttattgtcaactacaacataagtccagagaaatggaactttgagaagctcattgctaattgtgtgcaagaggaggagagaatcaaagaatcaaatggtggttcaataaactatgttaaagataagaaaaagaaccacaagtctcccacctcaaaaggtaaacagtctcagcatctgcctcagcaacaacagttcgctgttgagaaagatcaatgtctccactgcaagaagacaggacactacaagaaagattgtcctgactttctgaaaatgatcatggcaaagaaaggtgagaacattattacatttgtaaatgaatctcattatgttggttactctagatccacatggtggattgattctggagcaactattcatgcttgtaattgtttaaaggcattccgttcgacaaggactacgcaaggaagagaaagctccattagagttgccaatggatttgaagaaaaagttgaagctgttggagatcttccgctagagctcgcgaatggcttcacacttttacttcgagatgtcttttatgttccttctttgcaaagaaacttaataagtgtatcaaagttggattttgatggatatgattgccgctttggaagtggcaaatgtgaactatggcataataatgcatgtattggtcttgctgtgttgcgagacgagctttatttgttatctctttctgagaatgtgaatgttgtgtcctcgttgacaaaagaaaacaagaaaagaaagcgaacttccgatgtctcatcgaaattatggcactgtcgtttgggccatatttcgagggggagaattgagagactagttaagaatgaaattctttccccattggagttctcagacttagaacaatgcatagaatgcattaaaggaaaatttgtaaagagcatcaaaaagggtgcaaaacgaagcgcaggaattttagagatcattcatacagatatttgtggtccatttcctatgaaaagtatggatggctatgactcgttcataacattcacagatgattactcccgctatggttatatttatccaattaaagagcgatcagaagcactggataaatttaagatattcaaagctgaagttgaaaatcagcatgatataaagattaaagtagtaagatctgaccgtgggggggagtactatggtcgacatacgccttatgggcaagtccctggaccttttgcaaggttcttgctagagaatggaatagtagcccagtattcaacaccgggcgaacctcaacagaatggggtagctgaaaggcgcaaccgtacccttatggctatggacaggaagagtaccctcgctaactcacctccttatacaaagtttgtagaaacgagacacgccgtcttcttggaagacggaatgattagggggagctcggtagttcgagaaattgatcttgaggagaggcgggtgtctgtacccgctccgtcgactcaggaacctttcttctctctacctgctgatgttgtgcctgcaatgcctgtcattgaggtaccagcacctgttgttacccctcctgtggcaacaatgaatgagagtgaggaacctgttatacaggattcaacagaaatggttgccacaccagaggaggagctacaacagcctcaaatagataatgtgccagtacaggagactcatcaagagcctcaggtacaggatgtgccaaatgtgcaggcccctagaaggtctgaaagagtcagaagatcggctatccgtgatgactataaagtttataatatagaagagtcgcatatggaggatgatcccacctcatatgaagaggccatgagaagcgctcgctcatctgaatggttggaagccatgaaagatgaaatgaaatcaatgaaactaaacgatgtttgggatttagaagaaattcctaaaggagccaaaacagtaggctgtaaatgggtctacaaaaccaaatatgactccagagggaatatagaaaagtttaaagcgcgacttgtggcaaaaggcttcacgcaacgagaagggattgattacaatgagacattttctccagtctcttgtaaagattcctttaggattataatggcactagtggcacattatgatttggaattacatcagatggatgtaaaaatggcatttctaaatggagatttggaggaaaaagaaacaaagaaattcttgtcctcaaactttgacatgaaagacctcggtgaggcttcatatgttttgggcatagagattcaccgagatagaacaaagtatgcattgggactttctcaaaagacatatatagaaaaggtgttgaagaaattcaacatgtacagatgcagtgctacacctgctcctataatgaaaggcgaaaagtatggggcatcgcaatgtcccagaaataagtatgagctcaatgaaatgaaaacaaagccatatgcgtcagctgtaggaagcctacaaagatcagaatcactccagatagtggggtactcagattctgactttgcaaaagataatacaaagtcaacatcgggatacgtgtttaccctggcaggaggagctatttcatggaaaagctcaaaacagactatcactggagggtctactatgtatgccgagtttatagcatgctatgaggcaacggggcaggtgaactggctaaagaagttcatacccggtttaaaggtggttgacagtattgagaaaccactaaagttatactgcgacaacgaacccgcagtaatgtacgctcacaacaatcagtcaagtggtgctgccaaacacattgacataaagtactatgttgtgaaggacaaagtccgggatcaaacaatcagtctcgagcacattaaaacagaaaggatgctcgcggatccgctcacgaaaggcctaccacccaacgtgttcaaggaacatgtagccggcatgggtttaagggaagccttatga

SEQ ID NO: 14428 - DNA, 2499 bp, Oryza sativa
  Clone ID: TFbOSC400458j.C1.o27.fg
atggcgggtgcagcgaaggcgtcgtggatggtggcgatgagcgtgggcgccgtggaggcgctcaaggaccagggcggactctgccgctggaactacgcgctgcggtccatccacaaagcagccaaggccaacgccgccggcgtctctcagggcaagaagctgcctgcttctgcggcggcggtggcggagaggaggagagcggagaaggccgaggaggggctgaggacggtcatgtacctcagctgctggggtcccaattgtggctactccttgatgggttgcattaaagatattccgaccctaaaaggagataactacgcagaatggaaaagaaaactcgaccttgcttttatcttgggagaggtggactgggtattgactaccccatgtcctatagaacctgctgaccttgtcagaggtgaaaatgagtcagatgctgactggcaaaagagacagagggacaatgctcctctcgtcatgtcgtatgacattgaacaaaagaaatggtccttagccaacaagaaatgtttggctgtggtaaagaatacaattgagcctaccatattgggctcgatcccagagtgtgacgctgtctcagagtaccttgaaagaataaagagtcagtttactggctcttcaaagacttatgctacacagctgatcaagcagcttgtgacagaaaggtaccatggaggtggtgttagagaccacatacttagaatgagcaacatggcttccaaattgaagccaatggatttgggcataacagatgactttctggtccatctggttatggcctcattgccaaagcagtttgacaattttattgtcaactacaacataagtccagagaaatggaactttgagaagctcattgctaattgtgtgcaagaggaggagagaatcaaagaatcaaatggtggttcaataaactatgttaaagataagaaaaagaaccacaagtctcccacctcaaaaggtaaacagtctcagcatctgcctcaacaacaacagttcgctgttgagaaagatcaatgtctccactgcaagaagacaggacactacaagaaagattgtcctgactttttgaaaatgatcatggcaaagaaaggtgagaacattattacatttgtaaatgaatctcattatgttggttactctagatccacatggtggattgattctggagcaactattcatgcttgtaattgtttaaaggcattccgttcgacgaggactacgcaaagaagagaaagcaccattagagttgccaatggagttgaagaaaaagttgaagctgttggagatcttcctctagagctcgcgaatggcttcatacttttacttcgagatgtcttttatgttccttctttgcaaaggaacttaataagtgtatcaaagttggattttgatggatatgattgccgctttggaagtggcaaatgtgaactatggcataataatgcatgtattggtcttgctgtgttgcgagacgagctttatttgttatctctttctgagaatgtgaatgttgtgtcctcgttgacaaaagaaaacaagaaaagaaagcgaactcccgatgtctcatcgaaattatggcactgtcgtttgggccatatttcgagggggagaattgagagactagttaagaatgaaattcttcctccattggagttctcagacttagaacaatgcatagaatgcattaaaggaaaatttgtaaagagcatcaaaaagggtgcaaaacgaagcgcaggaattttagagatcattcatacagatatttgtggtccatttcctgtgaaaagtgtggatggctatgactcgttcataacattcacagatgattactcccgctatggttatatttatccaattaaagagcgatcagaagcactggataaatttaagatattcaaagctgaagttgaaaatcagcatgatataaagattaaagtagtaagatctgaccgtgggggggagtactatggtcgacatacgccttatgggcaagtccctggaccttttgcaaggttcttgctagagaatggaatagtagcccagtattcaacaccgggcgaacctcaacagaatggggtagcagaaaggcgcaaccgtacgcttatggatatggtgcgcagcatgatgagctactccacactaccactcggtttatggatggaggcgttaaaaaccaccattcatattctcaacagagttccaagcaaatcggtgcccaaaacaccgtatgagctatggacagggagagtaccctcgctaactcacctccgtgtgtgggggagtcctgcagaggccaaagtatttaacccaaatattgggaagttggaccccaaaacagtcagttgccattttattggctatcctgaaagatcaaaaggctatcgtttctactgtccaaacagttatacaaagtttgtagaaacgagacacgccgtcttcttggaagacgaaatgattagggggagctcggtagtttga

SEQ ID NO: 14429 - DNA, 1980 bp, Oryza sativa
  Clone ID: TFbOSC400762j.C1.o4.fg
atgtcggacttagggggaaagaacggggaaaatggaaatgaagatggagcaagcagcaagggaactccatcacccaagggagctactataccttttgattacagcaaacttaccattccccctcacaactttgtctccgtgccttccgggcgtgctcctcaatttgatgggacacattacgccgcttggaagcacaagatgaagttgcatctaatctctttgcatccaagtatttggaaagttgtttgtacaggtgttgatgtaccccatgatgacatgaagctcactttggagcaagagcaactcatccaccgcaatgctcaagcttccaatgcaaattctctccgccttgagtccggaggagttcaacaagaggaagctcatgaagtgaggcaaatggtgaagaatgccgccatgatcaaaaatcaagaagttgctttgaaggcaaaacaagaagaagagtcaagttgtgaagaaagtgaagatgaagagatggcttttattgtcaagagattcaagcactttattcgcaagagtggctatggcaaagggagaaatgatgatgacaagggaaagaggcaatcaaagagagcttggtttaattgtggcgaatatggccacttcattgccgattgtcccaagtcaaataaagctaaggctaagggaggcaagaagaagccggagcgtgctcatgtggcggaggcacacatggcggaggtgtggtactccggagatgaagaagatctcgaggtcaagcccaagcccaagccaaaagacaaggttgaaggagaatgtggtgttgctaccgtcgccttcaagtcatcctcttcaagtaaggagtgtctcttcaacaacttgagtgatgacgacgacgactcctaccactactcttgtttcatggctcaaggccgtaaggtgatgactcaaaagccctctcacacctctcttgatgttgattctaatgatgaggaaagtgataatgaattagatgatgtgcttaagagctttagcaaacccgctatgcaacatttggctaagttaatgagagctttggatagtaaagaacaatctctcgaaaggcaagaagaattacttattcttgagaagaaaagaaaccttgccttagaggagagcctagctaaagaatgtgctaaaaatgaacaactagctaatgagcttaatttggctaatggttctctagctagccttagggatgccaatgaaactcttcaagagaaatttgctagtttagacaaaagtcataaagatcttgaagttcaatttgacactctttggaataacacttctcaaccaaatgtggtttctaattcttccaatccatctactagcaatggttgtgctaggtgttacaatattgatttgaactctcatgctactaatgttgatgctatgcaagctcttaagaaagagaataaaaggttgggcacattggtgaaatatggatgcatgaagacataccattcaaaagatgccctttacaagaccatcaccgctcatcctaacaaggatggacacgggctcgggttttctggtggaagtcctgtgtctaagcatgtgatggtaaatgtgaaagaatgcttaatgtttgtgagagaaggaaaagctccacaagcaagtgaggtgacttgtcccctcactggtcagacacctggaagttccgggcaaaatgaccggaagttcctgccctgtaagacaggaagttccaggaagttccgggcttctgataggccgaaggggctgactggaagttccgggtataatgccaggaagttccggccagagggtctttactatgatttatatgtaatttccaaaaattcagagggcaaagtggttgcttattttaatgggaattacaatgatgagtaccgcacttgtgtgtgggtgccaaagggtttggtgactaacatcaagggacccaaacttagacaagtttgggttcctaaatcccaagcttga

SEQ ID NO: 14430 - DNA, 4218 bp, Oryza sativa
  Clone ID: TFbOSC401215j.C1.o30.fg
atgtccggcgcctcttcctccacgaactcctcaaccggtggctactccttgatgggttgcattaaagatattccgaccctaaaaggagataactacgcagaatggaaaagaaaactcgaccttgcttttatcttgggagaggtggactgggtattgactaccccatgtcctatagaacctgctgaccttgtcagaggtgaaaatgagtcagatgctgactggcaaaagagacagagggacaatgctcctctcgtcatgtcgtatgacattgaacaaaagaaatggtccttagccaacaagaaatgtttggctgtggtaaagaatacgattgagcctaccatattgggctcgatcccagagtgtgacgctgtctcagagtaccttgaaagaataaagagtcagtttactggctcttcaaagacttatgctacacagctgatcaagcagcttgtgacagaaaggtaccatggaggtggtgttagagaccacatacttagaatgagcaacatggcttccaaattgaagccaatggatttgggcataacagatgactttctggtccatctggttatggcctcattgccaaagcagtttgacaattttattgtcaactacaacataagtccagagaaatggaactttgagaagctcattgctaattgtgtgcaagaggaggagagaatcaaagaatcaaatggtggttcaataaactatgttaaagataagaaaaagaaccacaagtctcccacctcaaaaggtaaacagtctcagcatctgcctcaacaacaacagttcgctgttgagaaagatcaatgtctccactgcaagaagacaggacactacaagaaagattgtcctgactttttgaaaatgatcatggcaaagaaaggtgagaacattattacatttgtaaatgaatctcattatgttggttactctagatccacatggtggattgattctggagcaactattcatgcttgtaattgtttaaaggcattccgttcgacgaggactacgcaaagaagagaaagcaccattagagttgccaatggagttgaagaaaaagttgaagctgttggagatcttcctctagagctcgcgaatggcttcatacttttacttcgagatgtcttttatgttccttctttgcaaaggaacttaataagtgtatcaaagttggattttgatggatatgattgccgctttggaagtggcaaatgtgaactatggcataataatgcatgtattggtcttgctgtgttgcgagacgagctttatttgttatctctttctgagaatgtgaatgttgtgtcctcgttgacaaaagaaaacaagaaaagaaagcgaactcccgatgtctcatcgaaattatggcactgtcgtttgggccatatttcgagggggagaattgagagactagttaagaatgaaattcttcctccattggagttctcagacttagaacaatgcatagaatgcattaaaggaaaatttgtaaagagcatcaaaaagggtgcaaaacgaagcgcgggaattttagagatcattcatacagatatttgtggtccatttcctgtgaaaagtgtggatggctatgactcgttcataacattcacagatgattactcccgctatggttatatttatccaattaaagagcgatcagaagcattggataaatttaagatattcaaagctgaagttgaaaatcagcatgatataaagattaaagtagtaagatctgaccgtgggggggagtactatggtcgacatacgccttatgggcaagtccctggaccttttgcaaggttcttgctagagaatggaatagtagcccagtattcaacaccgggcgaacctcaacagaatggggtagctgaaaggcgcaaccgtacccttatggatatggtgcgcagcatgatgagctactccacactaccactcggtttatggatggaggcgttaaaaaccgccattcatattctcaacagagttccaagcaaatcggtgcccaaaacaccgtatgagctatggacaggaagagtaccctcgctaactcacctccgtgtgtgggggagtcctgcagaggccaaagtatttaacccaaatattgggaagttggaccccaaaacagtcagctgccattttattggctatcctgaaagatcaaaaggctatcgtttctactgtccaaacagttatacaaagtttgtagaaacgagacacgccgtcttcttggaagacgaaatgattagggggagctcggtagttcgagaaattgatcttgaggagaggcgggtgtctgtacccgctccgtcgactcaggaacctttcttctctctacctgctgatgttgtgcctgcaatgcctgtcattgaggtaccagcacctgttgttacccctcctgtggcaacaatgaatgagagtgaggaacctgttatacaggattcaacagaaatggttgccacaccagaggaggagctacaacaacctcaaatagataatgtgccagtacaggagactcatcaagagcctcaggtacaggatgtgccaaatgtgcaggcccctagaaggtctgaaagagtcagaagatcggctatccgtgatgactataaagtttataatatagaagagtcgcatatggaggatgatcccacctcatatgaagaggccatgagaagcgctcgctcatctgaatggttggaagccatgaaagatgaaatggaatcaatgaaactaaacgatgtttgggatttagaagaaattcctaaaggagccaaaacagtaggctgtaaatgggtctacaaaaccaaatatgactccagagggaatatagaaaagtttaaagcgcgacttgtggcaaaaggcttcacgcaacgagaagggattgattacaatgagacattttctccagtctcttgtaaagattccttcaggattataatggcactagtggcacattatgatttggaattacatcagatggatgtaaaaacggcatttctaaatggagatttggaggaaaaagtatacatggcacaaccgaaaggttttgtcatgaaaggaaacgaaaatatgggatgtcgtctaaagagatccatttatggattaaagcaagcttcgagacagtggtacttgaagtttgatgggacaataaataaatttgggtttcaagagaatgtcgaggacaactgtatttattcaaagtttaagaatgggagatttattttcctaattctgtatgtggatgacattctactggctagtagtgatgtcagtctactgcaggaaacaaagaaattcttgtcctcaaactttgacatgaaagacctcggtgaggcttcatatgttttgggcatagagattcaccgagatagaacaaagtatgcattgggactttctcaaaagacatatatagaaaaggtgttgaagaaattcaacatgtacagatgcagtgctacacctgctcctataatgaaaggcgaaaagtatggggcatcgcaatgtcccagaaatcagtatgagctcaatgaaatgaaaacaaagccatatgcgtcagctgtaggaagcctacagtacgcgcaagtgtgcacacgacctgacttggcatttgttaccgggttacttggcagatttcagagtaatccaggcctagagcactggaaattggtaaagaaagtcttgcgttatttgcaaggaacaaaaggcctcatgctgtcttacagaagatcagaatcactccagatagtggggtactcagattctgactttgcaaaagataatacaaagtcaacatcgggatacgtgtttaccctggcaggaggagctatttcatggaaaagctcaaaacagactatcactgcagggtctactatgtatgccgagtttatagcatgctatgaggcaacggggcaggtgaactggctaaagaagttcatacccggtttaaaggtggttgacagtattgagaaaccactaaagttatactgcgacaacgaacccgcagtaatgtacgctcacaacaatcagtcaagtggtgctgccaaacacattgacataaagtactatgttgtgaaggacaaagtccgggatcaaacaatcagtctcgagcacattaaaacagaaaggatgctcgcggatccgctcacgaaaggcctaccacccaacgtgttcaaggaacatgtagccggcatgggtttaagggaagccttatga

SEQ ID NO: 14431 - DNA, 1173 bp, Oryza sativa
  unsure (1)..(1173): unsure at all n locations
  Clone ID: TFbOSC401215j.C1.o34.fg
atggcgacgccgtccacgcggtcgcgtggctactccttgatgggttgcattaaagatattccgaccctaaaaggagataactacgcagaatggaaaagaaaactcgaccttgcttttatcttgggagaggtggactgggtattgactaccccatgtcctatagaacctgctgaccttgtcagaggtgaaaatgagtcagatgctgactggcaaaagagacagagggacaatgctcctctcgtcatgtcgtatgacattgaacaaaagaaatggtccttagccaacaagaaatgtttggctgtggtaaagaatacgattgagcctaccatattgggctcgatcccagagtgtgacgctgtctcagagtaccttgaaagaataaagagtcagtttactggctcttcaaagacttatgctacacagctgatcaagcagcttgtgacagaaaggtacaatggaggtggtgttagagaccacatacttagaatgagcaacatggcttccaagttgaagccaatggatttgggcataacagatgactttctggtccatctggttatggcctcattgccaaagcagtttgacaattttattgtcaactacaacataagtccagagaaatggaactttgagaagctcattgctaattgtgtgcaagaggaggagagaatcaaagaatcaaatggtggttcaataaactatgttaaagataagaaaaagaaccacaagtctcccacctcaaaaggtaaacagtctcagcatctgcctcagcaacaacagttcgctgttgagaaagatcaatgtctccactgcaagaagacaggacactacaagaaagattgtcctgattttttgaaaatgatcatggcaaagaaaggactacgcaaagaagagaaagcaccattagagttgccaatggagttgaagaaaaagttgaagctgnttggagatcttcctntagagctcgcgaatggcttcatacttttacttcgagatgtcttttatgttccttctttgcaaagaaacttaataagtgtatcaaagttggattttgatggatatgattnccgctttggaagtggcaaatgtgaactatggcataataatgcatgtattggncttgctgtgttgcgagacgagctttatttgntatcctctttcttgagaatgtga

SEQ ID NO: 14432 - DNA, 4206 bp, Oryza sativa
  Clone ID: TFbOSC401218j.C1.o17.fg
atggcgacgccgtccacgcggtcgcgtggctactccttgatgggttgcattaaagatattccgaccctaaaaggagataactacgcagaatggaaaagaaaactcgaccttgcttttatcttgggagaggtggactgggtattgactaccccatgtcctatagaacctgctgaccttgtcagaggtgaaaatgagtcagatgctgactggcaaaagagacagagggacaatgctcctctcgtcatgtcgtatgacattgaacaaaagaaatggtccttagccaacaagaaatgtttggctgtggtaaagaatacgattgagcctaccatattgggctcgatcccagagtgtgacgctgtctcagagtaccttgaaagaataaagagtcagtttactggctcttcaaagacttatgctacacagctgatcaagcagcttgtgacagaaaggtacaatggaggtggtgttagagaccacatacttagaatgagcaacatggcttccaaattgaagccaatggatttgggcataacagatgactttctggtccatctggttatggcctcattgccaaagcagtttgacaattttattgtcaactacaacataagtccagagaaatggaactttgagaagctcattgctaattgtgtgcaagaggaggagagaatcaaagaatcaaatggtggttcaataaactatgttaaagataagaaaaagaaccacaagtctcccacctcaaaaggtaaacagtctcagcatctgcctcaacaacaacagttcgctgttgagaaagatcaatgtctccactgcaagaagacaggacactacaagaaagattgtcctgattttttgaaaatgatcatggcaaagaaaggtgagaacattattacatttgtaaatgaatctcattatgttggttactctagatccacatggtggattgattctggagcaactattcatgcttgtaattgtttaaaggcattccgttcgacgaggactacgcaaagaagagaaagcaccattagagttgccaatggagttgaagaaaaagttgaagctgttggagatcttcctctagagctcgcgaatggcttcatacttttacttcgagatgtcttttatgttccttctttgcaaagaaacttaataagtgtatcaaagttggattttgatggatatgattgccgctttggaagtggcaaatgtgaactatggcataataatgcatgtattggtcttgctgtgttgcgagacgagctttatttgttatctctttctgagaatgtgaatgttgtgtcctcgttgacaaaagaaaacaagaaaagaaagcgaactcccgatgtctcatcgaaattatggcactgtcgtttgggccatatttcgagggggagaattgagagactagttaagaatgaaattcttcctccattggagttctcagacttagaacaatgcatagaatgcattaaaggaaaatttgtaaagagcatcaaaaagggtgcaaaacgaagcgcgggaattttagagatcattcatacagatatttgtggtccatttcctgtgaaaagtgtggatggctatgactcgttcataacattcacagatgattactcccgctatggttatatttatccaattaaagagcgatcagaagcattggataaatttaagatattcaaagctgaagttgaaaatcagcatgatataaagattaaagtagtaagatctgaccgtgggggggagtactatggtcgacatacgccttatgggcaagtccctggaccttttgcaaggttcttgctagagaatggaatagtagcccagtattcaacaccgggcgaacctcaacagaatggggtagctgaaaggcgcaaccgtacccttatggatatggtgcgcagcatgatgagctactccacactaccactcggtttatggatggaggcgttaaaaaccgccattcatattctcaacagagttccaagcaaatcggtgcccaaaacaccgtatgagctatggacaggaagagtaccctcgctaactcacctccgtgtgtgggggagtcctgcagaggccaaagtatttaacccaaatattgggaagttggaccccaaaacagtcagctgccattttattggctatcctgaaagatcaaaaggctatcgtttctactgtccaaacagttatacaaagtttgtagaaacgagacacgccgtcttcttggaagacgaaatgattagggggagctcggtagttcgagaaattgatcttgaggagaggcgggtgtctgtacccgctccgtcgactcaggaacctttcttctctctacctgctgatgttgtgcctgcaatgcctgtcattgaggtaccagcacctgttgttacccctcctgtggcaacaatgaatgagagtgaggaacctgttatacaggattcaacagaaatggttgccacaccagaggaggagctacaacagcctcaaatagataatgtgccagtacaggagactcatcaagagcctcaggtacaggatgtgccaaatgtgcaggcccctagaaggtctgaaagagtcagaagatcggctatccgtgatgactataaagtttataatatagaagagtcgcatatggaggatgatcccacctcatatgaagaggccatgagaagcgctcgctcatctgaatggttggaagccatgaaagatgaaatggaatcaatgaaactaaacgatgtttgggatttagaagaaattcctaaaggagccaaaacagtaggctgtaaatgggtctacaaaaccaaatatgactccagagggaatatagaaaagtttaaagcgcgacttgtggcaaaaggcttcacgcaacgagaagggattgattacaatgagacattttctccagtctcttgtaaagattccttcaggattataatggcactagtggcacattatgatttggaattacatcagatggatgtaaaaacggcatttctaaatggagatttggaggaaaaagtatacatggcacaaccgaaaggttttgtcatgaaaggaaacgaaaatatgggatgtcgtctaaagagatccatttatggattaaagcaagcttcgagacagtggtacttgaagtttgatgggacaataaataaatttgggtttcaagagaatgtcgaggacaactgtatttattcaaagtttaagaatgggagatttattttcctaattctgtatgtggatgacattctactggctagtagtgatgtcagtctactgcaggaaacaaagaaattcttgtcctcaaactttgacatgaaagacctcggtgaggcttcatatgttttgggcatagagattcaccgagatagaacaaagtatgcattgggactttctcaaaagacatatatagaaaaggtgttgaagaaattcaacatgtacagatgcagtgctacacctgctcctataatgaaaggcgaaaagtatggggcatcgcaatgtcccagaaatcagtatgagctcaatgaaatgaaaacaaagccatatgcgtcagctgtaggaagcctacagtacgcgcaagtgtgcacacgacctgacttggcatttgttaccgggttacttggcagatttcagagtaatccaggcctagagcactggaaattggtaaagaaagtcttgcgttatttgcaaggaacaaaaggcctcatgctgtcttacagaagatcagaatcactccagatagtggggtactcagattctgactttgcaaaagataatacaaagtcaacatcgggatacgtgtttaccctggcaggaggagctatttcatggaaaagctcaaaacagactatcactgcagggtctactatgtatgccgagtttatagcatgctatgaggcaacggggcaggtgaactggctaaagaagttcatacccggtttaaaggtggttgacagtattgagaaaccactaaagttatactgcgacaacgaacccgcagtaatgtacgctcacaacaatcagtcaagtggtgctgccaaacacattgacataaagtactatgttgtgaaggacaaagtccgggatcaaacaatcagtctcgagcacattaaaacagaaaggatgctcgcggatccgctcacgaaaggcctaccacccaacgtgttcaaggaacatgtagccggcatgggtttaagggaagccttatga

SEQ ID NO: 14433 - DNA, 4206 bp, Oryza sativa
  Clone ID: TFbOSC401218j.C1.o21.fg
atggcgacgccgtccacgcggtcgcgtggctactccttgatgggttgcattaaagatattccgaccctaaaaggagataactacgcagaatggaaaagaaaactcgaccttgcttttatcttgggagaggtggactgggtattgactaccccatgtcctatagaacctgctgaccttgtcagaggtgaaaatgagtcagatgctgactggcaaaagagacagagggacaatgctcctctcgtcatgtcgtatgacattgaacaaaagaaatggtccttagccaacaagaaatgtttggctgtggtaaagaatacgattgagcctaccatattgggctcgatcccagagtgtgacgctgtctcagagtaccttgaaagaataaagagtcagtttactggctcttcaaagacttatgctacacagctgatcaagcagcttgtgacagaaaggtaccatggaggtggtgttagagaccacatacttagaatgagcaacatggcttccaaattgaagccaatggatttgggcataacagatgactttctggtccatctggttatggcctcattgccaaagcagtttgacaattttattgtcaactacaacataagtccagagaaatggaactttgagaagctcattgctaattgtgtgcaagaggaggagagaatcaaagaatcaaatggtggttcaataaactatgttaaagataagaaaaagaaccacaagtctcccacctcaaaaggtaaacagtctcagcatctgcctcaacaacaacagttcgctgttgagaaagatcaatgtctccactgcaagaagacaggacactacaagaaagattgtcctgactttttgaaaatgatcatggcaaagaaaggtgagaacattattacatttgtaaatgaatctcattatgttggttactctagatccacatggtggattgattctggagcaactattcatgcttgtaattgtttaaaggcattccgttcgacgaggactacgcaaagaagagaaagcaccattagagttgccaatggagttgaagaaaaagttgaagctgttggagatcttcctctagagctcgcgaatggcttcatacttttacttcgagatgtcttttatgttccttctttgcaaagaaacttaataagtgtatcaaagttggattttgatggatatgattgccgctttggaagtggcaaatgtgaactatggcataataatgcatgtattggtcttgctgtgttgcgagacgagctttatttgttatctctttctgagaatgtgaatgttgtgtcctcgttgacaaaagaaaacaagaaaagaaagcgaactcccgatgtctcatcgaaattatggcactgtcgtttgggccatatttcgagggggagaattgagagactagttaagaatgaaattcttcctccattggagttctcagacttagaacaatgcatagaatgcattaaaggaaaatttgtaaagagcatcaaaaagggtgcaaaacgaagcgcaggaattttagagatcattcatacagatatttgtggtccatttcctgtgaaaagtgtggatggctatgactcgttcataacattcacagatgattactcccgctatggttatatttatccaattaaagagcgatcagaagcattggataaatttaagatattcaaagctgaagttgaaaatcagcatgatataaagattaaagtagtaagatctgaccgtgggggggagtactatggtcgacatacgccttatgggcaagtccctggaccttttgcaaggttcttgctagagaatggaatagtagcccagtattcaacaccgggcgaacctcaacagaatggggtagctgaaaggcgcaaccgtacccttatggatatggcgcgcagcatgatgagctactccacactaccactcggtttatggatggaggcgttaaaaaccgccattcatattctcaacagagttccaagcaaatcggtgcccaaaacaccgtatgagctatggacagggagagtaccctcgctaactcacctccgtgtgtgggggagtcctgcagaggccaaagtatttaacccaaatattgggaagttggaccccaaaacagtcagttgccattttattggctatcctgaaagatcaaaaggctatcgtttctactgtccaaacagttatacaaagtttgtagaaacgagacacgccgtcttcttggaagacgaaatgattagggggagctcggtagttcgagaaattgatcttgaggagaggcgggtgtctgtacccgctccgtcgactcaggaacctttcttctctctacctgctgatgttgtgcctgcaatgcctgtcattgaggtaccagcacctgttgttacccctcctgtggcaacaatgaatgagagtgaggaacctgttatacaggattcaacagaaatggttgccacaccagaggaggagctacaacaacctcaaatagataatgtgccagtacaggagactcatcaagagcctcaggtacaggatgtgccaaatgtgcaggcccctagaaggtctgaaagagtcagaagatcggctatccgtgatgactataaagtttataatatagaagagtcgcatatggaggatgatcccacctcatatgaagaggccatgagaagcgctcgctcatctgaatggttggaagccatgaaagatgaaatgaaatcaatgaaactaaacgatgtttgggatttagaagaaattcctaaaggagccaaaacagtaggctgtaaatgggtctacaaaaccaaatatgactccagagggaatatagaaaagtttaaagcgcgacttgtggcaaaaggcttcacgcaacgagaagggattgattacaatgagacattttctccagtctcttgtaaagattccttcaggattataatggcactagtggcacattatgatttggaattacatcagatggatgtaaaaacggcatttctaaatggagatttggaggaaaaagtatacatggcgcaaccaaaaggttttgtcatgaaaggaaacgaaaatatgggatgtcgtctaaagagatccatttatggattaaagcaagcttcgagacagtggtacttgaagtttgatgggacaataaagaaatttgggtttcaagagaatgtcgaggacaactgtatttattcaaagtttaagaatgggagatttattttcctaattctgtatgtggatgacattctactggctagtagtgatgtcagtctactgcaggaaacaaagaaattcttgtcctcaaactttgacatgaaagacctcggtgaggcttcatatgttttgggcatagagattcaccgagatagaacaaagtatgcattgggactttctcaaaagacatatatagaaaaggtgttgaagaaattcaacatgtacagatgcagtgctacacctgctcctataatgaaaggcgaaaagtatggggcatcgcaatgtcccagaaatcagtatgagctcaatgaaatgaaaacaaagccatatgcgtcagctgtaggaagcctacagtacgcgcaagtgtgcacacgacctgacttggcatttgttaccgggttacttggcagatttcagagtaatccaggcctagagcactggaaattggtaaagaaagtcttgcgttatttgcaaggaacaaaaggcctcatgctgtcttacagaagatcagaatcactccagatagtggggtactcagattctgactttgcaaaagataatacaaagtcaacatcgggatacgtgtttaccctggcaggaggagctatttcatggaaaagctcaaaacagactatcactgcagggtctactatgtatgccgagtttatagcatgctatgaggcaacggggcaggtgaactggctaaagaagttcatacccggtttaaaggtggttgacagtattgagaaaccactaaagttatactgcgacaacgaacccgcagtaatgtacgctcacaacaatcagtcaagtggtgctgccaaacacattgacataaagtactatgttgtgaaggacaaagtccgggatcaaacaatcagtctcgagcacattaaaacagaaaggatgctcgcggatccgctcacgaaaggcctaccacccaacgtgttcaaggaacatgtagccggcatgggtttaagggaagccttatga

SEQ ID NO: 14434 - DNA, 4218 bp, Oryza sativa
  Clone ID: TFbOSC401275j.C1.o16.fg
atggccggcacttcttcatcctccaacacctcaaccggtggctactccttgatgggttgcattaaagatattccgaccctaaaaggagataactacgcagaatggaaaagaaaactcgaccttgcttttatcttgggagaggtggactgggtattgactaccccatgtcctatagaacctgctgaccttgtcagaggtgaaaatgagtcagatgctgactggcaaaagagacagagggacaatgctcctctcgtcatgtcgtatgacattgaacaaaagaaatggtccttagccaacaagaaatgtttggctgtggtaaagaatacgattgagcctaccatattgggctcgatcccagagtgtgacgctgtctcagagtaccttgaaagaataaagagtcagtttactggctcttcaaagacttatgctacacagctgatcaagcagcttgtgacagaaaggtaccatggaggtggtgttagagaccacatacttagaatgagcaacatggcttccaagttgaagccaatggatttgggcataacagatgactttctggtccatctggttatggcctcattgccaaagcagtttgacaattttattgtcaactacaacataagtccagagaaatggaactttgagaagctcattgctaattgtgtgcaagaggaggagagaatcaaagaatcaaatggtggttcaataaactatgttaaagataagaaaaagaaccacaagtctcccacctcaaaaggtaaacagtctcagcatctgcctcaacaacaacagttcgctgttgagaaagatcaatgtctccactgcaagaagacaggacactacaagaaagattgtcctgactttttgaaaatgatcatggcaaagaaaggtgagaacattattacatttgtaaatgaatctcattatgttggttactctagatccacatggtggattgattctggagcaactattcatgcttgtaattgtttaaaggcattccgttcgacgaggactacgcaaagaagagaaagcaccattagagttgccaatggagttgaagaaaaagttgaagctgttggagatcttcctctagagctcgcgaatggcttcatacttttacttcgagatgtcttttatgttccttctttgcaaagaaacttaataagtgtatcaaagttggattttgatggatatgattgccgctttggaagtggcaaatgtgaactatggcataataatgcatgtattggtcttgctgtgttgcgagacgaactttatttgttatctctttctgagaatgtgaatgttgtgtcctcgttgacaaaagaaaacaagaaaagaaagcgaactcccgatgtctcatcgaaattatggcactgtcgtttgggccatatttcgagggggagaattgagagactagttaagaatgaaattcttcctccattggagttctcagacttagaacaatgcatagaatgcattaaaggaaaatttgtaaagagcatcaaaaagggtgcaaaacgaagcgcaggaattttagagatcattcatacagatatttgtggtccatttcctgtgaaaagtgtggatggctatgactcgttcataacattcacagatgattactcccgctatggttatatttatccaattaaagagcgatcagaagcattggataaatttaagatattcaaagctgaagttgaaaatcagcatgatataaagattaaagtagtaagatctgaccgtgggggggagtactatggtcgacatacgccttatgggcaagtccctggaccttttgcaaggttcttgctagagaatggaatagtagcccagtattcaacaccgggcgaacctcaacagaatggggtagctgaaaggcgcaaccgtaccctcatggatatggtgcgcagcatgatgagctactccacactaccactcggtttatggatggaggcgttaaaaaccgccattcatattctcaacagagttccaagcaaatcggtgcccaaaacaccgtatgagctatggacaggaagagtaccctcgctaactcacctccgtgtgtgggggagtcctgcagaggccaaagtatttaacccaaatattgggaagttggaccccaaaacagtcagctgccattttattggctatcctgaaagatcaaaaggctatcgtttctactgtccaaacagttatacaaagtttgtagaaacgagacacgccgtcttcttggaagacgaaatgattagggggagctcggtagttcgagaaattgatcttgaggagaggcgggtgtctgtacccgctccgtcgactcaggaacctttcttctctctacctgctgatgttgtgcctgcaatgcctgtcattgaggtaccagcacctgttgttacccttcctgtggcaacaatgaatgagagtgaggaacctgttatacaggattcaacagaaatggttgccacaccagaggaggagctacaacagtctcaaatagataatgtgccagtacaggagactcatcaagagcctcaggtacaggatgtgccaaatgtgcaggcccctagaaggtctgaaagagtcagaagatcggctatccgtgatgactataaagtttataatatagaagagtcgcatatggaggatgatcccacctcatatgaagaggccatgagaagcgctcgctcatctgaatggttggaatccatgaaagatgaaatggaatcaatgaaactaaacgatgtttgggatttagaagaaattcctaaaggagccaaaacagtaggctgtaaatgggtctacaaaaccaaatatgactccagagggaatatagaaaagtttaaagcgcgacttgtggcaaaaggcttcacacaacgagaagggattgattacaatgagacattttctccagtctcttgtaaagattccttcaggattataatggcactagtggcacattatgatttggaattacatcagatggatgtaaaaacggcatttctaaatggagatttggaggaaaaagtatacatggcgcaaccgaaaggttttgtcatgaaaggaaacgaaaatatgggatgtcgtctaaagagatccatttatggattaaagcaagcttcgagacagtggtacttgaagtttgatgggacaataaagaaatttgggtttcaagagaatgtcgaggacaactgtatttattcaaagtttaagaatgggagatttattttcctaattctgtatgtggatgacattctactggctagtagtgatgtcagtctactgcaggaaacaaagaaattcttgtcctcaaactttgacatgaaagacctcggtgaggcttcatatgttttgggcatagagattcaccgagatagaacaaagtatgcattgggactttctcaaaagacatatatagaaaaggtgttgaagaaattcaacatgtacagatgcagtgctacacctgctcctataatgaaaggcgaaaagtatggggcatcgcaatgtcccagaaatcagtttgagctcaatgaaatgaaaacaaagccatatgcgtcagctgtaggaagcctacagtacgcgcaagtgtgcacacgacctgacttggcatttgttaccgggttacttggcagatttcagagtaatccaggcctagagcactggaaattggtaaagaaagtcttgcgttatttgcaaggaacaaaaggcctcatgctgtcttacagaagatcagaatcactccagatagtggggtactcagattctgactttgcaaaagataatacaaagtcaacatcgggatatgtgtttaccctggcaggaggagctatttcatggaaaagctcaaaacagactatcactgcagggtctactatgtatgccgagtttatagcatgctatgaggcaacggggcaggtgaactggctaaagaagttcatacccggtttaaaggtggttgacagtattgagaaaccactaaagttatactgcgacaacgaacccgcagtaatgtacgctcacaacaatcagtcaagtggtgctgccaaacacattgacataaagtactatgttgtgaaggacaaagtccgggatcaaacaatcagtctcgagcacattaaaacagaaaggatgctcgcggatccgctcacgaaaggcctaccacccaacgtgttcaaggaacatgtagccggcatgggtttaagggaagccttatga

SEQ ID NO: 14435 - DNA, 4113 bp, Oryza sativa
  Clone ID: TFbOSC401336j.C1.o1.fg
atggctggtgggccccgtcacactgcgccatataaaagaggggtggaggccggcacggcacgaggtggctactccttgatgggttgcattaaagatattccgaccctaaaaggagataactacgcagaatggaaaagaaaactcgaccttgcttttatcttgggagaggtggactgggtgttgactaccccatgtcctatagaacctgctgaacttgtcagaggtgaaaatgagtcagatgctgactggcaaaagagacagagggacaatgctcctctcgtcatgtcgtatgacattgaacaaaagaaatggtccttagccaacaagaaatgtttggctgtggtaaagaatacgattgagcctaccatattgggctcgatcccagagtgtgacgctgtctcagagtaccttgaaagaataaagagtcagtttactggctcttcaaagacttatgctacacagctgatcaagcagcttgtgacagaaaggtaccatggaggtggtgttagagaccacatacttagaatgagcaacatggcttccaagttgaagccaatggatttgggcataacagatgactttctggtccatctggttatggcctcattgccaaagcagtttgacaattttattgtcaactacaacataagtccagagaaatggaactttgagaagctcattgctaattgtgtgcaagaggaggagagaatcaaagaatcaaatggtggttcaataaactatgttaaagataagaaaaagaaccacaagtctcccacctcaaaaggtaaacagtctcagcatctgcctcagcaacaacagttcgctgttgagaaagatcaatgtctccactgcaagaagacaggacactacaagaaagattgtcctgactttctgaaaatgatcatggcaaagaaaggtgagaacattattacatttgtaaatgaatctcattatgttggttactctagatccacatggtggattgattctggagcaactattcatgcttgtaattgtttaaaggcattccgttcgacgaggactacgcaaggaagagaaagctccattagagttgccaatggagttgaagaaaaagttgaagctgttggagatcttccgctagagctcgcgaatggcttcacacttttacttcgagatgtcttttatgttccttctttgcaaagaaacttaataagtgtatcaaagttggattttgatggatatgattgccgctttggaagtggcaaatgtgaactatggcataataatgcatgtattggtcttgctgtgttgcgagacgagctttatttgttatctctttctgagaatgtgaatgttgtgtcctcgttgacaaaagaaaacaagaaaagaaagcgaacttccaatgtctcatcgaaattatggcactgtcgtttgggccatatttcgagggggagaattgagagactagttaagaatgaaattctttccccattggagttctcagacttagaacaatgcatagaatgcattaaaggaaaatttgtaaagagcatcaaaaagggtgcaaaacgaagcgcaggaattttagagatcattcatacagatatttgtggtccatttcctgtgaaaagtatggatggctatgactcgttcataacattcacagatgattactcccgctatggttatatttatccaattaaagagcgatcagaagcactggataaatttaagatattcaaagctgaagttgaaaatcagcatgatataaagattaaagtaaatggggtagctgaaaggcgcaaccgtacccttatggatatggtgcgcagcatgatgagctactccacactaccactcggtttatggatggaggcgttaaaaaccgccattcatattctcaacagagttccaagcaaatcggtgcccaaaacaccgtatgagctatggacaggaagagtaccctcgctaactcacctccgtgtgtgggggagtcctacagaggccaaagtatttaacccaaatattgggaagttggaccccaaaacagtcagctgccattttattggctatcctgaaagatcaaaaggctatcgtttctactgtccaaacagttatacaaagtttgtagaaacgagacacgccgtcttcttggaagacgaaatgattagggggagctcggtagttcgagaaattgatcttgaggagaggcgggtgtctgtacccgctccgtcgactcaggaacctttcttctctctacctgctgatgttgtgcctgcaatgcctgtcattgaggtaccagcacctgttgttacccctcctgtggcaacaatgaatgagagtgaggaacctgttatacaggattcaacagaaatggttgccacaccagaggaggagctacaacagcctcaaatagataatgtgccagtacaggagactcatcaagagcctcaggtacaggatgtggcaaatgtgcaggcccctagaaggtctgaaagagtcagaagatcggctatccgtgatgactataaagtttataatatagaagagtcgcatatggaggatgatcccacctcatatgaagaggccatgagaagcgctcgctcatctgaatggttggaagccatgaaagatgaaatgaaatcaatgaaactaaacgatgtttgggatttagaagaaattcctaaaggagccaaaacagtaggctgtaaatgggtctacaaaaccaaatatgactccagagggaatatagaaaagtttaaagcgcgacttgtggcaaaaggcttcacgcaacgagaagggattgattacaatgagacattttctccagtctcttgtaaagattccttcaggattataatggcactagtggcacattatgatttggaattacatcagatggatgtaaaaacggcatttctaaatggagatttggaggaaaaagtatacatggcgcaaccgaaaggttttttcatgaaaggaaacgaaaatatgggatgtcgtctaaagagatccatttatggattaaagcaagcttcgagacagtggtacttgaagtttgatgggacaataaaaaaatttgggtttcaagagaatgtcgaggacaactgtatttattcaaagtttaagaatgggagatttattttcctaattctgtatgtggatgacattctactggctagtagtgatgtcagtctactgcaggaaacaaagaaattcttgtccacaaactttgacatgaaagacctcggtgaggcttcatatgttttgggcatagagattcaccgagatagaacaaagtatgcattgggactttctcaaaagacatatatagaaaaggtgttgaagaaattcaacatgtacagatgcagtgctacacctgctcctataatgaaaggcgaaaagtatggggcatcgcaatgtcccataaatcagtatgagctcaatgaaatgaaaacaaagccatatgtgtcagctgtaggaagcctacagtacgcgcaagtgtgcacacgacctgacttggcatttgttaccgggttacttggcagatttcagagtaatccaggcctagagcactggaaattggtaaagaaagtcttgcgttatttgcaaggaacaaaaggcctcatgctgacttacagaagatcagaatcactccagatagtggggtactcagattctgactttgcaaaagataatacaaagtcaacatcgggatacgtgtttaccctggcaggaggagctatttcatggaaaagctcaaaacagactatcactgcagggtctactatgtatgccgagtttatagcatgctatgaggcaacggggcaggtgaactggctaaagaagttcatacccggtttaaaggtggttgacagtattgagaaaccactaaagttatactgcgacaacgaacccgcagtaatgtacgctcacaacaatcagtcaagtggtgctgccaaacacattgacataaagtactatgttgtgaaggacaaagtccgggatcaaacaatcagtctcgagcacattaaaacagaaaggatgctcgcggatccgctcacgaaaggcctaccacccaacgtgttcaaggaacatgtagccggcatgggtttaagggaagccttatga

SEQ ID NO: 14436 - DNA, 3384 bp, Oryza sativa
  Clone ID: TFbOSC401727j.C1.o3.fg
atgtcgtatgacattgaacaaaagaaatggtccttagccaacaagaaatgtttggctatggtaaagaacacgattgagcctaccatattgggctcaatcccagagtgtgacgctgtctcagagtaccttgaaagaataaagaggcagtttactggctcttcaaagacttatgctacacagctgatcaagcagcttgtgaccgaaaggtaccatggaggtggtgttagagaccacatacttagaatgagcaacatggcttccaagttgaagccaatggatttgggcataacagatgactttctggtccatctggttatggcctcattgccaaagcagtttgacaattttattgtcaactacaacataagtccagagaaatggaactttgaaaaactcattgctaattgtgtgcaagaggaggagagaattaaagagtcaaatggtggttcaattaactatgttaaagataacaagaaaaagaaccacaagtctcccacctcaaaagctaaacagtctcagcatctgcctcagcaacaacagttcgctgttgagaaagatcagtgtctccattgcaagaagacgggacattacaagaaagactgtcctgacttcttgaaaatgatcatggcaaggaaaggtgagaacattgttacatttgtaaatgaatctcattatgttggttactctagatccacatggtggattgattctggagcaattattcatgcttgtaattgtttaaaggcattccgttcgacgaggactacgcaaagaagagaaagctccattagagttgccaatggagttgaaaaaaaagttgaagctgttggagatcttcctctagagctcgcgaatggcttcacacttttacttcgagatgtcttttatgttccttctttgcaaagaaacttaataagtttatcaaagttggattttgatggatatgattgccgctttggaagtggcaaatgtgaactatgtgtggatggctatgactcgttcataacattcacagatgattactcccgctatggttatatttatccaattaaagagcgatcagaagcattggataaatttaagatattcaaagctgaagttgaaaatcagcatgatataaagattaaagtaaatggggtagctgaaaggcgtaaccgtacccttatggatatggtgcgcagcatgatgagctactccacactaccactgggtttatggatggaggcgttaaaaaccgctattcatattctcaacagagttccaagcaaatcggtgcccaaaacaccgtatgagctatggacaggaagcgtaccctcgatagctcacctccgtgtgtgggggagtcctgcagaggctaaagtatttaatccaaatattgggaagttggatcccaaaacagtcagttgccattttattggctatcctgaaagatcaaaaggctatcgtttctactgtccaaacagttatacaaagtttgtagaaacgagacacgccgtcttcttggaagacgaaatgattagggagagctcggtagttcgagaaattgatcttgaggagaggcgggtgtctgtacccgctccgtcgactcaggaacctttcttctctctacctgctgatgttgtgcctgcaatacctgtcattgaggaggagctgcaacagcctcaaatagataatgtgctagtacaggagactcaacaagagcctcaggtacaggatgtgccaaatgtgcaggcccctagaaggtctgaaagagtcaaaagatcggttatccgtgatgactataaagtttataatatagaagagtcgcatatggaggatgatcacacctcatatgaagaggccatgagaagcgctcgctcatctgaatggttggaagtcatgaaagatgaaatgaaattaatgaaactaaacaatgtttgggatttagaagaaattcctaaaggagacaaaacagtaggctgtaagtgggtctacaaaaccaaatatgactccagagggaatatagaaaagtttaaagcgcgacttgtggcaaaaggcttcacgcaacgagaagggattgattacaatgagacattttctccagtctcttgtaaagattccttcaggattataatggcactagtggcacattatgatttggaattacatcagatggatgtaaaaacgacatttctaaatggagatttggaggaaaaagtatacatggcgcaaccgaaaggttttgtcatgaaaggaaacggaaatatgggatgtcgtctaaagagatccatttatgaattaaagcaagcttcgagacagtggtacttgaagtttgatgggacaataaagaaatttgggtttcaagagaatgtcgaggacaactgtatttattcaaagtttaagaatgggagatttattttcctaattctgtatgtggatgacattctactggctagtagtgatgtcagtctactgcaggaaacaaagaaatttttgtcctcaaactttgacatgaaagacctcggtgaggcttcatatgttttgggcatagagattcaccgagatagaacaaagtatgcattgggactttctcaaaagacatatatagaaaaggtgttgaagaaattcaatatgtacagatgcagtgctacacctgctcctatagtcaaaggggaaaagtatggggcatcgcaatgtcccagaaatcagtatgagctcaatgaaatgaaaacaaagccatatgcgtcagctataggaagcctagagtacgcgcaagtgtgcacacgacctaacttggcatttgttattgggttacttggcagatttcagagtaatctaggcccagagcactggaaattggtaaagaaagtcttgcattattttcaaggaacaaaaggcctcatgctgtcttatagaagatcagaatcgcttcagattatggggtattcagattctgattttacaaaagataatacaaagtcaacatcgggatatgtgttcaccctggcaggaggagctatttcatggaaaagctcaaaacagactatcactgcagggtctactatgtatgccgagtttatagcatgctatgaggcaacggggcaggtgaactggctaaagaagttcatactcagtttaaaggtggttgacagtattgagaaaccactaaagttatactgcgacaacgaacccgcagtaatgtacgctcacagcaatcagtcaagtggtgctgccaaacacattgacataaagtactatgttgtgaaggacaaagtccgggatcaaacaatcagtctcgagcacattagaacagaaaggatgctcgcggatccactcacgaaaggcctaccacccaacgtgttcaaggaacatgtagccggcatgggtttaagggaagccttatga

SEQ ID NO: 14437 - DNA, 4224 bp, Oryza sativa
  Clone ID: TFbOSC401892j.C1.o4.fg
atggcgcggcggcgcgagggccgccggcgtcggcgacgccgctcggcgcggccgcgcgcccgcgagaagagaagagaagctagggttttcggcggccggccgggagaggggggttttgatcctccgatctcggcgcccggccgtccgatcgaaaccctagctgatcggacggccggcgccggtggctactccttgatgggttgcattaaagatattccgaccctaaaaggagataactacgcagaatggaaaagaaaactcgaccttgcttttatcttgggagaggtggactgggtgttgactaccccatgtcctatagaacctgctgaacttgtcagaggtgaaaatgagtcagatgctgactggcaaaagagacagagggacaatgctcctctcgtcatgtcgtatgacattgaacaaaagaaatggtccttagccaacaagaaatgtttggctgtggtaaagaatacgattgagcctaccatattgggctcgatcccagagtgtgacactgtctcagagtaccttgaaagaataaagagtcagtttactggctcttcaaagacttatgctacacagctgatcaagcagcttgtgacagaaaggtaccatggaggtggtgttagagaccacatacttagaatgagcaacatggcttccaagttgaagccaatggatttgggcataacagatgactttctagtccatttggttatggcctcattgccaaagcagtttgataattttattgtcaactacaatataagtccagagaaatggaactttgagaagctcattgctaattgtgtgcaagaggaggagagaatcaaagaatcaaatggtggttcaataaactatgttaaagataagaaaaagaaccacaagtctcccacctcaaaaggtaaacagtctcagcatctgcctcagcaacaacagttcgctgttgagaaagatcaatgtctccactgcaagaagacaggacactacaagaaagattgtcctgactttttgaaaatgatcatggcaaagaaaggtgagaacattattacatttgtaaatgaatctcattatgttggttactctagatccacatggtggattgattctggagcaactattcatgcttgtaattgtttaaaggcattccgttcgacgaggactacgcaaagaagagaaagcaccattagagttgccaatggagttgaagaaaaagttgaagctgttggagatcttcctctagagcttgcgaatggcttcatacttttacttcgagatgtcttttatgttccttctttgcaaagaaacttaataagtgtatcaaagttggattttgatggatatgattgccgctttggaagtggcaaatgtgaactatggcataataatgcatgtattggtcttgctgtgttggggagaattgagagactagttaagaatgaaattcttcccccattggagttctcagacttagaacaatgcatagaatgcattaaaggaaaatttgtaaagagcatcaaaaagggtgcaaaacgaagcgcaggaattttagagatcattcatacagatatttgtggtccatttcctgtgaaaagtgtggatggctatgactcattcataacattcacagatgattactcccgctatggttatatttatccaattaaagagcgatcagaagcactggataaatttaagatattcaaagctgaagttgaaaatcagcatgatataaagattaaagtagtaagatctgaccgtgggggggagtactatggtcgacatacgccttatgggcaagtccctggaccttttgcaaggttcttgctagagaatggaatagtagcccagtattcaacaccgggcgaacctcaacagaatggggtagctgaaaggcgcaaccgtacccttatggatatggtgcgcagcatgatgagctactccacactaccactcggtttatggatggaggcgttaaaaaccgccattcatattctcaacagagttccaagcaaatcggtgcccaaaacaccgtatgagctatggacaggaagagtaccctcgctaactcacctccgtgtgtgggggagtcctacagaggccaaagtatttaacccaaatattgggaagttggaccccaaaacagtcagctgccattttattggctatcctgaaagatcaaaaggctatcgtttctactgtccaaacagttatacaaagtttgtagaaacgagacacgccgtcttcttggaagacgaaatgattagggggagctcggtagttcgagaaattgatcttgaggagaggcgggtgtctgtacccgctccgtcgactcaggaacctttcttctctctacctgctgatgttgtgcctgcaatgcctgtcattgaggtaccagcacctgttgttacccctcctgtggcaacaatgaatgagagtgaggaacctgttatacaggattcaacagaaatggttgccacaccagaggaggagctacaacagcctcaaatagataatgtgccagtacaggagactcatcaagagcctcaggtacaggatgtgccaaatgtgcaggcccctagaaggtctgaaagagtaagaagatcggctatccgtgatgactataaagtttataatatagaagagtcgcatatggaggatgatcccacctcatatgaagaggccatgagaagcgctcgctcatctgaatggttggaagccatgaaagatgaaatgaaatcaatgaaactaaacgatgtttgggatttagaagaaattcctaaaggagccaaaacagtaggctgtaaatgggtctacaaaaccaaatatgactccagagggaatatagaaaagtttaaagcacgacttgtggcaaaaggcttcacgcaacgagaagggattgattacaatgagacattttctccagtctcttgtaaagattccttcaggattataatggcactagtggcacattatgatttggaattacatcagatggatgtaaaaacggcatttctaaatggagatttggaggaaaaagtatacatggcgcaaccgaaaggttttgtcatgaaaggaaacgaaaatatgggatgtcgtctaaagagatccatttatggattaaagcaagcttcgagacagtggtacttgaagtttgatgggacaataaagaaatttgggtttcaagagaatgtcgaggacaactgtatttattcaaagtttaagaatgggagatttattttcctaattctgtatgtggatgacattctactggctagtagtgatgtcagtctactgcaggaaacaaagaaattcttgtcctcaaactttgacatgaaagacctcggtgaggcttcatatgttttgggcatagagattcaccgagatagaacaaagtatgcattgggactttctcaaaagacatatatagaaaaggtgttgaagaaattcaacatgtacagatgcagtgctacacctgctcctataatgaaaggcgaaaagtatggggcatcgcaatgtcccagaaatcagtatgagctcaatgaaatgaaaacaaagctatatgcgtcagctgtaggaagcctacagtacgcgcaagtgtgcacacgacctgacttggcatttgttaccgggttacttggcagatttcagagtaatccaggcctagagcactggaaattggtaaagaaagtcttgcgttatttgcaaggaacaaaaggcctcatgctgtcttacagaagatcagaatcactccagatagtggggtactcagattctgactttgcaaaagataatacaaagtcaacatcgggatacgtgtttaccctggcaggaggagctatttcatggaaaagctcaaaacagactatcactgcagggtctactatgtatgccgagtttatagcatgctatgaggcaacggggcaggtgaactggctaaagaagttcatacccggtttaaaggtggttgacagttttgagaaaccactaaagttatactgcgacaacgaacccgcagtaatgtacgctcacaacaatcagtcaagtggtgctgccaaacacattgacataaagtactatgttatgaaggacaaagtccgggatcaaacaatcagtctcgagcacattaaaacagaaaggatgctcgcggatccgctcacgaaaggcctaccacccaacgtgttcaaggaacatgtagccggcatgggtttaagggaagccttatga

SEQ ID NO: 14438 - DNA, 621 bp, Oryza sativa
  Clone ID: TFbOSC401976j.C1.o3.fg
atgtcgtatgacattgaacaaaagaaatggtccttagctaacaagaaatgtttggctgtggtaaagaacacgattgagcctaccatattgggctcaatcccagagtgtgacgctgtctcagagtaccttgaaagaatcaagagtcagtttactggctcttcaaaaacttatgctacacagctgatcaagcagcttgtgacagagaggtactatggaggaggtgttagagaccacatacttaggatgagcaacatggctttcaagttgaagccaatggatttgggcataacagatgactttctggtccatttggttatggcctcattgccaaagcagtttgacaattttattgtcaactacaacataaataataagaaaaagaaccacaagtctcccacctcaaaagctaaacagtctcagcatctacctcagcaacaacagttcgctgttgagaaagatcagtgtctccactgcaagaagacaggacattacaagaaagattgtccagacttcttgaaaatgatcatggcaaggaaaggactacgcaaagaagagaaagctccattagagttgccaatggagttgaagaaaaagttgaagctgttggagatcttcctctag

SEQ ID NO: 14439 - DNA, 3339 bp, Oryza sativa
  Clone ID: TFbOSC405551j.C1.o1.fg
atgtcatggcatagggccggtgtcctgctgctaggggctcagtcctgcctgcctgtcccgggggttccggccgtaggtgggattgggtcggtactcttgtctatggctaggatgggttggaaactatgtcacatctttcgtctgtataccgtggtggaggagagaatcaaagaatcaaatggtggttcaataaactatgttaaagataagaaaaagaaccacaagtctcccacctcaaaaggtaaacagtctcagcatctgcctcagcaacaacagttcgctgttgagaaagatcaatgtctccactgcaagaagacaggacactacaagaaagattgtcctgactttttgaaaatgatcatggcaaagaaaggtgagaacattattacatttgtaaatgaatctcattatgttggttactctagatccacatggtggattgattctggagcaactattcatgcttgtaattgtttaaaggcattccgttcgacgaggactacgcaaagaagagaaagcaccattagagttgccaatggagttgaagaaaaagttgaagctgttggagatcttcctctagagctcgcgaatggcttcatacttttacttcgagatgtcttttatgttccttctttgcaaagaaacttaataagtgtatcaaagttggattttgatggatatgattgccgctttggaagtggcaaatgtgaactatggcataataatgcatgtattggtcttgctgtgttgcgagacgagctttatttgttatctctttctgagaatgtgaatgttgtgttctcattgacaaaagaaaacaagaaaagaaagcgaactcccgatgtctcatcgaaattatggcactgtcgtttgggccatatttcgagggggagaattgagagactagttaagaatgaaattcttcctccattggagttctcagacttagaacaatgcatagaatgcattaaaggaaaatttgtaaagagcatcaaaaagggtgcaaaacgaagcgcaggaattttagagatcattcatacagatatttgtggtccatttcctgtgaaaagtgtggatggctatgactcgttcataacattcacagatgattactcccgctatggttatatttatccaattaaagagcgattagaagcactggataaatttaagatattcaaagctgaagttgaaaatcagcatgatataaagattaaagtagtaagatctgaccgtgggggggagtactatggtcgacatacgccttatgggcaagtccctggaccttttgcaaggttcttgctagagaatggaatagtagcccagtattcaacaccgggcgaacctcaacagaatggggtagctgaaaggcgcaaccgtacccttatggatatggtgcgcagcatgatgagctactccacactaccactcggtttatggatggaggcgttaaaaaccgccattcacattctcaacagagttccaagcaaatcggtgcccaaaacaccgtatgagctatggacaggaagagtaccctcgctaactcacctccgtgtgtgggggagtcctacagaggccaaagtatttaactcaaatattgggaagttggaccccaaaacagtcagctgccattttattagctatcctgaaagatcaaaaggctatcgtttctactatccaaacagttatacaaagtttgtagaaacgagacacgccgtcttcttggaagacgaaatgattagggggagctcggtagttcgagaaattgatcttgaggagaggcgggtgtctgtacccgctccgtcgactcaggaacctttcttctctctacctgctgatgttgtgcctgcaatgcctgtcattgaggtaccagcacctgttgttacccctcctgtcgcaacattgaatgagagtgaggaacctgttatacaggattcaacagaaatggttgccacaccagaggaggagctacaacagcctcaaataaataatgtgccagtacaggagactcatcaagagcctcaggtacaggatgtgccaaatgtgcaggcccctagaaggtctgaaagagtcagaagatcggctatccgtgatgactataaagtttataatatagaagagtcgcatatggaggatgatcccacttcatatgaagaggccatgagaagcgctcgctcatctgaatggttggaatccatgaaagatgaaatgaaatcaatgaaactaaacgatgtttgggatttagaagaaattcctaaaggagccaaaacagtaggctgtaaatgggtctacaaaaccaaatatgactccagagggaatatagaaaagtttaaagcgcgacttgtggcaaaaggcttcacgcaacgagaagggattgattacaatgagacattttctccagtctcttgtaaagattccttcaggattataatggcactagtggcacattatgatttggaattacatcagatggatgtaaaaacggcatttctaaatggagatttggaggaaaaagtatacatggcgcaaccgaaaggttttgtcatgaaaggaaacgaaaatatgggatgtcgtctaaagagatccatttatggattaaagcaagcttcgagacagtggtacttgaagtttgatgggacaataaagaaatttgggtttcaagagaatgtcgaggacaactgtatttattcaaagtttaagaatgggagatttattttcctaattctatatgtggatgacattctactggctagtagtgatgtcagtctactgcaggaaacaaagaaattcttatcctcaaactttgacatgaaagacctcggtgaggcttcatatgttttgggcatagagattcaccgagatagaacaaagtatgcattgggactttctcaaaagacatatatagaaaaggtgttgaagaaattcaacatgtacagatgcagtactacacctgctcctataatgaaaggcgaaaagtatggggcatcgcaatgtcccagaaatcagtatgagctcaatgaaatgaaaacaaagccatatgcgtcagctgtaggaagcctacagtatgcgcaagtgtgcacacgacctgacttggcatttgttaccgggttacttggcagatttcagagtaatccaggcctagagcactggaaattaataaagaaagtcttgcattatttgcaaggaacaaaaggcctcatgctgtcttacagaagatcagaatcactccagatagtggggtactcagattctgactttgcaaaagataatacaaagtcaacatcgggatacgtgtttaccctggcaggaggagctatttcatggaaaagctcaaaatag

SEQ ID NO: 14440 - DNA, 4206 bp, Oryza sativa
  Clone ID: TFbOSC406486j.C1.o2.fg
atggcgacgccgtccacgcggtcgcgtggctactccttgatgggttgcattaaagatattccgaccctaaaaggagataactacgcagaatggaaaagaaaactcgaccttgcttttatcttgggagaggtggactgggtattgactaccccatgtcctatagaacctgctgaccttgtcagaggtgaaaatgagtcagatgctgactggcaaaagagacagagggacaatgctcctctcgtcatgtcgtatgacattgaacaaaagaaatggtccttagccaacaagaaatgtttggctgtggtaaagaatacgattgagcctaccatattgggctcgatcccagagtgtgacgctgtctcagagtaccttgaaagaataaagagtcagtttactggctcttcaaagacttatgctacacagctgatcaagcagcttgtgacagaaaggtaccatggaggtggtgttagagaccacatacttagaatgagcaacatggcttccaaattgaagccaatggatttgggcataacagatgactttctggtccatctggttatggcctcattgccaaagcagtttgacaattttattgtcaactacaacataagtccagagaaatggaactttgagaagctcattgctaattgtgtgcaagaggaggagagaatcaaagaatcaaatggtggttcaataaactatgttaaagataagaaaaagaaccacaagtctcccacctcaaaaggtaaacagtctcagcatctgcctcaacaacaacagttcgctgttgagaaagatcaatgtctccactgcaagaagacaggacactacaagaaagattgtcctgactttttgaaaatgatcatggcaaagaaaggtgagaacattattacatttgtaaatgaatctcattatgttggttactctagatccacatggtggattgattctggagcaactattcatgcttgtaattgtttaaaggcattccgttcgacgaggactacgcaaagaagagaaagcaccattagagttgccaatggagttgaagaaaaagttgaagctgttggagatcttcctctagagctcgcgaatggcttcatacttttacttcgagatgtcttttatgttccttctttgcaaagaaacttaataagtgtatcaaagttggattttgatggatatgattgccgctttggaagtggcaaatgtgaactatggcataataatgcatgtattggtcttgctgtgttgcgagacgagctttatttgttatctctttctgagaatgtgaatgttgtgtcctcgttgacaaaagaaaacaagaaaagaaagcgaactcccgatgtctcatcgaaattatggcactgtcgtttgggccatatttcgagggggagaattgagagactagttaagaatgaaattcttcctccattggagttctcagacttagaacaatgcatagaatgcattaaaggaaaatttgtaaagagcatcaaaaagggtgcaaaacgaagcgcgggaattttagagatcattcatacagatatttgtggtccatttcctgtgaaaagtgtggatggctatgactcgttcataacattcacagatgattactcccgctatggttatatttatccaattaaagagcgatcagaagcattggataaatttaagatattcaaagctgaagttgaaaatcagcatgatataaagattaaagtagtaagatctgaccgtgggggggagtactatggtcgacatacgccttatgggcaagtccctggaccttttgcaaggttcttgctagagaatggaatagtagcccagtattcaacaccgggcgaacctcaacagaatggggtagctgaaaggcgcaaccgtacccttatggatatggtgcgcagcatgatgagctactccacactaccactcggtttatggatggaggcgttaaaaaccgccattcatattctcaacagagttccaagcaaatcggtgcccaaaacaccgtatgagctatggacaggaagagtaccctcgctaactcacctccgtgtgtgggggagtcctgcagaggccaaagtatttaacccaaatattgggaagttggaccccaaaacagtcagttgccattttattggctatcctgaaagatcaaaaggctatcgtttctactgtccaaacagttatacaaagtttgtagaaacgagacacgccgtcttcttggaagacgaaatgattagggggagctcggtagttcgagaaattgatcttgaggagaggcgggtgtctgtacccgctccgtcgactcaggaacctttcttctctctacctgctgatgttgtgcctgcaatgcctgtcattgaggtaccagcacctgttgttacccctcctgtggcaacaatgaatgagagtgaggaacctgttatacaggattcaacagaaatggttgccacaccagaggaggagctacaacaacctcaaatagataatgtgccagtacaggagactcatcaagagcctcaggtacaggatgtgccaaatgtgcaggcccctagaaggtctgaaagagtcagaagatcggctatccgtgatgactataaagtttataatatagaagagtcgcatatggaggatgatcccacctcatatgaagaggccatgagaagcgctcgctcatctgaatggttggaagccatgaaagatgaaatggaatcaatgaaactaaacgatgtttgggatttagaagaaattcctaaaggagccaaaacagtaggctgtaaatgggtctacaaaaccaaatatgactccagagggaatatagaaaagtttaaagcgcgacttgtggcaaaaggcttcacgcaacgagaagggattgattacaatgagacattttctccagtctcttgtaaagattccttcaggattataatggcactagtggcacattatgatttggaattacatcagatggatgtaaaaacggcatttctaaatggagatttggaggaaaaagtatacatggcacaaccgaaaggttttgtcatgaaaggaaacgaaaatatgggatgtcgtctaaagagatccatttatggattaaagcaagcttcgagacagtggtacttgaagtttgatgggacaataaataaatttgggtttcaagagaatgtcgaggacaactgtatttattcaaagtttaagaatgggagatttattttcctaattctgtatgtggatgacattctactggctagtagtgatgtcagtctactgcaggaaacaaagaaattcttgtcctcaaactttgacatgaaagacctcggtgaggcttcatatgttttgggcatagagattcaccgagatagaacaaagtatgcattgggactttctcaaaagacatatatagaaaaggtgttgaagaaattcaacatgtacagatgcagtgctacacctgctcctataatgaaaggcgaaaagtatggggcatcgcaatgtcccagaaatcagtatgagctcaatgaaatgaaaacaaagccatatgcgtcagctgtaggaagcctacagtacgcgcaagtgtgcacacgacctgacttggcatttgttaccgggttacttggcagatttcagagtaatccaggcctagagcactggaaattggtaaagaaagtcttgcgttatttgcaaggaacaaaaggcctcatgctgtcttacagaagatcagaatcactccagatagtggggtactcagattctgactttgcaaaagataatacaaagtcaacatcgggatacgtgtttaccctggcaggaggagctatttcatggaaaagctcaaaacagactatcactgcagggtctactatgtatgccgagtttatagcatgctatgaggcaacggggcaggtgaactggctaaagaagttcatacccggtttaaaggtggttgacagtattgagaaaccactaaagttatactgcgacaacgaacccgcagtaatgtacgctcacaacaatcagtcaagtggtgctgccaaacacattgacataaagtactatgttgtgaaggacaaagtccgggatcaaacaatcagtctcgagcacattaaaacagaaaggatgctcgcggatccgctcacgaaaggcctaccacccaacgtgttcaaggaacatgtagccggcatgggtttaagggaagccttatga

SEQ ID NO: 14441 - DNA, 4218 bp, Oryza sativa
  Clone ID: TFbOSC406486j.C1.o6.fg
atggccggcacttcttcatcctccaacacctcaaccggtggctactccttgatgggttgcattaaagatattccgaccctaaaaggagataactacgcagaatggaaaagaaaactcgaccttgcttttatcttgggagaggtggactgggtattgactaccccatgtcctatagaacctgctgaccttgtcagaggtgaaaatgagtcagatgctgactggcaaaagagacagagggacaatgctcctctcgtcatgtcgtatgacattgaacaaaagaaatggtccttagccaacaagaaatgtttggctgtggtaaagaatacgattgagcctaccatattgggctcgatcccagagtgtgacgctgtctcagagtaccttgaaagaataaagagtcagtttactggctcttcaaagacttatgctacacagctgatcaagcagcttgtgacagaaaggtacaatggaggtggtgttagagaccacatacttagaatgagcaacatggcttccaagttgaagccaatggatttgggcataacagatgactttctggtccatctggttatggcctcattgccaaagcagtttgacaattttattgtcaactacaacataagtccagagaaatggaactttgagaagctcattgctaattgtgtgcaagaggaggagagaatcaaagaatcaaatggtggttcaataaactatgttaaagataagaaaaagaaccacaagtctcccacctcaaaaggtaaacagtctcagcatctgcctcagcaacaacagttcgctgttgagaaagatcaatgtctccactgcaagaagacaggacactacaagaaagattgtcctgattttttgaaaatgatcatggcaaagaaaggtgagaacattattacatttgtaaatgaatctcattatgttggttactctagatccacatggtggattgattctggagcaactattcatgcttgtaattgtttaaaggcattccgttcgacgaggactacgcaaagaagagaaagcaccattagagttgccaatggagttgaagaaaaagttgaagctgttggagatcttcctctagagctcgcgaatggcttcatacttttacttcgagatgtcttttatgttccttctttgcaaagaaacttaataagtgtatcaaagttggattttgatggatatgattgccgctttggaagtggcaaatgtgaactatggcataataatgcatgtattggtcttgctgtgttgcgagacgagctttatttgttatctctttctgagaatgtgaatgttgtgtcctcgttgacaaaagaaaacaagaaaagaaagcgaactcccgatgtctcatcgaaattatggcactgtcgtttgggccatatttcgagggggagaattgagagactagttaagaatgaaattcttcctccattggagttctcagacttagaacaatgcatagaatgcattaaaggaaaatttgtaaagagcatcaaaaagggtgcaaaacgaagcgcaggaattttagagatcattcatacagatatttgtggtccatttcctgtgaaaagtgtggatggctatgactcgttcataacattcacagatgattactcccgctatggttatatttatccaattaaagagcgatcagaagcattggataaatttaagatattcaaagctgaagttgaaaatcagcatgatataaagattaaagtagtaagatctgaccgtgggggggagtactatggtcgacatacgccttatgggcaagtccctggaccttttgcaaggttcttgctagagaatggaatagtagcccagtattcaacaccgggcgaacctcaacagaatggggtagctgaaaggcgcaaccgtacccttatggatatggcgcgcagcatgatgagctactccacactaccactcggtttatggatggaggcgttaaaaaccgccattcatattctcaacagagttccaagcaaatcggtgcccaaaacaccgtatgagctatggacagggagagtaccctcgctaactcacctccgtgtgtgggggagtcctgcagaggccaaagtatttaacccaaatattgggaagttggaccccaaaacagtcagttgccattttattggctatcctgaaagatcaaaaggctatcgtttctactgtccaaacagttatacaaagtttgtagaaacgagacacgccgtcttcttggaagacgaaatgattagggggagctcggtagttcgagaaattgatcttgaggagaggcgggtgtctgtacccgctccgtcgactcaggaacctttcttctctctacctgctgatgttgtgcctgcaatgcctgtcattgaggtaccagcacctgttgttacccctcctgtggcaacaatgaatgagagtgaggaacctgttatacaggattcaacagaaatggttgccacgccagaggaggagctacaacagcctcaaatagataatgtgccagtacaggagactcatcaagagcctcaggtacaggatgtgccaaatgtgcaggcccctagaaggtctgaaagagtcagaagatcggctatccgtgatgactataaagtttataatatagaagagtcgcatatggaggatgatcccacctcatatgaagaggccatgagaagcgctcgctcatctgaatggttggaagccatgaaagatgaaatgaaatcaatgaaactaaacgatgtttgggatttagaagaaattcctaaaggagccaaaacagtaggctgtaaatgggtctacaaaaccaaatatgactccagagggaatatagaaaagtttaaagcgcgacttgtggcaaaaggcttcacgcaacgagaagggattgattacaatgagacattttctccagtctcttgtaaagattccttcaggattataatggcactagtggcacattatgatttggaattacatcagatggatgtaaaaacggcatttctaaatggagatttggaggaaaaagtatacatggcgcaaccaaaaggttttgtcatgaaaggaaacgaaaatatgggatgtcgtctaaagagatccatttatggattaaagcaagcttcgagacagtggtacttgaagtttgatgggacaataaagaaatttgggtttcaagagaatgtcgaggacaactgtatttattcaaagtttaagaatgggagatttattttcctaattctgtatgtggatgacattctactggctagtagtgatgtcagtctactgcaggaaacaaagaaattcttgtcctcaaactttgacatgaaagacctcggtgaggcttcatatgttttgggcatagagattcaccgagatagaacaaagtatgcattgggactttctcaaaagacatatatagaaaaggtgttgaagaaattcaacatgtacagatgcagtgctacacctgctcctataatgaaaggcgaaaagtatggggcatcgcaatgtcccagaaatcagtatgagctcaatgaaatgaaaacaaagccatatgcgtcagctgtaggaagcctacagtacgcgcaagtgtgcacacgacctgacttggcatttgttaccgggttacttggcagatttcagagtaatccaggcctagagcactggaaattggtaaagaaagtcttgcgttatttgcaaggaacaaaaggcctcatgctgtcttacagaagatcagaatcactccagatagtggggtactcagattctgactttgcaaaagataatacaaagtcaacatcgggatacgtgtttaccctggcaggaggagctatttcatggaaaagctcaaaacagactatcactgcagggtctactatgtatgccgagtttatagcatgctatgaggcaacggggcaggtgaactggctaaagaagttcatacccggtttaaaggtggttgacagtattgagaaaccactaaagttatactgcgacaacgaacccgcagtaatgtacactcacaacaatcagtcaagtggtgctgccaaacacattgacataaagtactatgttgtgaaggacaaagtccgggatcaaacaatcagtctcgagcacattaaaacagaaaggatgctcgcggatccgctcacgaaaggcctaccacccaacgtgttcaaggaacatgtagccggcatgggtttaagggaagccttatga

SEQ ID NO: 14442 - DNA, 4206 bp, Oryza sativa
  Clone ID: TFbOSC406626j.C1.o7.fg
atggcgacgccgtccacgcggtcgcgtggctactccttgatgggttgcattaaagatattccgaccctaaaaggagataactacgcagaatggaaaagaaaactcgaccttgcttttatcttgggagaggtggactgggtattgactaccccatgtcctatagaacctgctgaccttgtcagaggtgaaagtgagtcagatgctgactggcaaaagagacatagggacaatgctcctctcgtcatgtcgtatgacattgaacaaaagaaatggtccttagccaacaagaaatgtttggctgtggtaaagaatacgattgagcctaccatattgggctcgatcccagagtgtgacgctgtctcagagtaccttgaaagaataaagagtcagtttactggctcttcaaagacttatgctacacagctgatcaagcagcttgtgacagaaaggtacaatggaggtggtgttagagaccacatacttagaatgagcaacatggcttccaagttgaagccaatggatttgggcataacagatgactttctggtccatctggttatggcctcattgccaaagcagtttgacaattttattgtcaactacaacataagtccagagaaatggaactttgagaagctcattgctaattgtgtgcaagaggaggagagaatcaaagaatcaaatggtggttcaataaactatgttaaagataagaaaaagaaccacaagtctcccacctcaaaaggtaaacagtctcagcatctgcctcagcaacaacagttcgctgttgagaaagatcaatgtctccactgcaagaagacaggacactacaagaaagattgtcctgattttttgaaaatgatcatggcaaagaaaggtgagaacattattacatttgtaaatgaatctcattatgttggttactctagatccacatggtggattgattctggagcaactattcatgcttgtaattgtttaaaggcattccgttcgacgaggactacgcaaagaagagaaagcaccattagagttgccaatggagttgaagaaaaagttgaagctgttggagatcttcctctagagctctcgaatggcttcatacttttacttcgagatgtcttttatgttccttctttgcaaaggaacttaataagtgtatcaaagttggattttgatggatatgattgccgctttggaaatggcaaatgtgaactatggcataataatgcatgtattggtcttgctgtgttgcgagacgagctttatttgttatctctttctgagaatgtgaatgttgtgtcctcgttgacaaaagaaaacaagaaaagaaagcgaactcccgatgtctcatcgaaattatggcactgtcgtttgggccatatttcgagggggagaattgagagactagttaagaatgaaattcttcctccattggagttctcagacttagaacaatgcatagaatgcattaaaggaaaatttgtaaagagcatcaaaaagggtgcaaaacgaagcgcgggaattttagagatcattcatacagatatttgtggtccatttcctgtgaaaagtgtggatggctatgactcgttcataacattcacagatgattactcccgctatggttatatttatccaattaaagagcgatcagaagcattggataaatttaagatattcaaagctgaagttgaaaatcagcatgatataaagattaaagtagtaagatctgaccgtgggggggagtactatggtcgacatacgccttatgggcaagtccctggaccttttgcaaggttcttgctagagaatggaatagtagcccagtattcaacaccgggcgaacctcaacagaatggggtagctgaaaggcgcaaccgtacccttatggatatggtgcgcagcatgatgagctactccacactaccactcggtttatggatggaggcgttaaaaaccgccattcatattctcaacagagttccaagcaaatcggtgcccaaaacaccgtatgagctatggacagggagagtaccctcgctaactcacctccgtgtgtgggggagtcctgcagaggccaaagtatttaacccaaatattgggaagttggaccccaaaacagtcagttgccattttattggctatcctgaaagatcaaaaggctatcgtttctactgtccaaacagttatacaaagtttgtagaaacgagacacgccgtcttcttggaagacgaaatgattagggggagctcggtagttcgagaaattgatcttgaggagaggcgggtgtctgtacccgctccgtcgactcaggaacctttcttctctctacctgctgatgttgtgcctgcaatgcctgtcattgaggtaccagcacctgttgttacccctcctgtggcaacaatgaatgagagtgaggaacctgttatacaggattcaacagaaatggttgccacgccagaggaggagctacaacagcctcaaatagataatgtgccagtacaggagactcatcaagagcctcaggtacaggatgtgccaaatgtgcaggcccctagaaggtctgaaagagtcagaagatcggctatccgtgatgactataaagtttataatatagaagagtcgcatatggaggatgatcccacctcatatgaagaggccatgagaagcgctcgctcatctgaatggttggaagccatgaaagatgaaatgaaatcaatgaaactaaacgatgtttgggatttagaagaaattcctaaaggagccaaaacagtaggctgtaaatgggtctacaaaaccaaatatgactccagagggaatatagaaaagtttaaagcgcgacttgtggcaaaaggcttcacgcaacgagaagggattgattacaatgagacattttctccagtctcttgtaaagattccttcaggattataatggcactagtggcacattatgatttggaattacatcagatggatgtaaaaacggcatttctaaatggagatttggaggaaaaagtatacatggcgcaaccaaaaggttttgtcatgaaaggaaacgaaaatatgggatgtcgtctaaagagatccatttatggattaaagcaagattcgagacagtggtacttgaagtttgatgggacaataaagaaatttgggtttcaagagaatgtcgaggacaactgtatttattcaaagtttaagaatgggagatttattttcctaattctgtatgtggatgacattctactggctagtagtgatgtcagtctactgcaggaaacaaagaaattcttgtcctcaaactttgacatgaaagacctcggtgaggcttcatatgttttgggcatagagattcaccgagatagaacaaagtatgcattgggactttctcaaaagacatatatagaaaaggtgttgaagaaattcaacatgtacagatgcagtgctacacctgctcctataatgaaaggcgaaaagtatggggcatcgcaatgtcccagaaatcagtatgagctcaatgaaatgaaaacaaagccatatgcgtcagctgtaggaagcctacagtacgcgcaagtgtgcacacgacctgacttggcatttgttaccgggttacttggcagatttcagagtaatccaggcctagagcactggaaattggtaaagaaagtcttgcgttatttgcaaggaacaaaaggcctcatgctgtcttacagaagatcagaatcactccagatagtggggtactcagattctgactttgcaaaagataatacaaagtcaacatcgggatacgtgtttaccctggcaggaggagctatttcatggaaaagctcaaaacagactatcactgcagggtctactatgtatgccgagtttatagcatgctatgaggcaacggggcaggtgaactggctaaagaagttcatacccggtttaaaggtggttgacagtattgagaaaccactaaagttatactgcgacaacgaacccgcagtaatgtacactcacaacaatcagtcaagtggtgctgccaaacacattgacataaagtactatgttgtgaaggacaaagtccgggatcaaacaatcagtctcgagcacattaaaacagaaaggatgctcgcggatccgctcacgaaaggcctaccacccaacgtgttcaaggaacatgtagccggcatgggtttaagggaagccttatga

SEQ ID NO: 14443 - DNA, 4113 bp, Oryza sativa
  Clone ID: TFbOSC407404j.C1.o1.fg
atgggttgcattaaagatattccgaccctaaaaggagataactacgcagaatggaaaagaaaactcgaccttgcttttatcttgggagaggtggactgggtattgactaccccatgtcctatagaacctgctgaccttgtcagaggtgaaaatgagtcagatgctgactggcaaaagagacagagggacaatgctcctctcgtcatgtcgtatgacattgaacaaaagaaatggtccttagccaacaagaaatgtttggctgtggtaaagaatacgattgagcctaccatattgggctcgatcccagagtgtgacgctgtctcagagtaccttgaaagaataaagagtcagtttactggctcttcaaagacttatgctacacagctgatcaagcagcttgtgacagaaaggtaccatggaggtggtgttagagaccacatacttagaatgagcaacatggcttccaaattgaagccaatggatttgggcataacagatgactttctggtccatctggttatggcctcattgccaaagcagtttgacaattttattgtcaactacaacataagtccagagaaatggaactttgagaagctcattgctaattgtgtgcaagaggaggagagaatcaaagaatcaaatggtggttcaataaactatgttaaagataagaaaaagaaccacaagtctcccacctcaaaaggtaaacagtctcagcatctgcctcaacaacaacagttcgctgttgagaaagatcaatgtctccactgcaagaagacaggacactacaagaaagattgtcctgactttttgaaaatgatcatggcaaagaaaggtgagaacattattacatttgtaaatgaatctcattatgttggttactctagatccacatggtggattgattctggagcaactattcatgcttgtaattgtttaaaggcattccgttcgacgaggactacgcaaagaagagaaagcaccattagagttgccaatggagttgaagaaaaagttgaagctgttggagatcttcctctagagctcgcgaatggcttcatacttttacttcgagatgtcttttatgttccttctttgcaaaggaacttaataagtgtatcaaagttggattttgatggacatgattgccgctttggaagtggcaaatgtgaactatggcataataatgcatgtattggtcttgctgtgttgcgagacgagctttatttgttatctctttctgagaatgtgaatgttgtgtcctcgttgacaaaagaaaacaagaaaagaaagcgaactcccgatgtctcatcgaaattatggcactgtcgtttgggccatatttcgagggggagaattgagagactagttaagaatgaaattcttcctccattggagttctcagacttagaacaatgcatagaatgcattaaaggaaaatttgtaaagagcatcaaaaagggtgcaaaacgaagcgcaggaattttagagatcattcatacagatatttgtgatgattactcccgctatggttatatttatccaattaaagagcgatcagaagcactggataaatttaagatattcaaagctgaagttgaaaatcagcatgatataaagattaaagtagtaagatctgaccgtgggggggagtactatggtcgacatacgccttatgggcaagtccctggaccttttgcaaggttcttgctagagaatggaatagtagcccagtattcaacaccgggcgaacctcaacagaatggggtagctgaaaggcgcaaccgtacccttatggatatggtgcgcagcatgatgagctactccacactaccactcggtttatggatggaggcgttaaaaaccgccattcatattctcaacagagttccaagcaaatcggtgcccaaaacaccgtatgagctatggacagggagagtaccctcgctaactcacctccgtgtgtgggggagtcctgcagaggccaaagtatttaacccaaatattgggaagttggaccccaaaacagtcagttgccattttattggctatcctgaaagatcaaaaggctatcgtttctactgtccaaacagttatacaaagtttgtaaaaacgagacacgccgtcttcttggaagacgaaatgattaaggggagctcggtagttcgagaaattgatcttgaggagaggcgggtgtctgtacccgctccgtcgactcaggaacctttcttctctctacctgctgatgttgtgcctgcaatgcctgtcattgaggtaccagcacctgttgttacccctcctgtggcaacaatgaatgagagtgaggaacctgttatacaggattcaacagaaatggttgccacaccagaggaggagctacaacagcctcaaatagataatgtgccagtacaggagactcatcaagagcctcaggtacaggatgtgccaaatgtgcaggcccctagaaggtctgaaagagtcagaagatcggctatccgtgatgactataaagtttataatatagaagagtcgcatatggaggatgatcccacctcatatgaagaggccatgagaagcgctcgctcatctgaatggttggaagccatgaaagatgaaatgaaatcaatgaaactaaacgatgtttgggatttagaagaaattcctaaaggagccaaaacagtaggctgtaaatgggtctacaaaaccaaatatgactccagagggaatatagaaaagtttaaagcgcgacttgtggcaaaaggcttcacgcaacgagaagggattgattacaatgagacattttctccagtctcttgtaaagattccttcaggattataatggcactagtggcacattatgatttggaattacatcagatggatgtaaaaacggcatttctaaatggagatttggaggaaaaagtatacatggcgcaaccgaaaggttttgtcatgaaaggaaacgaaaatatgggatgtcgcctaaagagatccatttatggattaaagcaagcttcgagacagtggtacttgaagtttgatgggacaataaagaaatttgggtttcaagagaatgtcgaggacaactgtatttattcaaagtttaagaatgggagatttattttcctaattctgtatgtggatgacattctactggctagtagtgatgtcagtctactgcaggaaacaaagaaattcttgtcctcaaactttgacatgaaagacctcggtgaggcttcatatgttttgggcatagagattcaccgagatagaacaaagtatgcattgggactttctcaaaagacatatatagaaaaggtgttgaagaaattcaacatgtacagatgcagtgctacacctgctcctataatgaaaggcgaaaagtatggggcatcgcaatgtcccagaaatcagtatgagctcaatgaaatgaaaacaaagccatatgcgtcagctgtaggaagcctacagtacgcgcaagtgtgcacacgacctgacttggcatttgttaccgggttacttggcagatttcagagtaatccaggcctagagcactggaaattggtaaagaaagtcttgcgttatttgcaaggaacaaaaggcctcatgctgtcttacagaagatcagaatcactccagatagtggggtactcagattctgactttgcaaaagataatacaaagtcaacatcgggatacgtgtttaccctgacaggaggagctatttcatggaaaagctcaaaacagactatcactgcagggtctactatgtatggcgagtttatagcatgctatgaggcaacggggcaggtgaactggctaaagaagttcatacccggtttaaaggtggttgacagtattgagaaaccgctaaagttatactgcgacaacgaacccgcagtaatgtacgctcacaacaatcagtcaagtggtgctgccaaacacattgacataaagtactatgttgtgaaggacaaagtccgggatcaaacaatcagtctcgagcacattaaaacagaaaggatgctcgcggatccgctcacgaaaggcctaccacccaacgtgttcaaggaacatgtagccggcatgggtttaagggaagccttatga

SEQ ID NO: 14444 - DNA, 4008 bp, Oryza sativa
  Clone ID: TFbOSC410327j.C1.o10.fg
atgtccggcgcctcttcctccacgaactcctcaaccggtggctactccttgatgggttgcattaaagatattccgaccctaaaaggagataactacgcagaatggaaaagaaaactcgaccttgcttttatcttgggagaggtggactgggtattgactaccccatgtcctatagaacctgctgaacttgtcagaggtgaaaatgagtcagatgctgactggcaaaagagacagagggacaatgctcctctcgtcatgtcgtatgacattgaacaaaagaaatggtccttagccaacaagaaatgtttggctgtggtaaagaatacgattgagcctaccatattgggctcgatcccagagtgtgacgctgtctcagagtaccttgaaagaataaagagtcagtttactggctcttcaaagacttatgctacacagctgatcaagcagcttgtgacagaaaggtaccatggaggtggtgttagagaccacatacttagaatgagcaacatggcttccaagttgaagccaatggatttgggcataacagatgactttctggtccatctggaggagagaatcaaagaatcaaatggtggttcaataaactatgttaaagataagaaaaagaaccacaagtctcccacctcaaaaggtaaacagtctcagcatctgcctcagcaacaacagttcgctgttgagaaagatcaatgtctccactgcaagaagacaggacactacaagaaagattgtcctgactttttgaaaatgatcatggcaaagaaaggtgagaacattattacatttgtaaatgaatctcattatgttggttactctagatccacatggtggattgattctggagcaactattcatgcttgtaattgtttaaaggcattccgttcgacgaggactacgcaaggaagagaaagcaccattagagttgccaatggagttgaagaaaaagttgaagctgttggagatcttccgctagagctcgcgaatggcttcacacttttacttcgagatgtcttttatgttccttctttgcaaagaaacttaataagtgtatcaaagttggattttgatggatatgattgccgctttggaagtggcaaatgtgaactatggcataataatgcatgtattggtcttgctgtgttgcgagacgagctttatttgttatctctttctgagaatgtgaatgttgtgtcctcgttgacaaaagaaaacaagaaaagaaagcgaactcccgatgtctcatcgaaattatggcactgtcgtttgggccatatttcgagggggagaattgagagactagttaagaatgaaattcttcctccattggagttctcagacttagaacaatgcatagaatgcattaaaggaaaatttgtaaagagcatcaaaaaggatgattactcccgctatggttatatttatccaattaaagagcgatcagaagcactggataaatttaagatattcaaagctgaagttgaaaatcagcttgatataaagattaaagtagtaagatctgaccgtgggggagagtactatggtcgacatacgccttatgggcaagtccctagaccttttgcaaggttcttgctagagaatggaatagtagcccagtattcaacaccgggcgaacctcaacagaatggggtagctgaaaggcgcaaccgtacgcttatggatattgtgcgcagcatgatgagctactccacactaccactcggtttatggatggaggcgttaaaaaccgccattcatattctcaacagagttccaagcaaatcggtacccaaaacaccgtatgagctatggacagggagagtaccctcgctaactcacctccgtgtgtgggggagtcctgcagaggccaaagtatttaacccaaatattgggaagttggaccccaaaacagtcagctgccattttattggctatcctgaaagatcaaaaggctatcgtttctactgtccaaacagttatacaaagtttgtagaaacgagacacgccgtcttcttggaagacgaaatgattagggggagctcggtagttcgagaaattgatcttgaggagaggcgggtgtctgtacccgctccgtcgactcaggaacctttcttctctctacctgctgatgttgtgcctgcaatgcctgtcattgaggtaccagcacctgttgttacccctcctgtggcaacaatgaatgagagtgaggaacctgttatacaggattcaacagaaatggttgtcacaccagaggaggagctacaacagcctcaaatagataatgtgccagtacaggagactcatcaagagcctcaggtacaggatgtgccaaatgtgcaggcccctagaaggtctgaaagagtcagaagatcggctatccgtgatgactataaagtttataatatagaagagtcgcatatggaggatgatcccacctcatatgaagaggccatgagaagcgctcgctcatctgaatggttggaagccatgaaagatgaaatgaaatcaatgaaactaaacaatgtttgggatttagaagaaattcctaaaggagccaaaacagtaggctgtaaatgggtctacaaaaccaaatatgactccagagggaatatagaaaagtttaaagcgcgacttgtggcaaaaggcttcacgcaacgagaagggattgattacaatgagacattttctccagtctcttgtaaagattccttcaggattataatggcactagtggcacattatgatttggaattacatcagatggatgtaaaaacggcatttctaaatggagatttggaggaaaaagtatacatggcgcaaccgaaaggttttgtcatgaaaggaaacgaaaatatgggatgtcgtctaaagagatccatttatggattaaagcaagcttcgagacagtggtacttgaagtttgatgggacaataaagaaatttgggtttcaagagaatgtcgaggacaactgtatttattcaaagtttaagaatgggagatttattttcctaattctgtatgtggatgacattctactggctagtagtgatgtcagtctactgcaggaaacaaagaaattcttgtcctcaaactttgacatgaaagacctcggtgaggcttcatatgttttgggcatagagattcaccgagatagaacaaagtatgcattgggactttctcaaaagacatatatagaaaaggtgttgaagaaattcaacatgtacagatgcagtgctacacctgctcctataatgaaaggcgaaaagtatggggcatcgcaatgtcccagaaatcagtatgagctcaatgaaatgaaaacaaagccatatgcgtcagctgtaggaagcctacagtacgcgcaagtgtgcacacgacctgacttggcatttgttaccgggttacttggcagatttcagagtaatccaggcctagagcactggaaattggtaaagaaagtcttgcgttatttgcaaggaacaaaaggcctcatgctgacttacagaagatcagaatcactccagatagtggggtactcagattctgactttgcaaaagataatacaaagtcaacatcgggatacgtgtttaccctggcaggaggagctatttcatggaaaagctcaaaacagactatcactgcagggtctactatgtatgccgagtttatagcatgctatgaggcaacggggcaggtgaactggctaaagaagttcatacccggtttaaaggtggttgacagtattgagaaaccactaaagttatactgcgacaacgaacccacagtaatgtacgctcacaacaatcagtcaagtggtgctgccaaacacattgacataaagtactatgttgtgaaggacaaagtccgggatcaaacaatcagtctcgagcacattaaaacagaaaggatgctcgcggatccgctcacgaaaggcctaccacccaacgtgttcaaggaacatgtagccggcatgggtttaagggaagccttatga

SEQ ID NO: 14445 - DNA, 4137 bp, Oryza sativa
  Clone ID: TFbOSC420229j.C1.o2.fg
atggtcgccttcccttccctaacccctctatgctctctcctagggtgccgccgccgcccgttcgcgcctcggcatcaccagtcgtcgccgccgttttcttccttcgcgccggccgccgtgttcgccggtggctactccttgatgggttgcattaaagatattccgaccctaaaaggagataactacgcagaatggaaaagaaaactcgaccttgcttttatcttgggagaggtggactgggtattgactaccccatgtcctatagaacctgctgaacttgtcagaggtgaaaatgagtcagatgctgactggcaaaagagacagagggacaatgctcctctcgtcatgtcgtatgacattgaacaaaagaaatggtccttagccaacaagaaatgtttggctgtggtaaagaatacgattgagcctaccatattgggctcgatcccagagtgtgacgctgtctcagagtaccttgaaagaataaagagtcagtttactggctcttcaaagacttatgctacacagctgatcaagcagcttgtgacagaaaggtaccatggaggtggtgttagagaccacatacttagaatgagcaacatggcttccaaattgaagccaatggatttgggcataacagatgactttctggtccatctggttatggcctcattgccaaagcagtttgacaattttattgtcaactacaacataagtccagagaaatggaactttgagaagctcattgctaattgtgtgcaagaggaggagagaatcaaagaatcaaatggtggttcaataaactatgttaaagataagaaaaagaaccacaagtctcccacctcaaaaggtaaacagtctcagcatctgcctcaacaacaacagttcgctgttgagaaagatcaatgtctccactgcaagaagacaggacactacaagaaagattgtcctgactttttgaaaatgatcatggcaaagaaaggtgagaacattattacatttgtaaatgaatctcattatgttggttactctagatccacatggtggattgattctggagcaactattcatgcttgtaattgtttaaaggcattccgttcgacgaggactacgcaaagaagagaaagcaccattagagttgccaatggagttgaagaaaaagttgaagctgttggagatcttcctctagagctcgcgaatggcttcatacttttacttcgagatgtcttttatgttccttctttgcaaaggaacttaataagtgtatcaaagttggattttgatggatatgattgccgctttggaagtggcaaatgtgaactatggcataataatgcatgtattggtcttgctgtgttgcgagacgagctttatttgttatctctttctgagaatgtgaatgttgtgtcctcgttgacaaaagaaaacaagaaaagaaagcgaactcccgatgtctcatcgaaattatggcactgtcgtttgggccatatttcgagggggagaattgagagactagttaagaatgaaattcttcctccattggagttctcagacttagaacaatgcatagaatgcattaaaggaaaatttgtaaagagcatcaaaaagggtgcaaaacgaagcgcaggaattttagagatcattcatacagatatttgtggtccatttcctgtgaaaagtgtggatggctatgactcgttcataacattcacagatgattactcccgctatggttatatttatccaattaaagagcgatcagaagcactggataaatttaagatattcaaagctgaagttgaaaatcagcatgatataaagattaatgtaaatggggtagctgaaaggcgcaaccgtacccttatggatatggtgcgcagcatgatgagctactccacactaccactcggtttatggatggaggcgttaaaaaccgccattcatattctcaacagagttccaagcaaatcggtgcccaaaacaccgtatgagctatggacaggaagagtaccctcgctaactcacctccgtgtgtgggggagtcctgcagaggccaaagtatttaacccaaatattgggaagttggaccccaaaacagtcagctgccattttattggctatcctgaaagatcaaaaggctatcgtttctactgtccaaacagttatacaaagtttgtagaaacgagacacgccgtcttcttggaagacgaaatgattagggggagctcggtagttcgagaaattgatcttgaggagaggcgggtgtctgtacccgctccgtcgactcaggaacttttcttctctctacctgctgatgttgtgcctgcaatgcctgtcattgaggtacaagcacctgttgttacccctcctgtggcaacaatgaatgagagtgaggaacctgttatacaggattcaacagaaatggttgccacaccagaggaggagctacaacagcctcaaatagataatgtgccagtacaggagactcatcaagagcctcaggtacaggatgtgccaaatgtgcaggcccctagaaggtctgaaagagtcagaagatcggctatccgtgatgactataaagtttataatatagaagagtcgcatatggaggatgatcccacctcatatgaagaggccatgagaagcgctcgctcatctgaatggttggaagccatgaaagatgaaatgaaatcaatgaaactaaacgatgtttgggatttagaagaaattcctaaaggagccaaaacagtaggctgtaaatgggtctacaaaaccaaatatgactccagagggaatatagaaaagtttaaagcgcgacttgtggcaaaaggcttcacgcaacgagaagggattgattacaatgagacattttctccagtctcttgtaaagattccttcaggattataatggcactagtggcacattatgatttggaattacatcagatggatgtaaaaacggcatttctaaatggagatttggaggaaaaagtatacatggcgcaaccgaaaggttttgtcatgaaaggaaacgaaaatatgggatgtcgtctaaggagatccatttatggattaaagcaagcttcgagacagtggtacttgaagtttgatgggacaataaagaaatttgggtttcaagagaatgtcgaggacaactgtatttattcaaagtttaagaatgggagatttattttcctaattctgtatgtggatgacattctactggctagtagtgatgtcagtctactgcaggaaacaaagaaattcttgtcctcaaactttgacatgaaagacctcggtgaggcttcatatgttttgggcatagagattcaccgagatagaacaaagtatgcattgggactttctcaaaagacatatatagaaaaggtgttgaagaaattcaacatgtacagatgcagtgctacacctgctcctataatgaaaggcgaaaagtatggggcatcgcaatgtcccagaaatcagtatgagctcaatgaaatgaaaacaaagccatatgcgtcagctgtaggaagcctacagtacgcgcaagtgtgcacacgacctaacttggcatttgttaccgggttacttggcagatttcagagtaatccaggcctagagcactggaaattggtaaagaaagtcttgcgttatttgcaaggaacaaaaggcctcatgctgtcttacagaagatcagaatcactccagatagtggggtactcagattctgactttgcaaaagataatacaaagtcaacatcggggtatgtgtttaccctggcaggaggagctatttcatggaaaagctcaaaacagactatcactgcagggtctactatgtatgccgagtttatagcatgctatgaggcaatggggcaggtgaactggctaaagaagttcatacccggtttaaaggtggttgacagtattgagaaaccactaaagttatactgcgacaacgaacccgcagtaatgtacgctcacaacaatcagtcaagtggtgctgccaaacacattgacataaagtactatgttgtgaaggacaaagtccgggatcaaacaatcagtctcgagcacattaaaacagaaaggatgctcgcggatccgctcacgaaaggcctaccacccaacgtgttctag

SEQ ID NO: 14446 - DNA, 3000 bp, Oryza sativa
  Clone ID: TFbOSC900016j.C1.o35.fg
atgtcgtatgacattgaatataagaaatggtccttaaccaacaagaaatgtttggctgtggtaaagaacacaattgagccaaccatattgggctcaatcccagagtgtgacgctgtctcagagtacctcgaaagaataaagagtcaatttactggctcttcaaagacttatgctacacagctgataaagcagcttgtgacagagaggtaccatggaggtggtgtaagagaccacattcttaggatgagcaacatggcttccaagttgaagccaatggatttgggcataacagatgactttctggtccatctggttatggcctcattgccaaagcactttgacaactttattgtcaactacaacataagtccagagaaatggaattttgaaaagctcatcgctaattgtgtgcaagaggaggaaaaaatcaaagagtccaatggtggctctattaactatgttaaagataacaagaaaaagaactacaagtcaccctcctcaaaagcaaaacagcctcagcatttgcctcagcaacaacagttcgctgttgaaaaggatcagtgtctccactgcaagaagacaggacattacaagaaagactgtcctgacttcctaaaaatgatcatggcaaagaaaggtaaaaacattattacttttgtaaatgaatctcattatgttggttattctagatccacatggtggattgattctggagcaactattcatgcgtgtaattgtttaaaggcattccgttcgatgaggactacgcaaagaagcgaaagctccattagagttgccaatggagttgaagaaaaagttgacgctgttggagatctttccctagagctcgcgaatggcttcacacttttacttcgaaatgtcttttatgttccttcttttcaaagaaatttaataagtgtatcaaaattggattttgatggatatgattgccgctttggaagtggcgaatgtgaactatgggggagaattgagagactagttaagaatgaaattcttcctccattggagttctcagatttagaacaatgcatagaatgcattaaaggaaaatttgtaaagaacatcaaaaagggtgcaaaacgaagcgcaggatttttggaaataattcacacagatatttgtggtccatttcctgtgaaaagtgtggatggctatgactcgttcataacattcacagatgattattcccgttatagttatatttatccaattaaagaaagatcagaagcattggataaatttaagatattcaaagctgaagttgaaaatcagcatgatatgggcaagtccctggaccttttccttttgcaagctgaaaggcgtaaccgtacccttatggatatggtgcgcagcatgatgagctactccaccctatcattgggtttatggatggaggcgttaaaaaccgccattcatatcctcaacagagttccaagcaaatcggtgcccaaaacaccgtatgagctatggacaggaagagtaccctcgctagctcacctccgcgtgtgggggagtcctgcggaggctaaaatatttaacccagaccttaggaaattggatcccaaaacagattcaacagaaattattgccacaccagaggaggagctgcaacagcctcaaacagataatgtgccagtacaggagactcaacaagagcctcacatacagaatgtgccaaatgtggaggcccctagaaggtctgaaagagtcagaagatcggctatccgtgatgactatcaagtttataatatagaagagtcacatatggaggatgatcccacctcatataaagaggccatgagaagcgctcgttcatctgaatggttggaagccatgaaagatgaaatgaaatcaatgaaactaaacgatgtctgggatttagaagagattcctaaaggagccaaaacagtaggctgtaaatgggtctacaaaaccaaatatgactccagagggaatatagaaaaatttaaggcgcgacttgtggcaaaaggcttcacgcaaagagaagggattgattacaatgagacattttctccagtctcttgtaaagattccttcaggattataatagcattgatggcacattatgatttggaattacatcagatggatgtgaaaacgacatttctaaatggagatttggaggaaaaagaaacaaagaaattcttgtcatcaaactttgacatgaaagacatcggtgaggcttcatatgttttgggcatagagattcatcgagatagaacaaagtatgcattgggactttctcaaaaggcatatatagaaaaggtgttgatgaaattcaacatgtacagatgcagtgctacacctgctcctatagtcaagggcgaaaagtatggggcatcacaatgtcccagaaatcagtatgagctcaatgaaatgaaaacaaagccatatgcgtcagctgtgggaagcctacagtatgcgcaagtgtgcacacgccctgacttggcatttgtcaccgagttgcttggcagatttcagagtaatccaggtccaaagcactggaaattagtaaagaaagtcttgtgtttttggaaaggtacaaaaggcctcatgatgtcttacagaagattagagtcactccagatagtggggtattcagattctgattttgcaaaagacaatacaaagtcaacatcgggatacgtgttcacccttgcgggaggagctatttcatggaaaagctccaaacagactatcactgcagggtctactatgtatgccgagtttatagcatgctatgaggccacggggcaggtgaactggctaaagaagttcatatctggtttaaaggtggttgacagtattgagaaaccactaaagttatactgcgataacgaacccgcagtaatgtacgctcacaacaatcagtcaagtggtgctgccaaacacattgacataaagtactatgttgtgaaggacagtccgagatcaaacaatcagtctcgagcacattag

SEQ ID NO: 14447 - DNA, 1212 bp, Oryza sativa
  Clone ID: TFbOSC900040j.C1.o10.fg
atgcctgtccccgtctacgccgccgccgccatgctgccgccgtcgccgtgcccgtctcttgccgccgccgtcctcgtctacaagggatggctgcaaggggccgaccgcgcatgtcggggtgctcctcccgcaatgggatgcccagctatatctagtaggaatcacctgatacctggtaggtatcatccgatacctcgcaagtatcacgcgatacatggtagaaatcgtctgatacctgacaagtatcacatgatacctcgcgagaatcacgcgatacgtggtagaaatcgtttgatacatgacaggtttcacatgatacctcgcgagtatcacgcgatacgtggtagaaatcgcatgatacctgataagtatcacctgaaacgtggctactccttgatgggttgcattaaagatattccgaccctaaaagaagataactacgcacaatggaaaagaaaactcaaccttgctttcatcttgggagaggtggactgggtgttgactaccccatgtcctatagaacctgctgcacttgtcagaggtgaaaataagtcagatgctgactggaaaaagagacagagggacaatgctcctctcgtcatgtcgtatgacattgaacaaaagacatggtccttagccaacaagaaatgtttggctgtggtaaagaatacgattgagccaactatattgggctcaatcctagagtgtgacgctgtctcagagtaccttgaaagaacaaagagtcagtttactggctcttcaaagacttatgctacacagctgatcaagcagcttgtgacagaaaggtaccatggaggtggtgttagagaccacatacttagaatgagcaacatggcttccaagttgaagccaatggatttgggcataacatatgactttctggtccatcttgttatggcctcatttccaaagcagtttgacaattttattgtcaactacaacataagtccagagaaatggaactttgagaagctcattgctaattgtgtgcaagaggaggagagaatcaaagagtcaaatggtggttcaattaactatgttaaagataagaaaaagaactacaagtctcccacctcaaaagctaaacagtctcaacatctgcctcagcaacaacagttcgctgttgagaaagatcagtgtctccactgcaagaagacaggacattacaagaaagactgtcctgacttttga

SEQ ID NO: 14448 - DNA, 3933 bp, Oryza sativa
  Clone ID: TFbOSC900374j.C1.o17.fg
atgggttgcattaaagatattccgaccctaaaaggagataactacgcagaatggaaaagaaaactcgaccttgcttttatcttgggagaggtggactgggtgttgactaccccatgtcctatagaacctgctgaacttgtcagaggtgaaaatgagtcagatgctgactggcaaaagagacagagggacaatgctcctctcgtcatgtcgtatgacattgaacaaaagaaatggtccttagccaacaagaaatgtttggctgtggtaaagaatacgattgagcctaccatattgggctcgatcccagagtgtgacgctgtctcagagtaccttgaaagaataaagagtcagtttactggctcttcaaagacttatgctacacagctgatcaagcagcttgtgacagaaaggtaccatggaggtggtgttagagaccacatacttagaatgagcaacatggcttccaagttgaagccaatggatttgggcataacagatgactttctggtccatctggttatggcctcattgccaaagcagtttgacaattttattgtcaactacaacataagtccagagaaatggaactttgagaagctcattgctaattgtgtgcaagaggaggagagaatcaaagaatcaaatggtggttcaataaactatgttaaagataagaaaaagaaccacaagtctcccacctcaaaaggcaaacagtctcagcatctgcctcagcaacaacagttcgctgttgagaaagatcaatgtctccactgcaagaagacaggacactacaagaaagattgtcctgactttttgaaaatgatcatggcaaagaaaggtgagaacattattacatttgtaaatgaatctcattatgttggttactctagatccacatggtggattgattctggagcaactattcatgcttgtaattgtttaaaggcattccgttcgacgaggactacgcaaagaagagaaagcaccattagagttgccaatggagttgaagaaaaagttgaagctgttggagatcttcctctagagctcgcgaatggcttcatacttttacttcgagatgtcttttatgttccttctttgcaaagaaacttaataagtgtatcaaagttggattttgatggatatgattgccgttttggaagtggcaaatgtgaactatggcataataatgcatgtattggtcttgctgtgttgcgagacgagctttatttgttatctctttctgagaatgtgaatgttgtgtcctcgttgacaaaagaaaacaagaaaagaaagcgaactcccgatgtctcatcgaaattatggcactgtcgtttgggccatatttcgagggggagaattgagagactagttaagaatgaaattcttcctccattggagttctcagacttagaacaatgcatagaatgcattaaaggaaaatttgtaaagaacatcaaaaagggtgcaaaacgaagcgcaggaattttagagatcattcatacagatatttgtggtccatttcctgtgaaaagtgtggatggctatgactcgttcataacattcacagatgattactcccgctatggttatatttatccaattaaagagcgatcagaagcactggataaagatataaagattaaagtagtaagatctgaccgtgggggggagtactatggtcgacatacgccttatgggcaagtccctggaccttttgcaaggttcttgctagagaatggaatagtagcccagtattcaacaccgggcgaacctcaacagaatggggtagctgaaaggcgcaaccgtacccttatggatatggtgcgcagcatgatgagctactccacactaccactcggtttatggatggaggcgttaaaaaccgccattcatattctcaacagagttccaagcaaatcggtgcccaaaacaccgtatgagctatggacagggagagtaccctcgctaactcacctccgtgtgtgggggagtcctgcagaggccaaagtatttaacccaaatattgggaagttggaccccaaaacagtcagttgccattttattggctatcctgaaagatcaaaaggctatcgtttctactgtccaaacagttatacaaagtttgtagaaacgagacacgccgtcttcttggaagacgaaatgattagggggagctcggtagttcgagaaattgatcttgaggagaggcgggtgtctgtacccgctccgtcgactcaggaacctttcttctctctacctgctgatgttgtgcctgcaatgcctgtcattgaggtaccagcacctgttgttacccctcctgtggcaacaatgaatgagagtaaggaacctgttatacaggattcaacagaaatggttgccacaccagaggaggagctacaacagcctcaaatagataatgtgccagtacaggagactcatcaagagcctcaagtacaagatgtgccaaatgtgcaggcccctagaaggtctgaaagagtcagaagatcggctatccgtgatgactataaagtttataatatagaagagtcgcatatggaggatgatcccacctcatatgaagaggccatgagaagcgctcgctcatctgaatggttggaagccatgaaagatgaaatgaaatcaatgaaactaaacgatgtttgggatttagaagaaattcctaaaggagccaaaacaatggatgtaaaaacggcatttctaaatggagatttggaggaaaaagtatacatggcgcaaccgaaaggttttgtcatgaaaggaaacgaaaatatgggatgtcgtctaaagagatccatttatggattaaagcaagcttcgagacagtggtacttgaagtttgatgggacaataaagaaatttgggtttcaagagaatgtcgaggacaactgtatttattcaaagtttaaaaatgggagatttattttcctaattctgtatgtggatgacattctactggctagtagtgatgtcagtctactgcaggaaacaaagaaattcttgtcctcaaactttgacatgaaagacctcggtgaggcttcatatgttttgggcatagagattcaccgagatagaacaaagtatgcattgggactttctcaaaagacatatatagaaaaggtgttgaagaaattcaacatgtacagatgcagtgctacacctgctcctataatgaaaggcgaaaagtatggggcatcgcaatgtcccagaaatcagtatgagctcaatgaaatgaaaacaaagccatatgcatcagctgtaggaagcctacagtacgcgcaagtgtgcacacgacctgacttggcattcgttaccgggttacttggcagatttcagagtaatccaggcctagagcactggaaattggtaaagaaagtcttgcgttatttgcaaggaacaaaaggcctcatgctatcttacagaagatcagaatcactccaaatagtggggtactcagattctgactttgcaaaagataatacaaagtcaacatcgggatacgtgtttaccctggcaggaggagctatttcatggaaaagctcaaaacagactatcactgcagggtctactatgtatgccgagtttatggcatgctatgaggcaacggggcaggtgaactggctaaagaagttcatacccggtttaaaggtggttgacagtattgagaaaccactaaagttatactgcgacaacgaacccgcagtaatgtacgctcacaacaatcagtcaagtggtgctgccaaacacattgacataaagtactatgttgtgaaggacaaagtccgggatcaaacaatcagtctcgagcacattaaaacagaaaggatgctcgcggatccgctcacgaaaggcctaccacccaacgtgttcaaggaacatgtagccggcatgggtttaagggaagccttatga

SEQ ID NO: 14449 - DNA, 1503 bp, Oryza sativa
  Clone ID: TFbOSC33621j.C1.o1.np
atgggtccttaaatagagcgagttgtagatgtgagcatttctcctcctaatgataaagagctatcatttgaagaggaagagaaatgcatgcatatcaatgctcaagctactattgttttatttggtgttttaagtgaagatgtatttaaaaccgtcatgccgtttgaagatgctcatctcatttggaccactctcaaggagagatacgacaagtccaaatgtgatgattccaaatgtgatgatgtactctttttggaagaagcacttgaggagtgttcaacttcatcaccaaattgcgactaccttcgatgatcaagataatcatcccacaaccaccttatcatcaacacatgactacattgaaggtaatgaattggtgtgtaaggttgatgatcgtccaattctcccattggattccaacaacaccgataatgaatttgtcatattctattgtgttgttgactcatgcatctcacctagccccaagtatatgtgtgaggatgatatggataaatgctctacttcatatagtacttgtggaactaacctttagaagggagaagtaaatgagcgccagcggacaagtgaagaatccacctcaccaagatgctcatcttctatttccaaagatcatgcttgctttatgggagaagatggtgacttcgagtttgatcacttgagcaagaaggatattacaattgtgataaagctcatggagaccattaagaagcaacaagcatgcctcattaagaagaatgaagatatcatgagtctaaccgaagaacacaagaaacttaaggattttcattcttcattgattatgaggtatgaaaaattggaaaatgaatttgcttgtgccactaattctattgcttgtgtagcatctttggagaagcaaaatcaagagcttaaatctcaacttgacgagatcactaacaagtatgtggatttacaagaaaaacatgatgaacttttgtgttctcatgagaatcttgtggattctcatgccatgctagaggtatctcatgaggtgatagttccaatggtaaaatcctatgagcctcatgttcaagttgatctcacttgtactaaccctagttgctcccaagcaaatatttccccgagcactatatgtgacttggattgtgtaggcaaaagggagaagcaaatagattatggacttgtgtgcattgctcaaccttctcaagataaccatgagggcatggtgaagaagcttgtggaggaatcaaccgtggcttgcaccaagatccatcaaagggatagcaagtccatcaatgcttatatcaagggacgaaatcaaaagatgatcaagagttccattacttgcttcaagtgcaagaaagtgagacatcatgttagagattgcccttggaagaaaggaaataagttaaacaagaagaaggacattcctcacatcaagtgcttcaagtgcaccgaagtgggacactttgcctcaaggtattcttgcacattggatgaaca

SEQ ID NO: 14450 - DNA, 1803 bp, Oryza sativa
  Clone ID: TFbOSC401632j.C1.o1.fg
atggcatttgaagtaggttacgaggttgcccctgagtatcaccagattccccatgaccccaatgaggagaagtgtcgtgttcgcgtgacgttgactagtgatcgtgaagaccttccgtcgataaagtttgaagctgggggaagaaagtacagccatgcttgtcaagaagcaaccttggtggccattggagagctacgtcatcgctttgatgaggagttagagtcatcagctttccagtatcacccacacaagcctcatggtcaagactatggaacttacaactgtccccaaagtgaaggtagccccattgtgatgcacgccgtgtatatgcttagcgccatggatgcagtaggcgtggagcgggagaaagcagctcatgatagggaaaactggaaccgtggcaggatttgtaagttggagagcaaggtgtaccgtctgcagaagaaactagctgggcttaagggagaagcacgaccgtcagcacccaagcttcgcctcaccgcaaggaagagaacccgtccaccacctcgtctccagttagcttcgaagactcgtgtggtgggagacgctgtgcctgatcatgctgaacctgtcatccatgtcttaagtgatgaggaagaagaggaagacccagaagaaagagagccagctactccagaggaggaagatccatctcttcgttccgacgcaaggcgagagttgttgtctagtttgaccgttgccgtagttcgctgtatggtgaacacccgcactggaagtggaaatggtcacaatgaaggagatcccacacttgcccaagttttggcccagcaaacccagttgattaatctgttagtgcagcaagcgcagaaccagcaggcaaataacaagaatcaaccaccaccacctccgcagaacaagttggcagattttctacgtgtgagaccacctaccttctcaagcaccactaacccagtagaggcagcagctccaactcagaatcatcctgtcaggaaggaacagggaagcaagccaggggtgtgcttcaattgtggtgatccaagacattatgctgataagtgtccaatgcctcggcgtgtgaagaatgctcatgttcagaacaactccaatgctccagcaccaaaggctcgtgttaatcatgttgcagccgcagaaacccagaatgcacctgatgtggttttggaatccaaagatcttgatgttatcttagggatggactggctaacccgtcacataggagttatagattgtgctaaccgtaatgtgactttaacaagtagcaatggacaaacagtgtctttctttgtgtcatccccaaaatctcacggtttgacattaaatcaagttgctttgcaagagatcccaatagtacgagactatccagatgtgttccctggggatttgccaggtatgccacctaagagagacatagagttccggatagacttagtacctggaaccaaccctatccataagagaccatacagaatggcagctaatgagttagcagaggtaaagagacaggtggatgatttgcttcagaaaggatatatcagacccaataattcaccgtggggagcactagttatcttcgtggagaagaaagatcatacccaaagaatgtgtgtggattatccagcattgaatgaggtccctatcaagaataagtatcctctacctaggattgatgacctgtttgatcaactggaaggtgctacagctttctccaagatagatcttcttccggatatcaccaacttcaaatccggaggaggatataccttagactggctttaccacatg

SEQ ID NO: 14451 - DNA, 2373 bp, Oryza sativa
  Clone ID: TFbOSC900106j.C1.o17.fg
atggactccccagcgacccccgtgggcttatctccgccacttctcagtctggtgccccgcaatgaaccatgctatacaaaagataaagccgttgcccatgctggcttgtggttggcacggaaaagagggtttattgcgtcagcggctagggtttcggtggaccgggcgcacggcggcggttcacgcgaacggacggccgagatcgatccatccaaaacggacggccgagatcgatcgggtccacggcggctcacggaagaggacgactatgacgtcggcggtgacgtcaccaccggcggcggcggctcggcggctcgggcgcgcatgctcgccggcgaacggcggcacttcggcacgaacggagagcaccaacgggtagagcgcgacgcggcgaactcaccggtaaccaaaggagcggcggaagaccaacggacggcgacggcgacgacgaagaaacggcggcggtcttcgggtcgacggcggcgatggcgctccggtgatcttcggcgacggcgaaagggcgaacgaggacggcgacgcgacggcgaccacgacggcggtcttcccgagcgacggcgacgtctagaacggcggcggcgcacgactggagcgacggcggcgacggcggcgctagggcacacggcgctatggcgctacggacgacgagaggcgaaggcgaaggtggcggcgggtagagaagagcttgggggtccttttaaaggggctaggaggcgacgaagaaggcccacggcggccggcgacgagaaggaaagatcggggtttgaaggaaagagaccgatccgattcgaactcgaatcaaacacattccaaaccgatttagccgatatttccaaaggagaaaagataatcatcccacaaccaccttatcatcaacacatgactacattgaagaagggagaagtaaatgagcgccagcggacaagtgaagaatccacctcaccaagatgctcatcttctatttccaaagatcatgcttgctttatgggagaagatggtgacttcgagtttgatcacttgagcaagaaggatattacaattgtgataaagctcatggagaccattaagaagcaacaagcatgcctcattaagaagaatgaagatatcatgagtctaaccgaagaacacaagaaacttaaggattttcattcttcattgattatgaggtatgaaaaattggaaaatgaatttgcttgtgccactaattctattgcttgtgtagcatctttggagaagcaaaatcaagagcttaaatctcaacttgacgagatcactaacaagtatgtggatttacaagaaaaacatgatgaacttttgtgttctcatgagaatcttgtggattctcatgccatgctagaggtatctcatgaggtgatagttccaatggtaaaatcctatgagcctcatgttcaagttgatctcacttgtactaaccctagttgctcccaagcaaatatttccccgagcactatatgtgacttggattgtgtaggcaaaagggagaagcaaatagattatggacttgtgtgcattgctcaaccttctcaagataaccatgagggcatggtgaagaagcttgtggaggaatcaaccgtggcttgcaccaagatccatcaaagggatagcaagtccatcaatgcttatatcaagggacgaaatcaaaagatgatcaagagttccattacttgcttcaagtgcaagaaagtgagacatcatgttagagattgcccttggaagaaaggaaataagttaaacaagaagaaggacattcctcacatcaagtgcttcaagtgcaccgaagtgggacactttgcctcaaggtattcttgcacattggatgaacaatgcaaaacatcaaattttattgtggaaccaaaggctttggtaagactgctcgatttgcaatcaagctcatctatcaccatgccatcgagcccggagtctctgggtggataccccggagactccgtgaagattccttggtcacccgaagaatctaggccggaggctccaagctcacaagaacatgcatacttaaaggttatccttccatgcaagaatcacggaaggaagatggtgcacatgctaaaacgaatcgggtcatggccttacaagaagagcacaagcactatcaggacgcagactgtgatcaaggagttaaacatgttcgtgatgggaaagcttaagttctttctcgggattggaatcaagcaaatcaaggaagagatttcatcaagcccatcaaggtgccaaattcaaattggcttcaagatatcaattttatcgtatgggcatctcaaaaattcacaaggaagatgtcaaagggggagaaagaaaagattgatcaaaggatga

SEQ ID NO: 14452 - DNA, 3066 bp, Oryza sativa
  Clone ID: TFbOSC410574j.C1.o3.fg
atggaacatataaaacaatggctttcacatcaagaagaggaaggtaaaaacaattttgaagaaaaaaagaatgaagcacctaaattaggtcaagagagcatttcaggtaatttaactgatggtcaactggaccaagaaaaatatgagaaaccaaatggatggtacaacgttgatgctattgggataaattcacctaacgttgttttaaagatcaatgacaatattcaagaagggaagtgttgtgcactgttaaattcagagggatcatcaactgcgcgtcacggttgcgcgcacgagagatcggaaggagcagggccttcggaaccacaccttcgcctgagatctgcaccgggtaggcgggtgatcaggtttttggggagtgcttcagcacgactgctctcgacttctgctctgttcgtcgtcgtctcgtcgtccaccatgtctgcacctggagccgctggcgccgtctctagagttggtgcacctggagccggagccgccgccggcaccgctgccgccgtctctggagatggcgcgccgggatccagagccgctgcgaacttcaacatcaacggaggcagttctgcctcacaatccagcggagggccattctcggggaaggacatgtgggatgcacttgaggccaagttcggagtttccgacgccggcagtgagctgtatgtcatggagcagttctatgactacaagatggtcgatgaccgttctgtagtagaacaagctcatgagattcagatgctggctaaggaacttgagaacaacaactgtgagttgccggacaagtttgtggcgggtggcattattgccaaattgccaccttcttggtcggactttgccacttctctaaagcacaagagacaagagttcagtgtttctgatctcattggctctttgggtgttgaggagaaggcgagggcaaaggacaatcggggcaaaaagtttgagggaggttctagtgccaatatggtacagaagaagaaccctcatgcatcccacaacaacaagaaagtcaagcctgatgtcaaatccaaggctacaaccaattttaagaagaaaggcaagggaaaggcaaagagagactactttgtgtgtggcaagtctgggcatagggccaaggaatgtcctgagcgcaaagacaggaagtctgccaacatggtcgggagaggttcctccttgttgatgggaaacgggtcgcttgcggctgttcatggtgttggttctaagtgccatacttgtgttcaatcgaaacaacctcgcaagcctcacaaggcatctgaggcgaggaatttggcacctctagaacttgttcattccgatttgtgcgaaatgaacggcgtgttgactaaagggggaaagaaatatttcatgacactgatagatgattgcactagatttctttatgtgtatctattgaaaacaaaggatgaagctttgcattactttaagacctataaagctgaggtagaaaaccaacttgaaaggaaaatcaaacggttgaggtctgatagaggtggggagtatttttccaatgaatttgcatccttttgcaaagagtttggaattattcatgagaggacgcctccctattcaccccaatcaaatggggtggccgaaagaaagaaccgcactctaactgagatggtgaatgccatgttagacactgcagggctttctaaggaatggtggggtgaggcagttttgactgcgtgtcatatcctgaataaaattccaacgaagcataaggaagtgacaccattcgaggaatcggaaaggaagaaattaaatctctcgtacctacgaacatggggctgtttggccaagtctagagatgctacattctttgagaatgaatttcccatgaaacatacacctagcacttctagtcaagaaactgtcatgccccatgagcactttgcaccgatagaacacaatgatcaaatgcctgagggaaatcctgaggagcacaacattgtagatactcataagagtaagcaacaaagggttgcaaaatcctttggagatgactacattgtataccttgtggatgacaccccaagaaccatagaagaggcatattcatctcctgacgctgactactggaaggaagcagtacgcagtgagatggactcgattatgtctaatggtacttgggaagtcattgagtgtccatatgggtgcaagcttgtaggatgcaaatgggttttcaagaaaaagcttaggcctgatggtacaattgaaaagtacaaggcaaggcttgtggtcaagggttatacccaaaaggaagacgaggattttttcgacacatactcaccagttgctcgcttaaccacgattcgagtactacttgctctggcagcctctcatggttttctcgtccatcagatggacgttaagacagctttcctaaacggagagctcctcaatgtgattgaggaggtcaaggactttctgtccaagagttttgaaatgaaggatttgggagaggctgatgttattcttaacattaagctactaagaggagatgaggttgggattacacttgtgcaatcccactatgtggacaaagttttgagtcgctttggatatagtgactgcaagccagctcctactccttatgatcccagcgtgctattaaggaaaaacccaagaatagcaagggatcaactaagatactctcaaatcattggttcattgatgtacttggctagtgcaacgaggcctgacatctcatttgctgtaagcaagctgagcggatttgtctcaaattcgggagatgatcattggcaggctctggaaagagtaatgcgctatctaaagggcactatgagctatggaattcactataccgggtatccaaaagtactcgaaggatatagtgactcaaactggatatctgatgctaatgagataaaagccacaagtagatatgtgttcacacttggaggtggcgctgtttcttggaagtcttgcaagcagaccatcttaacgaggtcaacaatggaagcagaacttacagcactagatactgcgacagttgaggccgagtag

SEQ ID NO: 14453 - DNA, 1032 bp, Oryza sativa
  Clone ID: TFbOSC12276j.C1.o1.fg
atgtcggacatagcaaagaaggaattcgccgagcttgccttggatggtagtaactacctcacttgggcattggacgttgagattaaactcgactccatgggtctcggtcatactattgtgctgcccgaagttggcactgtggagtctacgaaggccgagaaagcaaaggcattgcatttcttgcgccaccatctccacccagacctgaagtttgagtatatgaccgagaaagatccactggtattttggcaattcctgaaggatcgctttgaccagcaagggtcaattgtgctcccaaaggcacaacatgactggatcaccctacgcttccaagactacatgtctgtggcggcgtataattctgccctccataggatcatttctcagttgcgtttatgtggcctgaagatccctgacgctgagatgatcgagaaaaccttatctacctttcatcacaacaatatagtgctacaacagcaatacaggaactcaaagtacccgaagtactctgatcttatcttagtcctgttagttgcagaaaggcagaatgaggttcttctaaagaatcattctgctagacccactgggtctatggcagtgcctgaagcacacgccaatgttgttggaaactcgcgtggccataaaagaggccatggtgagaagaaagggaaacgtaagggaagtatcatattcaagggcaagagtaagggtaaacccagaggtaaaggcgaactcaagaaggttacaggtgaatcatctggggaaaagcaggataactgctatagatgtggaggcagagggcattggtcccgtaactgccatgtccccaagcacctggttgagctctaccaacaaagcatgaatgagaaaaagagccaacatgagtcccacttcaccattgagcctgaagctcagattgaaaagcatgatgacatgcttatcaatgttaaggatggtggggacgtccgtatggacgatgattgggacaaccttcttgaaaaagatgatgacatatttggaggcttgaagtaa

SEQ ID NO: 14454 - DNA, 1506 bp, Oryza sativa
  Clone ID: TFbOSC400423j.C1.o7.gm
atgtcggacatagcaaagaaggaattcgccgagcttgccttggatggtagtaactacctcacttgggcattggacgttgagattaaactcgactccatgggtctcgatcatactattgtgctgcccgaagttggcactgtggagtctacgaaggccgagaaagcaaaggcattgcatttcttgcgccaccatctttacctagacctgaagtctgagtatatgatcgagaaagatccactggtattatggcaatccctgaaggatcgctttgaccagcaagggtcaattgtgctcccacaggcacaacatgactggatcaccctacgcttccaagactacaagtctgtggcggcgtataactctgcccaccataggatcatttctcagttgcatttatgtggcctgaagatcactgacgctgagatgatcgagaaaaccttatctacctttcatcccaacaacatagtgctgcaacagcaatacaggaactcaaagtacccgaagtactctgatcttatctcagtcctgttagttgcagaaaggcagaatgaggttcttctaaagaatcattctgctcgacccactaggtctatggtagtgcctgaagcacaagccaatgttgttggaaactcacatggccgtaaaagaggccatggtgagaagaaagggaaaggtaagggaagtatcatattcaagggcaagagtaagggtaacccagaggataactgctatagatgtggaggcagagggcattggtcccgtaactgccatgtccccaagcacctggttgagctgtaccaacaaagcatgaatgagaaaaagagccaacatgagtcccacttcaccattgagcctgaagctcagattgaaaagcatgatgacatgcttatcaatgttaaggatggtggggacatccgtatcgcgcgtttgaagagccctagcaccatgccagcttcaaacgccccctccctcatcctcttcagcattagagacgttgcatatgttgaggctgctatgataattttcttcttcttgatgcagcgttcacattgggaatttgggttaccgtaccatatcctgcacattgcttcttcttcagtatcaagagggggagacctctgggtgctcgggacaaggttccgcggagacgtccgcggagacaaggatctgagccacttgttccactcaaagaatcagttgaagaagctcaacctgaagttgagaaagccccataagtggcaactcaacctgaaggacactatcctgaagatggaggacccagtgccttacgcgtgcaccttggcactggaagatcggaacaccccaactcggtcgttatgggaaatcacgacaatcccaacacctccaagaatcatccctgtaggatgcaaatgggtcttcctccggaagaggaatggccaggtggtgaggtataaagcgaggctagtggcacaagggttcacgcagagaccggtattgactatgatgaaacttactctcctgtga
